United States Patent Application Publication US 2008/0114160 A1 - sequence listing, part 82

SEQ ID NO: 40076 - DNA, 2056 bp, Oryza sativa
atagctctaggaccgtgtttacaaaatagctttgagcaactaagtgtcttttagtgtagtttactgcaaaccctaaccccctatattatggctcccttgtactcccttgcatttattctgcacttgtggttttgtcttgttgagtacggtggttgtactcagtcttgctcaatttttcccaaacccagaagaggagcccctggaagataaaggcttttgtgtctagctcgtgcctgccgtcaagcgcctgtggtcgtcgccctagtcttccgctgtttttcgtttgtcttcttgtgtgctgggccttcgctgcccatgtaataaattaactatgtacgcttccgcttgtcaaactctgaattgtatcaacttttggtgtaccttgcctcctgggacaaggaataatgcacacacgtaaggaacgcccgttgggttatttccggtcgtgacatttgccgatgtacaatagccgatattgttatatcacccttagttgttttataattttatcaatgtttttgtcattgtaaaattaggggggcacatatatatcaaaagcatgttgacagaaaacacgaggcctgggagatctgcttaaatccagtgctggtccaaagctcgccttcgaatgtatgagcgtgccagttgatttgatcctgtaatcaacaagaaatagaagcaaagaaaccgcagttaaatctataaatgatagccgatcggctaggtgccgatgacatatcatttatctttgagccgatgtcatatatgcatcgatcggcagtcattaataaataagaagggactaaatctactcgattggctgtagatattaacaatatataatcattatatcgatatatacttaaatcaagtgattgggatagatcggtcgccatgccgagacagaataaatcacttagatcgaaatatatattaataatgagactatatacgttcatagcataaccgatcagatagatctagcatgtatcggctaatactccgataccactctatattaagatattaaagcaagtagaatatactaaacaaaagcctaatatacttaaatgcagcaagatcttaacgtaaagggcagatttaacatgtcaatcaagcatataggataaaaagtagttaaatcaggtaagatcggctgaaactccgatactaccctaatcagcaaccaagaagcgggctagagattgagattataatcacgactcataagatcaaacttaactgatgcagctataagtatgaaaagaaggacaatatctagacaatcaagccattggatgtgtcatagagtggtagatatcctatataatctaagtcaacatcggtatttaacctaatcggctgccttctattgacggatgttagccgattgtaggttagatatcgatattgccaaggattatgtaggatatatgataactcgacgaaatacataaacaagattagagtgtcataaagatggaagcactaatcccaagaacgcaagccgccataacaagttttacctcttgttgaagatcgaaaccgatgcagctcaacccgaaagcaagaactcgtcgaaataaaactaaagcaaaaaggtagcgttgcgccgggattgtattgaacgtgtgtgttaaaagtaacataggactcgggtctatttatacccaaaaatcacaagatatgtccataacggacacgactactatctctaagaaactctaagataccataagtctgtacggcagacttttgcccaagcatatctccaaggagattacataaaacatcctaattaatagatacaattgccttctcaggactctatccatgtgcggcaatcacctcgaagcgccttaattcaacccgatatcatacatcaggttgcattgtcaaaatcggctgcatcggcttacctagcccgactcagacccagccgatcctaatcgtagccgatctggactccagccgattcctgctctatttctgaactcgatctccgcctccaactatgcttcgatctaatcttctttcccaatgccgatattacaaa

SEQ ID NO: 40077 - DNA, 532 bp, Oryza sativa
ccccggccggtcctggacggggaatttaatgcacattctgcttggaattctattcgggaatttctgggcgcgataagttggtatcagagccgaccttgaccgtaggacaagccaaatggaaaaacctaagagctctctgaatccttttcattgcatatgttctttgcaattggatttgttccgggaaaattgggatctgttcttgtggttcaaggggaaaaatcttggtcgctcgtttaagtgagatttgtcaaaacaagtcagtctagggtttgatgggtgaaatgcattaggccctagcttaggaacatgggttgcaaggtatttatgctcttattgttattattagtatgtatctaatttccccaatattttaccggtatgtgagtctgtcttatttattcgctctcatgcaaaatgatctatgcataaaatttcgctcttatttcgattctcttatctgagtcttttattgctttatttaaatttggatttgagcatgcattgatcctactcctttgtcttctctaga

SEQ ID NO: 40078 - DNA, 598 bp, Oryza sativa
ctagcctagagtgcattttgtatagcgaggtttcagtgagatatgaatactgataagaagctcttttctacaatatggttcaatataggcattacctgtgcatgagaagaagtcattacctgtgcattgcaattataaaagaggtggaaaaacataagagatatacatattatcttcaaatatctatacaatttctagatcttttccatttggaactggaaaaactcacctaatgctttccttccagccttccaggagttttgccatagataactttacaagtaaatataagcgggacaaggtgatttagccccgtttataaggtactaatatagtccgaagtttgattgtgagcagaaaggtgtaacctgtattttcagtttagagattaatttaatttgctctcttattgtagaatggaacagtttgtagcaaataataattgtgaactcactgacaatttaagtatttccagggcaaattgccgaatggatctgaaattgcaaccaaaggctttcagcatgctctggacaagaactactggaatgcaatagcgaaatataacttttagtaaatattcagctgcatcgaaggagga

SEQ ID NO: 40079 - DNA, 549 bp, Oryza sativa
cggcacgggcaggtcgaccccgccggcagcgtcgaggaagccgcaccgcggctgtcacactgcctgtacgacctgatcgtgctcgacattgcgctgcccggacgcaacggcctggaatggctgcacgaactgcgcagcgaaggctacggcggcgacgtgatcctgatcaccgcctacgccaatctcgataccgcgatcgacgcgctgcgcggcggcgcctcggatttcctgctcaagcccttctcggtggcgcagatgctcaacgcggtcgaacgctgtttcgaacgctcgcggctgcgccgcgaaaatttcgtgctgcgccgcgaggtcgaggaacagtccaccgccgtcgagggcgtgatctgccagcggaagcgatgcagggcgtctgcgaccgcctgaagcgggtcgccccctcctcggcgacggtcttgctgaccggtgaatccggcaccggcaaggaagtcgccgcccgcgccctgcacaagatgagccggcgagccgaaggacctttcgtgccgctcaactgcgcggcgatctcgtccgaac

SEQ ID NO: 40080 - DNA, 554 bp, Oryza sativa
aaatgatttcaaatggaaatatggtcaacagcaaagttgatcctctcatcaagatctacaacttttattttggttacttcttcatccgacaaagtgatagttatattattcacaaaaatcacatttctctcatctggtttataaatattaacacagatatgtcaattttgtaaacattggtactatcactttgtcggatgaagaagtgactaaaataaaagttgtagatcttgattagctgtacaagttagctatttatggctttcccatttaaagtcatgtaatatttacaaatgctgtttagatttgtcatattgtcaaaatcaatttcaagctgttggaaacaaagttatatagacaaatgaccaaaataaaagttgtacatcttgataacctctacaattttgttgttgaccatatttcgatttgaaatcatttactatccgaaaatatgttatgactaataaaatgaattattatacaacagctatatattctgtactcaaaaatataaggacttatctgggaaatagaaaaatagtcatggctgcaga

SEQ ID NO: 40081 - DNA, 2504 bp, Oryza sativa
aagcattggcacctgcaaattcctttaaatttcctttaatgaaatgggctactctgttattcggtaggatttttatggatgaaaataacaagtgatcccatatcctatgttttcattgatgtaccttgaatttataattacttcaaatatgccatccaagtttaatccaaaacattgtgtgtttctaagttctattgtggtttaatggacaatgacattcagtttctgtatttatctatttcctgtacattttttgaagttagaatcatgtgttacaacaaagacctttgtactgatccggtaaatatctggaagagaagctaacaaaaaaaattaactcgacacaacaaaacgtccagctcatcaaatctccattaatgatttcagattctattgaacatcctcaacaacctgcaatcaatatagtaagacagaaattcataaatttgcacgtgggatttttttttcttcagtcaactcgaacagttcaactgtattatctcggtcgaatatattgctgtataaaataatatgcaactacctacaattaattaggaaccacgcatatttttctctatgcacgcaattttgcacatataggcacgttttttgcacggattttttcctttttcagaccaagttttataccaggtctaatcgaatgatactgtcactgttctcttcttgaaaagggacatgacattttttgtcttgctcaaatgtaatgctgtttcgtttgactagtcatttccttacacaaaacctagccacgtgcgtgggaaattcggtacaaatttatagtcccctttctcaatagcaattcatagacttaaaaatatgtattacgaaagtatatacgactaaatgagtgaagattgtaattgactgagtagagaaataagtgaagaaattaaatgggagatggttattttcttagagaaggatatttttttacccaatctttacattcaatcggatgtatatagcttttttaaattaggaacttagcccctcaaataactcaatctaaaattcgctcttatgaaaatggttgttattggttgaggcataagaataggtaaaaaaaaagctgctatattctagacagagtttgaataattgttgtagttgaaaggccaagggaattttattatagtgttcacttccaaagaaggcacaagtgagtgaaacagccaacaaatcatgagataagcatggaagattttgaagcgcctgaaaatgagatatgaccgtatttctctgcctttgagtacgcgtcagctgatcgtgtatcccactaataagttagtcacctacctaattgcatccctgcatgcttgatcatgatgggctgattacagctagcgataagtttatcttttgatccttttagattatttctgtgggactatgctctctgattaagctatccagatagctgcgatgccgcagggatatgataattatctaaatacagttgagatgtttgcagaaaataaagtggcacgtccatgaaaactcaacgaccaccatttatttcctaagcacactgggcatgcatcagtgacagcgagtcactcccacggtcccaccgccggccatcaccattgccttggtgacgttttctaatgattcatatgtttatttttcttctttggggaaactaaaataaagttattactaaagagttagttcgcttaattctataaattacaagatatctttttagtatttgattgtcatgtcgcacggcacgtttgccaacatgtctactccatccgtttcatattataagactttctagcattgtccacattcatatagatgttagtgaatcgagatacatatatatatatatatatttagattcattaccatatatataaatgtagacaatgctagaaagtcttataatatgaaacagaggaagtattttttcctttcaatgtcccctttagaaatgcttttttgggggtatttttttaaggaaagtacctagatctattaaacaaattgattttgtttggaactagtgttttatattgatcgatttggcgtcgtagcaatgatatagttttcaaaataaaattgtctaacctaatacatgttatgttaatgccttccagctagagcgattcctaatacttgatgttttcataggaggagcaagatactatgtgtagtgaggctattttttgaattgatagtaagaggttttctaatttctctttgaatagaagctatgtgttttctactgggtatttcagttgaatattattaggagggagatggggatttatccaaagtccttttattcatcatttgaattctctggttatgtgactgttggaagaggatggagatgtgcaaaatttgtattattataaaaataaaaattataaatataagttacaatctagacaacctaacgagatcataaaatgtaatgtataagtgaactcatgcatgtcactggtggagaaaccatctttcgtcggtcggcc

SEQ ID NO: 40082 - DNA, 1400 bp, Oryza sativa
ctgtgccaaacccttgccgctgagctgctcagcccgggtgcatgcaaggtgctcgacacggtgccgcaccgcacgtgcccagccaccatcaacccgaaccctgtcgcccgccgccttgccgtggtcgtcgcccggtgtgccactgccggccgcttaccagctgccgctcggtgagaacttggtcgtcctcccctctcctcatccctcgcgtgccgcgttcctatgttgtcgcagcccgcaagatcgtcggcgccgccgcactcggcatgctgccgcgcgcgcttttgtcgccggtggccgcgctcctccagtcacgccaagcgggggaaacgcttcccctagcaccgacgaagcctcccagagactcaaaacgcccagttgttgcctcggcccagaccaatttcgctagcgactcgagctccgccgccacaggcagctatggccaccgggaaccccgtgagcgccgctgtgtttagccaccttggaacccaccgtcgcactcctaggcaccccacaagccgccgccggcctcctttccgtcgagcaattgccgcttcactggtgcacccccataaacctgaagcctagccgccgcctagaccaccgcctcccatcgctccaggccacctcagccggtgtgctgccgtccataggtggccgtggtcccggctggccccctatcgtcgctcgccccggccgtgtcccggaccgggcagccgccgcgcaggccaaccctagtgccggcgccggcctgcgctcgggacagtgaagggaggaagaagagaagcagagaaagggaagagtgagagaccgacagtgagcccaacccgctagtttaaaatctgtgtcactgacgtgcaggccaccccttgattaaaatcagttctaaaaccttatttaaagttcatatgtgtgcccatggccatgaaatggtcagattgaccaggtcaaggttgactatggccccacctgtcattgactcactgtattcctttacaaaaataattgttttactaaagaaaaggttgtgggacctgactgttagtgacagaaggaatttttcctatacaaaataattccaaattttgattaaatggctgaataggaggttttgcaattaatttgatttaattcaaattggaatctttgaaaggccataactcactcgttttaaatcagatttcaacgagacttttaccaaaattcctctaaaatcaagacctatccaatggcactggttttgcattttttccccttttctaagattttgccctctgcgttgggctaggggagccggccattgacccatcattcgccgagcaaattacatttgtgaagaagaaatcacagcagttgacgagggagccttgactgagcaaggcaagtcactacactcccct

SEQ ID NO: 40083 - DNA, 618 bp, Oryza sativa
atctgtgacgggccctacggcaaagcccgatgagatagataatctctatcggccgtaaactaaagcccgtcaccaatgactcattttccatctttcatttgttgtgggtgcaaaatatatagcagctgtgtaataattcattttattagtcactaatacattttcggatagtaaaagatttcaaatggaaatatggtcaacaacaaagttgtagagcctttcaagatctactatttttattttggtcattattctatataatttttttcccaatagcttgaaattgatttcgacaatatgacaaatctaattacagcatttgtaaatactaaatgattgtcaaattgaaatatggtcaacaacaaagttgatcatctcatcaagatctacaactttcattttggtcatttgtaataaaacaaacaaaaccatattaatgactacatatatcaagtctttgcaataaaacaaaatactccattcattacaatagataagtataaatgcatcagtcataaggttatgccttcggtatgatctgaacgagcatatgccacagactcttggggatcatagtcaaggtcaatgtgaggtcttacatgaagattagggttgttt

SEQ ID NO: 40084 - DNA, 651 bp, Oryza sativa
ttctcagccaattaagccacactatggtagcagtatacatatagttagttgaaaatttatatttataactattaaatttaaatttttgaaactcatgttaactatattttacttttagaaaagatactataggtcaaccatattacaaggaagcgatggtctacgatatgtatttgttaatttatatgtaagtatgtaacaacttgtgtgaatctaaaccaactaaaaagaggactaacttgatggtacaaataaaacatgtttactaacaataatagtgctttaggatttgttaaaaaaagccactaaacattcaattaaacaagacaaaatattttacttttaatttacgtttaatttgttagatatgttttttccaaacaaactaaatagatactttgaaacatgacaaatgtttatacggatcatagataattgtttatacgaatgaattaaatattatatattttaaaagctaacaaatagtttggaaaaattatctaagcaatgccgatgaagtaaaattatggagaaatagtacttatgaaacatggcaatgtcattgagttgatattcgatctatgtaagtttttcgaacacaataaaatacatgcccgcgcaatgcatgggctaccttcctagttcatatta

SEQ ID NO: 40085 - DNA, 510 bp, Oryza sativa
ttgcagtaaacagcatttaaagatacttagttgctcaaagctattttgtaaacacgattctagaactatacaatattatttatcaaggccgtgaacccacacgaacctgccttaacccaaggcctacgatgattcagaccgaaccggcaacccgaccctgggtcccagctcgtcccaagccaacccaggccaaccattccacattttagttgttaagcaggttttaagaattaaaacactaacttgggtacattgctcggcttgcccataaccgagggcgcggctattcgaatagattatactctgatcagaggtgtacatctttacccacaagacacatcttcctcacatgcaaccacgtgccacataccaccacggtatacagacggaagacgtgacatagtttccaacccatcctagccatagacaagagtaccgacccaatcccacctacggccggaacccccgggacaggtaggcaggactgagcccctagcagcaggacaccga

SEQ ID NO: 40086 - DNA, 590 bp, Oryza sativa
taaatagcctgcatagggccatataaaataagttccaagcaaacacaaagagcactgacactgatcacagttcgacagtactgaaaaacaaaaagatcatgttttgagcaaagaaacattattcattcctaatcatccatgtttggctgggaaagcttcttcctttttttctccccataaactttattcagccacatcctcaggattcaggccacataggtccacccccatcttttgcaacaaagataaagaacaatcagaacgggaagaatctgagtttatatcatcttccagagcattgaaatcagattcagtaattttgctgccagggataaggattttttatataccttgccaacttcttcagcctttaagccgattttcccctttgtttgccaattcccattccgatgatcaaatttgagctcttggttggcattaagaagcctagagctctaccttctagtaggattgtataggatagtcttccatctttttttttcacaggagccataggaatctgaagcactactagggtgacttctggacttgatggctgggcttgcaaaggtgcaacatctaaaatctcc

SEQ ID NO: 40087 - DNA, 841 bp, Oryza sativa
  unsure (1)..(841): unsure at all n locations
tcctcgtctgcatgcgatatctttgattggctcatanccntttctcntgttcgctcatatagattgactccattactccgtttaaaagttctctcccatcccccccnccccgggggcngtgagtaaacaatatcaataannnnnnnnnnnnnnnnnnnnnnntgaaggcattatgcacaggacaacgatgtggatgaggacgaggcgggccgcggcgttgcaacaaatgtctaacgcacaaacacctttctgcaaaaagatggcagagtacctccaagagaaggctaacaaggcaagatttctcacggtcattaccaatgggaacgtcagacgaaggtgggaagtcacatgtcgcactaaggggggttttggatcttctactggggtcatcactcatgaagttactctagggcacgaatctgataacaaatgttcgtgctcttgcaataagccgaagcttcttcataagccatgtagccatgtccccggccgcgtgcgctaaaattaagcttgattcaacatcatacgtgttgacgttctacctaaaggatagagttctgaatgcatggagtgctgagatcctcgggtggaggtaccttcaacacctagtcgatactaggggtgataaaaggatctatgtgccaaacttggatttgttgaaggctggtaagggtagaagacagacatgacgcttaagaaatgatatggatgcattcgaagcgggaaggcctgtgaagcgatgtgaggactgtcttcagtacgggcaccgcactaaagattggaagaataacatggagggtacatcttaaacatgggacctaagcaacaacgtgccaggagg

SEQ ID NO: 40088 - DNA, 683 bp, Oryza sativa
tgtaattagctgatcgctctcgcgcgcggggagagccatatcgctcgcggtctcgctctttcaaagagcgagaccgaaggcgtcgctgtcgcactgccgtctcccaggattagcagatgaattaggggacgtgggccacgccgcaacggtatcgcggttggaaagagcgatatcgctggcgctctcattgacacgtaccgcgagactgactcgctctcgctatcgcgtagcgcgagaccgctcctgtcattcctcgggccccacatgtgtcagtcagcacacgccgctacggtctcgcgcagcccgactgtgataccgcacgcgctatcgcgcccttgaagagcgagaccgcttcgtgccccacgtacgtcaggcggcgtcggacggaccacggtatcgctttacaaaagcgcgagatcgcctcgctctcgtgctttcggagcgcgataccgatgcattagtgctccctcactccaaattagtgatagcgccaccgttttcgcgcacgcattacgcgatgccggtatatttccacaaatccgcccctaatcagcttattcttgcaattccattcaagaaaacgattactttcaaaaaattttctgggtgggaagttgtcagctagggactaatgtcagctcatgcccagagtttttccatttaggcccttgtttatatccact

SEQ ID NO: 40089 - DNA, 745 bp, Oryza sativa
  unsure (1)..(745): unsure at all n locations
atggcnaggtgagatcccactactatannnnnnnnnnnnnnnnnnnnnnntgaaaaccccttccgggccatttgcaaaaatcttttttagtagtgggcgagctcgccttttgctcggctgcatgctatggggagaaagcgaaggggtatgaaaatgaggatatggttactattgcacacaaatcctaaattaaatctagttgtccaaaatttgcttgatattaggtgggattttctgtcataaattggatagccactccctaaaaagtgcatagcttaaggtctaaggagtggcaaatagcaacggcactagttttctgcaccatcaaatggaggcagtggaagagaaagccatgcatgcatggcatcggtgaaaagaactaaaaattccttatgtgcacataagttcttgcgccccctacacgcccttgaatttttaatttattttgatctccactgttaatcactcccctctcgtatataagatctatcttttcatacaaacataataatgaagaacgaaggtgaaattttctgttataaaaaattgaaaaggacaaatgtgtttgatagaacaacatttaaaattttcaaataaattgcaatgacatttcaaaagggggaattgcaactatattttattcttcttctccttagaaacaaatttaaatatgtttttaatacacatcaaacaaaattcaagatattttcatggaaagagagaaaggtgaaattgcctctaaaat

SEQ ID NO: 40090 - DNA, 863 bp, Oryza sativa
  unsure (1)..(863): unsure at all n locations
cccccgtggattcattgacgtattgctgtgtctgttctacgtttgatctctcgaatctttcatgttttgntgatctttanattcttctggaccaatgtntctttcatncnnatcccccccnccccaagtggcnnngatgagatacatttctaaggccaannncagctgggacccaaaaattatggggtctcatacagaaaaatcatttgtgtagtagtgagatcattgagctcactcgcgacatcgaggcatcgacccagctattcatctgggccatcaaggaggccaagccaccaccgccgccgccggtgtcaagggagagtggctcgatggcaagggatatgaggagcacatcacggataggggtctcctggtgcgtggtgggcgccataggtgagcatccttgtgacatcctggaacaattaggatgaggtctgtgtggcccataaaaactgtgtgcatgtttaatatcatcttgctagttttgcaagagtggaaccaacttataaggacttctactccaaacatatcactcccaggttaacacttttacatgaagcgagcacgaaagtttaagtggagtggtgtgtgtaagtgggccggtccgtccaacggcctggctacacggttttggaacgtgggttgttagcggttgcgcgtacgggtcagtatgcgggcatatggcgcatggcgcatgtgggtctatgcgaggcacattttttgttcttggacatttgcctatatgattgtgtcgctatgtgggtgagttggaccgatgaggacatcgggtcctttcagggaggtgtatgtgacatcctggcccaattaggatgagggatggtgtgggccattacagtttgtcg

SEQ ID NO: 40091 - DNA, 1263 bp, Oryza sativa
atgtcatatcaattaactcatgtgtaatgtgttgcgatttaaaaaagccacttctgcatggttgtagcttttgtgatcttatatgcaaagagaaaggtaaaatgaaaatatcaaccttgctcacattattcatgtttgtgttgattctttttctaagtgtattttaatttgatctttgtttcaggctataggaaacaccgtacctcttatgaacagttatgctacagaagtcctttttgggaatttgggttcaatcacacttggaattaatatagaaatttattttgctataaaatatgaacattgcggccacaaagagtgttaattttcttccagttgattaaaggaaattctccatgaacccaagtttaaccactttgttcctttgctatagggtacagttctttaatttatcaggtgaaaccccgcgcattgttgcgggaattagtatgataacaataaaaaaataacgtgtaagatagctaaataacatcagattaagtaaattaatatgatttatgataatttaaatttaaatagtatgcagaatggtgattcaaacgtaaaaagtaaggtgatatgactttatggaagaagaaaagtagggagatagtttggaccgtagattaatcatctaaattctaaaaacaattgatgtgatatgacttaattagaggaaaaactaaaaaatataattcgaaccatagattaatcatttaagcaattactaagtgaggatgagctatataagtatatatgatatcataaaacataatgaagatatacattggaacattatgtgaattatgttagatgataatttaacatgtttgtatttgaaaagctcttaaattataaaaactataaagatatagcatgtttgcttgatgtttaaatgtgatgaagatatagcatgtttgcttgatgtttaaatgtgatgattgttagtggatgatgatgtgccatcttgttagtggatgatgatgtgacatctttgcatgttaagcttaaggagttagtgggggataactttatagtaagataggattagtgtatagtgaatgatactgtgtaaatgtttcatctttacatgagctaatttgtgtgtgtttttaaatgcatgcagcgtcttgtctcttcttgtacaatggtgaccacaaggttatatctatactaatataaaaaggaagagttgtacctctccaatcctactggtgaaatcacccggatcaatctctaccgtccatccgccatctgatctaa

SEQ ID NO: 40092 - DNA, 660 bp, Oryza sativa
  unsure (1)..(660): unsure at all n locations
atttctacacgaaagttgttaaaaaaacatattaatctatttttttaaaaaaatagcaaataattaattaatcatacaataataggtgctttgttttgcgtgccggggaggaggaagnacttcttcttcttcccaacacagcctaagagtttttattgtatcaactcttgtaaaaactataattgctaaatgctagagtaagaatgtacctttggccatgtattaagggtgtcggtggccaaaacgtctatttgaaaaaaggtgaaagtctcagggagcctaaagatccttaggatcccaaacgagcaccttacgcccgttcttgtagccgaatccgtcgtcacatgcaataatggccgcattagaacttttgcgtatcggcacaactacctgccttttgctggctaacttccttatataacaaaatgggaatttcaatgaaaattaaaaccacttggccccgcttcttacgctgggagttcatttcgttcattcccacagctggtaaacgtgcgtgacgctttccgtgcccgatgtgcgctttttaatctaatttttgcacccttcaaatcgaaaaccaattgcgcacaatttccgcgaaggttagtgcgaacttaactcaatcaattgccgcgattaaattgagtaccttaattaacg

SEQ ID NO: 40093 - DNA, 739 bp, Oryza sativa
  unsure (1)..(739): unsure at all n locations
tgctgggctttttgatcacgattcatataggccgaattcgagctcggtacccccaccgacgccgccgcggccatcgccgtcgccgaccgcatggtcgcgctcggcacgcacaacggcaccctccacatcctcgacttccagggtaatcaggtatcgtacccacctctttcccttcacgcatagctcgtagggcggtcgcttgctttgtgggattgggatttctggtaggataccgtggaattggatcgtctcgtctctgcgacctgtagcattggtctactgaattcgatttggttgtagaaaactgttaacctattgtttgtggaagagacgtcacaaaggtgaaattctgtttggggacacctgaaatatagattttgcagagaatatatattttaaggattgtgctagactgaggaatatggttcagtgtaaaatgttttcacgttgttggaggggattacctctggtgacctaaaaaatctaggaggactaggattgtctgctaaatatcggatataaccaagctgaggtggctgtgcatttaacaacattgacacagaaatttcaataaatggagattgcccatagcttccttcggcctgaaatcatgtgatggagcactatcagtaatgaccatggcctgcttagaaaataacattgtcatccattaattcaatacttttgcaggtaaaggaaattgctgctcacacagcaactatcaacgacatcangtttg

SEQ ID NO: 40094 - DNA, 742 bp, Oryza sativa
  unsure (1)..(742): unsure at all n locations
gcgtgccngttaggtctcctatcatatagggcgaattcgagctcggtacccatggttagtaattataactatattgtaaccatataaataattataactacataattaagtaattaactacttagagctcgaacctagactcgttgatagccctactccattgggtctttaacaatttctcaagcgtggatagaagatacatactgaaatgtatccatatatctctataatctctgtggaaagaaagaagagaagagagaagcagtcatttggattattttccgttcacaaactcacacagccacattgctttacgcggaaactagcttgcggaaactaattcgcaagacgacacaactttatactacgtcgctagtcttcatgcatcccatcaacacgcgtccacttctgatcatggaaaaaaatgggaatacggccacacggttgtccctttgcttttcttccatattaataataaattaaaaaactatgatttgaaaaaagcttcggatcggtcgactcagcaattagattctcatgcaaccacgtgcttcctattacgcaaattttgctatcggatatcggaacttcacggttgatatagtataccgcacaaagtaacttttagagaagatattgtataaacgtgataatttgtcaatagacaccataccgattaaaataataattcgcggttaatgaggagagaaaaatcgtgtgaaatgtcagatatacccatggc

SEQ ID NO: 40095 - DNA, 689 bp, Oryza sativa
agtgttggccggtcagaccgccgagtgagggccagtcagaccggcggtgtgtggccggtcagacaggcagaatctgagtccgggtctgttttcgtcggatctcgggtttccttgctcgggaaggcatatttcaagtttcctttggattctatcctgagttggacatggaggagggcctgtagaggacaagaccaacccctatataagggacatgaccggttcaattgtaactatccaatctacaatcaatcaatcgaatcgtttttcatattgattttagttttctcttagtttatccatctttgtcgatttgcgccgtaaatcgtccgccgccgttgcgagagtgcgacacctcttcgtatgtttgtcctgaaaacctttcgttttgcccacgagacgggtagttatctagaatcggctccactagccggtttagttatcaaaacccatcttggtttagcttttgctagattgaggtggttggcgactctaggatcatgcaaggcattaggtgctacgatcgtgcttatcaacttgtcaaaaaagttgccaacaatgtctaattaaatgggccaatgaggaagaggtacgatagattgggggaaaaacagctatacacatatgacatataccagatcagggatgcgttatccaccagcaaatataaaactcggctacgtgtcaatggg

SEQ ID NO: 40096 - DNA, 689 bp, Oryza sativa
attttgaagcattattctgcatatccgcgtgattttgaagcattattctgcatatccgcctgatatgtttgaaagtccacgtgctacgtctacatgttgaaccttactatagtctatattggcaataaagtactccattggtttttttttttctaaaaaagacaattaagtaccaaagggcatacagatatctcttttgaatttcatccagaaatagtgtttgggcacacaattatctcttttgaatgtaggaatagaaaactttggattaggataaacatagtaacgcacatgattaaaaaatacaggaaaaatacgacatgtcttcctaagcaagcatacagccttatcttttcgcttatacttatcaagaaaaaaaaataaattttcaatcttaaatttggagttgattttgaagtttttttcgtcgaagtttatttttcagcttttacttttaaatcactaaaaacaagtatgaaaaatttttactcacaaattatttttcgattgcaaacatgccatttggcttatttccttaataggtgtttaaacgatcatttagagccacatgcatcgatttacattggacttttctcaaatagaaaaaaaaagttttgctaaaaaagagagagagagaaatgaaatgaaaagaggtccttaactatgctctgggatactattgaccttca

SEQ ID NO: 40097 - DNA, 540 bp, Oryza sativa
atatctctcattaaatgatatgtggtgaataaaaatattgttgggagtaagaccggacagaagttctaatgattgtagctaacatataaatttataaaaaatgttggtcaaagctaaaaagttaataagtataactaaaacgacgatgaatttaaaaggagaaagtacacaattaatataactacacatacagatggataagtcaccccaaattaacgtggtctttgaataaacgactgtcgcctattctttttcacgaattagctcaaaccattccctggatcaacttaattattggacatgctattaatcaaccactatctatgactcggctaattggtgcatttcggcattcatggtacatctaatttaaaaatgcatgttttttatgggagaaatttttactgcactttaggaaatttgtagtacaccgaattttacatttaaaaaaatatctccactacctaaagtattaaattttatcataaaaaaatatggtacctttgaatatattctcaagatagtaaaattactcttttt

SEQ ID NO: 40098 - DNA, 652 bp, Oryza sativa
cggtgagcatcctgaaggctagaaaacctcatgcatgcatcgttcggaatcgatttccatgcacaaatgagctttcaccccaaaaccacccgctgttaacactggccatgggagttactctgatgtcttctgaccaaaaaacctataggaatggaatcgcaagaacatgctcttcattttatcttttaaccccaactccaaccgagccaccaatcgccgccggtgaacccgggatcgagctcagccatggctgctctgcctctgtgcgtgtgaaaaaggagtcagggacttcagtttgagaatttaaataactataaggttcattacgtaatgttcccaatcaatgacatatggacctaggactgcgggttgatttcctgaaaatcctaggggcctttttgcatattggcctgatactgacaggtggaccccatgagtttaaaatctgaaaatgtaaaaagataatactaaaagctttatattttcaacaggaaaacatgtaaacttataaaatccataaaaaattgaaaacaactcattttagagtaaatcaaatttctgtgaactcaccaaatcaagaactttagagttattgcataaaactagacattcactgtacaaactttgtctctaaaattggtctaagataaat

SEQ ID NO: 40099 - DNA, 602 bp, Oryza sativa
gtattttattatttgcatatgcttattcattccgtatgggcaattattttattcttcgtaatactactctattcgtcaggcccgcactacggcttgcgtatatatcgagtgggtcgatacagaaaatcccgttctcgacctaaccacttgtttacaagaaggatgctggtatttcgcattcgaaagtactgagcaatacttgcagagaaaagcggcttacgaacgataatgtcgtgaacaacagtgcaactagcgggtgctaactacggcactccctccatgggaagcccgtccaagatgcacaagcggtgatcgttgtcaggttcttcgttccataaagcctacgagattgggtcgaaggttctttgtttgtccaaatattcttgacgacaatttcatggtaagaatattttgattatcatgattccttattttctcacaacatttactaactttgttcgcttcacatctattctttcccccccggaaccaccaaggagatgtcaatagagagaacggatagacacccagagggttctaactccacctagccgtgctgtgcagcttggactaccagagcaatacagggatactaaagcgtg

SEQ ID NO: 40100 - DNA, 607 bp, Oryza sativa
aattgctgtagcttctctgacaactccagctgtggagttgtttctgggcattgctaatatatgttttagtctgaaggaaaattctatgagcatcctgctgatgtttctggacgatgtaacattcctgaaaggagctgttcctgttattcgtgtgcttgtcattgctttaatcaagtaccataaattgccattgctttaattcgtgtgttctttcagttcataggtcatgatatacataacagaattggaactttaaaattattttgaatgattagtttatcaaataccattgtttgcaacaagtgttttcagataactaattttaactttaaaaactattttgaacgactggtctatcaaaccgaaagttaaaatatggagtaccacatgttgctagtgtttacagagactatagtggtcactcaagggtaacaaaacaattacagatgtcatagtttctattggtttgtttcggatcaagctttcaggctataatattcaagaggttgctcctttgaattcttacaaaattcatcagcactgtctttcaacatcaagggaatggaatggtgtaaaattgctaagcacgattccttcaacaatgatg

SEQ ID NO: 40101 - DNA, 506 bp, Oryza sativa
ttacattggctatagaggatttggagctagtagtgggttaaactattggacttgctccaaggttgtgttctttccttcaagttgccaacctttctcctcgtttttggcgcgcacgtttctcaagctgctaaacggtgatttttttgcaaaaagtttctatacgaaagttgcttaaaaaaatcaaattaatccattttttttaaaaaaaatagctaatatttaattaatcatgcaataatgcgtgctccgttttacatgccggaggaggggttcagcttaagtatagttacggaaaacgagtatcgaccactagctgctttcgtttacattctgaaagagagtgaagactggttacgccccacgtggatgattccattccagtcgcgctcgcgccagacggtcgatgcgcgcaaagtcagggtcagctcttcaatttgagtaccaactatagataattaaatactccttatatctgaagtattattgtatcctcaaatctgagctca

SEQ ID NO: 40102 - DNA, 1734 bp, Oryza sativa
atgcaacacgaagttggaaccagcagaacgtttatgaagaagagatgtagttgtgtgctacgtttggttgttatttataggggatggcaagaagctgcgcaatctcaattattagaaagagacgacggcgcgtcggactgctagcttcagactaatcaattcaatagcgtcggactgtttcactcgtgaagttaataattacaaagcaacagcatcactttcggcggcacatgctgcataactgtttgctttattaattacaaagcgacgaagtcactttcggcgcagcgcaacggaatcttcaaagtttaattgtgaatgattttattctctgtggcatgtcccgtgattggaaagagaggatgccattttaggtgcgtatcattgcatctctgtgaaaagaaattactgggtaatttaagtcataagtgggtaatttaagtcatattagtaaaaagtaaaagtaatatgcaattttaaccgcacgagtaacatcgaaactgcactattaatttagtttgtgagactattattttttgttagctctcgtacgaaaaattattagttaaccaaaaatcatatgtgttaactggatacaaaatagggcataaaaatatgagatatttatgaactacgaaacatcgtacataacatgaagaataagcagtacaaaaaaataatgttcattgctagtaatagaaagccaaaatcacagcaaggttcagataggtttgccaggtgaactgaaagacgtaatgttcacttctactcgtcatcatcatcatggtcagtcgtagtcctagatgttccagctcgcttttttgtagttttttttcttgctcgtgcggcatgtcgagggcctgagagtcacagacggtttggctcatggagctcacggttagatctacgcgggtcattgtcgtttccttcgccaacctcttgttgtgtgggctgtgtcacatggggcgcatcatcaatttgtgaagtccgaagctcgttgggtaccgatgacgaccctcccccgaagctggacatgtcgccttatgatgcagtgtaaggcctaaaccctgacattagtttagggcgaaatgaccctacagaagcaatgtagatatcaatgaaattatcaaagctgtagcacgcaacaataacacaaaaaaaatccaaacctgttgacagtgcttgcatatatggaatttcattaggatgcgaggaatattgaccaaatagccaatcaccttgttgcaagaagtccatataaccctgtactccaccaccaaacgacgtgccttgcatccatataaaatgtcacggagttattgtcttaagttgaagtgggagtcatgtatggcatgaaagtgccatcgatatatgtgtatggagaatgatggctgagcgtaccaccgtaatccatggattgtccttgccatgggttggtgccatatgtaggtgcatgcagtggaaccgactgagtaggccctgttaatatcaggaagtaaattgtcaataagattcatatacatgcaaaattaataaattgaaataataaaaatatgaaattagatgtaagtggagactgaccgcctaacgacgtaaaccctccttaactgataaaatctgcagacaattggggtatggtagggataccttggctagtccctgtatatgcaattaattagcaaaaagtaaaattacgagtggacatatgcatgccaatatggtactgaatgtaca

SEQ ID NO: 40103 - DNA, 2114 bp, Oryza sativa
gttcaaagttcaagagaacatagatttatcagccgggaaaggaaataaagagcaaaaataggcttgttattaattagttgcttccaaaaataccattttattatggaccatgcatgcccattatgtacttcatgcatcgcaaaatctatttcgagaggcatctcgatttagacttaacgagcgacacggacagttacgtgggaagtactagtagcgttacagacatgcatgcaagtagtttttgctattaggttgtgcatatttttttcttcttatgaaattttctcttaaattacttatccgatctataatccgattacaccgttgtggtcgtaaccattaaatctttacaacaagatctcacatgattatattttgatgaaaaatcacaaattacttttatgatatatctaaattacttttagatttcactaagttactttttagacatacaaaagtaaattcagtaaagcctaaaagtaatttacatatattatagaagtaacttagaacaaaatgaatgtaactttggcatgtcatttgaagtaaatccgttgtagagataaaaacatgactctatctagaaattaaattaatcagcacaaattatggaattaactaaaaacaataataaaactaatcacctaaattaatcagcacaaattatggaattaactaaaaacaataataaaactaatcacctcatagcattatgaatgtataggaagtattttaatcaaatcaaaaagtaacttatatatatgataattatatatatgataacttgttcaatgaaaaaaggtattaattaaagttactttctttttttataagttacttctatagtatatgtaaattacttttaagctttactgaatttacttttgtatatctaagaagtaacttagtaaaatctaaaagtaatttagacatatcataaaagtaatttgtgatttttcatcaaaatataatcatgtgagatcttgttgtaaagatttaattattacgaacacaacgatataatcggatcgtagattagataagtagtttaagagaaaattgtatttgaaacataggtggatggtgtctcttatagatggagtggaaaccagctaccactagctgtgtagtctcgtccttcatgcatgtttgcacaatcctgtgacttgcacaacaatataatgtctcacgtaaattaggaacaaatatattaccattgtgtaataatatttccatgtttacaaattacaagatcatagtcgtggccaagttttaagtcagcaacatatgcatacatgcatacggtcacccccaatgtcacatacgtctccatcttgtactcatagtacatacgtagacgcaggctgtggtgggcagggtcgccggcgtggcttcccgcgccgccgtgcgagcggcggccggcgacgagctctcgtgaccgtcaccggtgggatcacggtgacggacttgctggtggcgatgacggaggaggtggccgtggcgcccctcccgccggcggaggcgccggccatcagccacacggcggcggcgttgagcggcaaggccgtcttcgtcggcgccgtcgtggtcggatgccacatcgctcacgcggtcgagcggcgccgctactggcgtcgccatcgtgacagcgacggtgtgtacgcggcggcgcggtcgctcgccgccggcgacgtggcggcgtggcttcgcgcgtgggaggcggacaggattaacccacgcgactaacagagattattacaagtaatggtttatacttacatcagtacctatgttactaagcattgaagtaagatagaaggcgatgtccttttcttttcccaaatttcaaattagagtatagttgttttcattcattttcctctcagagaaaaagggacaaaacatcacagttatttcatctgaacaggcaacattaacatgataaatgtacatgtttgtacatacgagtaagctccaacaaggactttgtcaggtacacagattgttctgatctatgtgtggctttcatcaatttataaatgtagtaagggtgtactttgcagctgcttgtattatgtcctaagcatatcttggggaaacagactgcaggaatt

SEQ ID NO: 40104 - DNA, 589 bp, Oryza sativa
cgctaatcggcaactaggaagcaggctagagattgatattctaagcacgacttaatagatcaaactcaactgatgcagcattaagtatgaaaagaagaacaatatctagacaatcaagctgctagatgtttcatagagtggtagatactttatacaatccaagctaatattgctatttaacctaatcggccgccttctaccaacagatgttagccgattgtaggttagatgacgatattaccaaagattatacaagatatatgataacttggcgagttacataaacaagattagagtgtcataaagatggaagcactaatcccgagaatacaagccgccataacaagttttacctcttgttgaagatcgaaactgacgcaactcaactcgaaagcaagaacccatcgaaacaaaacaaaagtaaaagggtggcgatacgccgaaattgtatcgaacgtgtgttattttattacatggggctcggggtctatttatacccgagaattacaagatatgtctataccggacacgactattatctctaacaaactccaagatacgataagtctttgtggcagacttttgccca

SEQ ID NO: 40105 - DNA, 842 bp, Oryza sativa
aacgccgccgccagccttctcatcgtcagccgtcggccgccgctagcaagcttctccccgcaaggccgcccgcacgcctctccccgcagcctctcacactgggttgagatgggaaaagaggggatataggtggaagaaactgggttactaatatgtgaggtttatgtgggttgcatgctgactcggccaccatgttagctaaaactaggagcagtactacttgggaccacccggttttgtaagattattgcagggattaatttcaaactgtgcgacaaaatgatagaccaacaaaaaacttattccttattaaattgagcgggctccatgcacaccggaatctcatagcagcctgttcaggcccatttcgcatgcaggtgagattccaagtttcggcccattaacacgttggtgcggatttgctatggaataagtccacttgcagtccctcaattttgcgtcaagtttgtttgacatcctatatctccaatacagaaatcttcacccgtaaactatacaaaaccgtgtaatttgggtcccataacagtaagatgtccagtttcactgacattgcatcctagttagcaaaaagaaaataaaaaatgtggggccacgtgtaagtgagcaaaaatgtggggcttgcgcgctctctctttctcccctgctacctgcttccttcccaaacggcgtggcatggcctcggattggccggcggtggccatgtggatgctgacgctcgggaggcgtagcgcggaacctaagcaggtgctcatctatgttgtcgaggatatggaagaagtttgcatggatgctgtcgccgtcagcgtcgtcgtccccgcccc

SEQ ID NO: 40106 - DNA, 834 bp, Oryza sativa
cggtcgcaccaggttggaatttttatttgtttttttcctcctcatcatcggcccctttttttttttttttttctttctcacccttcacttcttctcccctcctgtgggctccaattggattattagttttaaacagatggatcaagtactactactaccactttttaggtgaattcttattttaaatacatatatcagaagaagggaggggaaactgaagaatctcactctgctcttctttctttctttctctaattaaggtatctccaattaattcttgcttgaaatatggatggatggatggatctagtggcacggctatttattacagatggttcaagtaagactgggattatgggtggaaagggatcataggatatggttcaacttgaattgttttttctttttaaggatggtttaattactgccattttaattcttcggatttctagatggcaccaatggcttgaaccgtgcatttggaatggcacgttatcaatcacatggtagtaagttttaaaatgagtacatagtttatccaaatactctcaacttagcaaacggtttattgccgacaaaatacatttgcttgtatcctagttaggaggataattcgtgcaagaaatattcaattgtttctcgtagcagtttaatacgtgtgaacttttcgttattgtgcagatttgaacacggtaacaaaaaaagggggagaaaaagcatgcacgatcatcttaagttacggaactacctttggattgttatgaaacatttgtgtgaagttttgacacaagggcattagaaaacaacaagcattatttagtccactaaatccta

SEQ ID NO: 40107 - DNA, 727 bp, Oryza sativa
attcctgcagccctatacaataatttatgagttaggatcgacctactccatctcttccagtataataaatttgaacatacatacatttttctgttctagatcacattttatactaggttggttttttttgacgaagggagggactaccctaaggttgaggtcttgacttttgttgaaattaattgctgaacaatttttctcatcttgtctcccacgaaggggaaaaggctgacgtggctgtgacctgtgactggcattcatgtcgggtagtattgtttagttaagcttgttcaggcttcccacaagacctgcgcctgcaagctcatcctcgtcacggttgtccattcggtgtagtttttcctcgttagcttgggataccacccactgcaccatgacctctttgccaacgttacccctcattcggccatcgttgaggcatgcatgtggcagtggtgagcgggagcaactcctcgaccctgtcaagaaatggttctcctatccaggcatagagccatgaccgatcttcgatgcttgctctaataccacttgttatcgccagaacagatgaacacacatgaacatttggtgtgcagacaaagcgagagagatttggcgctgcgaactgcattgcagcttttcagttttctcttcctcttattgggatgaaaataaaaatggaaatcacgggctaccaatatgcccaagactcaagccacgacgtacataa

SEQ ID NO: 40108 - DNA, 529 bp, Oryza sativa
agtgaataccatatatttaaataaccaaacaagtgatactacacatatttgataaaaacgtattttatctataacatattataatatattttcttttacccatagcaaaacatggtcattttgctagtattttagaactttgactatgtgtcatctatggctctaaaaatcatcttgaattacaacttatataaatataaagaaaaaggagaaatattgttaggtagtactccctccattccaaatttatctacatatttcataggtacaccaagaccaagaaaagctaataactctctcatactatatttactctagcaacaaactcaatgcatgcaccatccccaatattttctagccaatagcaaatcaagatattgcatgtgggttataaatacttgtgtgcatagatgcatgcatcaatgtccatttactccaatgcacaaataacgaatagactctatgagcaattacaatcaagaacataagcttaattagggatgttgttcttacttttgcatgtacataa

SEQ ID NO: 40109 - DNA, 831 bp, Oryza sativa
aggctagatagaaatggcggtccatattttgttggatatggcgatccaactttttgtttggttgggtgaatatgatgatacagttttttgtttggttgtagggatgaaggtggatttggtgatccaaatttttgtttggttggagggagtagggtgaatgagtaggtgtggtcacctctcacttagagagggtgagtataccccatcaaatttatatatactacgaatcacaaattccccaacaaatcacaaattatatatatactacaaatccacatagagaaaaaaggaaaaagaaaatgagaaaaaagaaaaaaaagaaaagaaggtctcgcaccccgtcgctgccgagctcgcctctcgctctggttgacctcgccttccaccgccgcgttcgcatctcgcgtcgccgccgacctcgcccctccccaccgccaccgctgacctcaccttccgcttccgctgcagtcgccgccgacctcgccttccgccgccaccgctcttgcctctcaacccatggctgtcgctgacgcacggtgagggggtgaagcgacccgcctcgggcgctcgccctgctcgctcgggtgctcaggcggctacatccgagcaaatcactcgaatccccccatccagcatctgagagatatattcctcttcgggccaccctatcccacttccgcccaccaaccaaacaggcaaaaaaaataggccgccatctcctatccacccaaaacctcccatccaaacacacccttagtatgttgtctcatcccgaatttgtgcactatattacatcaactaaaccggccgacacaaatttgggatgagaca

SEQ ID NO: 40110 - DNA, 729 bp, Oryza sativa
  unsure (1)..(729): unsure at all n locations
tgggcccttgaattccatcatatannnnnnnnnnnnnnnnnnnnnnnaatgggaatgatctgtttgagattgatggtacacttggcatctacttctgtaatgatgatgcgacgatcgtagatatttgggtactgcaggattacaagacagaattctggtctctcaagcaccggattgaattgccagtcccagatataaaggggaagcttgatgatggtgatgattggagtgcgatggtattgtctgaggacggggatgtgcttgtgctggtttactacagacaatggctgctttacattggtactgatggcaagctgttggcgagttttcaacatgatgttgggtgccactacaatactcctctgaagcttaagcaaagccttgttccacatgcattctttccattgttaaagggttatgtcgtgaatgctcgacctttcatctgatgctggagcggctttgctagttgttggactcgtcttgagatggtttcttttcatcctggtgggtagcaacttttggtgctgtcttttagaggttgtggacactgttatcttgtgggatgtcaccttgctaaaatgtactcaaaccctgctgaactatgtaatatgcagtagctggtttgccaatctttttcacaaaaagagaaaaaattctgatgtctgttggataaggtggagcttcctgttaacatttgtttccgattccctgagtgcttttctattttat

SEQ ID NO: 40111 - DNA, 739 bp, Oryza sativa
  unsure (1)..(739): unsure at all n locations
ctgcggcagttgagatccgatnactatannnnnnnnnnnnnnnnnnnnnnnttaagcttgaggacatttcaacctgataggctcatgtcaaaccaaccgttgaaacaaatccgaaattaagtgattaccagctagagtgacagctaaaagcaagctcaacattgcaatggggaaattgcgattagggaaatcttgcccgtgattgcaatttcggaacaaaattttcaaaattttgccccctctccaccggcaagcatatatctcacccgaaatttctccttttttcatgtttttgtgaatttggtcaaagcttattctaaatcattcaaaattcatcaatttttcaaataaattcagtgattttggttctttcgccccctccccccacggaaaaaaccccaatttctagaatgcaaaccctgaatattgcagtaaaactgcagtgaaatacttggtgcacaaatgtcattacgggtggcaccgcttcaggttttttttttcttttgcaaaaaatttgagagcattacatcacctgtggcagttgtagattgatgcatccttccgctgcttgtactcatggttctgttgaaccttagcttgctactgcttacaattgagcaaagcgtacctcatccgagcttgctatcttctttaactcgagagcacttaaattagtggtattccctacggtgtttgccagtaaattagaattagttaactcaaacagtacatgatatat

SEQ ID NO: 40112 - DNA, 737 bp, Oryza sativa
  unsure (1)..(737): unsure at all n locations
gtggcncggtgagtatcccactcacttannnnnnnnnnnnnnnnnnnnnnnatattacaactttcactttccaccatactcattgtgcatttatttaaaactccagatcgatatgattgcgatatgaacctgggacctgttccctcaatcaattcgtatgtggatttctggttgaaggtttcagcattttcatgaaaattgtaagaaaccgagtagcaaaaaatgctcttgtctggttacatttgaagaagcagtggttaggacctctttttgttggataatcacattccaatgtgcctttgcatgaatttggtgaaagtttttaaagtacttcacttgcggcgctttggtccaagtctaatgttgtatttcagcttttgctgtagtgcctatgaagtgggatgcatgtcaatttacttcattgacagttacctatataatcaaacccacaatctgcccttctatgtctagagtacctacacacatgcatcccctgttctttgaatttctttagaaccaaagggaagagcctgagtttcaagttttcttatcgaaaaccagaagccacagctgcttatcaacaggttatctcaaatgcaaagttccaaggctgacagctcatttagaacaaactgaaaacccaagtagcaaattccttaccaatgtctctacttacaatagaagcccagtcgtcctccttcccatccctcactcattgcacacagcgcaacatccct

SEQ ID NO: 40113 - DNA, 1082 bp, Oryza sativa
  unsure (1)..(1082): unsure at all n locations
gtgggaggtggttcccctactatannnnnnnnnnnnnnnnnnnnnnnnaagggccaatattttggggaatggtccaagggagcattcgttctggtgacatagggtgagaaaggacatcgtattccgcgcgcacgcttcccaaactaaacagtacgttttttgcaaaaaaatttctataggaaagttgttttaaaaaatcatattaatctatttttaaaatttaaaatagttaatacgtaattaattatatgctaatggctcacctcgttttgcttatcttactaatcttcttattctcctcctcctcaaactcaccctaaggtcaaactcaccctaaggatgctatgtgtgggttggatacaccctgctctgctgtagccttgaagtggtgtgttgcaaataaatgtaagcagcgagcaaacatttatactccactctctatagggctattgtctccatatattcctagatagtacgcatgttgccacagaatgttagcgtgtaacgtgcagtataaaattacatgagaaacaactattcttgtaggtagagaaactatggtaatctgaactgttaaaatgccatcatgtcaaaaataataagttatgatgtaatttctagtgatggattctaaagtaatagttcaaatgcgttgttctttttagattacttcagattatatgttttctaaaaagttttttttcaactatattgcttattataccactacttttaatctatttaaagttttttcaaagaatatttagtttatccttacaatcaattgggaagatagtatgtgacaataattattacctgattatatttctatacgatttggaaaacatatctttaagctattttaagttattttaaaaaatatttaatttatccctataatcaagtagataatctgagccaacaattgaaattatcgattgggattatacaaaagataaagtctaggtgcacctaaactcttaccaacaccacatattatattgtgagtacatgtagatttttatatatttaaattaaacggttgagattattgttcggaagagttttataaagaaaaactt

SEQ ID NO: 40114 - DNA, 1729 bp, Oryza sativa
aaaatgtaaaaatgctgccaccgtggacggccacgtaagcaggttagtccggtcaaaggtgttttggatctaaatgattcacttatacaagatcgtggatcctaataatgattttcctagatcatggacctaaatgacaccccgttccaactttaagtactgacggtgtactttactcttttcctttttctccattgaaatatatgcatggctaaacgtaccatactcccctcccccccccccgggtctctctcccccctttggagcagcggtagatatgtaagtacacgttatttcttctttttttttaacataaaactttacaagtctcgtgcaatatatatacaaatattttatctattttcaaatggttgtcatcatatatacgtgtcttgtacgcttgaaactttgataactctattttaaaatatagttatacttaaaattcaattttatctcaaactatttacggctgtaaaagattaattttcttttctgttactttcctatcctacccctatcaacctatatcacaccctccgtttgaaaccgtttaagatgaaaatgtttaacttgattttcattagcacgtttttcaaactttaaacggtttattttgtgcaaaaattttctatatagaagtttctttaaaatatcaaataaatctattttaagtttaaaataattaaaactcaatcttacgtgcatgtacttaattttgatattcatcaatttcaatcaatctcacaatatttatataaaaattataaaaatattctatcataaaatatgttgcaccacaagtactacaaattaaatgcagtcaacttttttttgttgtaatctaaccattttaaagctattgatggttaaaattgaaaacataataggctgcctaattaataagccaaagccaaaaccaaaatttaaattttcaaacttaattttgaagttaattttaacatattttcaacacaattttttatattaacttttaagttgctaagtgttgaatagtcccacattggttgtggaagggcaagggacctacttcttcattcccaaattgatcatcatgtaatagaatccaaaatttctcaaattgatcgtcatataactgcatagacaccgaattcattggaatacaattaatactgtatgggagaatgtgtgcatgctagggtgtaattggtattgggttttaatcgatgcatgcattgtgggagaatgtgtgcatggtgtcttggttgatgtgatttaaattatccttggtcttggtgcataaacttatgatgatcaatttgggagtgaggaagtaatagtatataagtgagggagcccctcacctcattggctaacttttagggtgggaaatgctctttatgatcctacactaagaatatactccctccatactggtaaaaaatgacgtttaggacaaaatttagcataccaaaaagtgattaattatgggtattttttcctgtctgcccctattaaatacggttgcgcgtagaattcgatacgagaaacacactttactcaagtggctagtgcgccgaggctggattccgcaggacccaggtacgaatcctggtgggggcaagctggttgcttggttttgcatggcactgttttgggcggggttagatacttggttggctgcatggcgctcgtgcaggggcgtttaggcgcgttttttgtttcgcttttttagtttgggttcact

SEQ ID NO: 40115 - DNA, 5588 bp, Oryza sativa
acatggctaaaatgcacttaaatatttgcctatgaaaaaagtacaacaacatgtagtcaaattaaggtgcttaatttgatactatcgacaccttaatgatctgctaacacacttgtaatcctaaaatataactatttcctagctacattttaaaacaagggaccatatatttatatttacagagaaatttatcactaatacaccaatcgtgtctacgtagcatatttatttttccacatgtggtggttaacctcaatcatttatcgtatatagcaactaaatattatggcttgtccatgatactctagcaccaataattcatcaagtataaccattcaagaacatggttaaggaatgaaatttagttggctgcttgatgcttttttaggccattttaagaggataataaaaaaaagttcctttacgatgcaccatactactagtgatctaacgattaagatctattctatactaaaaattccatacctatagtatgggttatatatatcactagtatgaccattgaccagtataggtatattatggataaagaaagaaatggcatatatgtattttgttatgtacacctaaggtttgcccttgaactcgatctatcccaacatctccagcaaaggctcccacttcaaagtccccaaagattaaatggaggctacccctatttggtgaggcctcaaataatgactccattccagcagtagccactatttcttatcctctatatttttttttctcttctattttgacatatactccatatttactccatgcttcacaccacaatgattcaaacatagatatttctaatgcataaaattcactatatcaaatccacaaattcaaacaccaaaattgaaatttaaattccgaagtttctcttcatgttgctggcaactacgtcaacacattcttcatcatgaatctccgttgtttctaccctacccgattcatcaacaaacacatcaaccttacatcaatctttgtggtctgaggtaggcactgcgatctgtcaaccaccttgcactacactgccaaagttcgtctgagactctgaagaagttcgaaatttattattggaacctcctgaagacctttgcagcctgaacataaacatacctagtatagccaccagatgcaaaaacatcttggttgttctagatattgttcaaccatgcgttgctacggaaaactgttgctacggaaaactaatactccctccgtttcgaaatgtttgatgccgttgactttttagcacatgtttgaccgttcgtcttattcaaaaaatttaagtaattattaattcttttcctatcatttgattcattgttaaatatatttttatgtagacatataattttacatatttcaaaaaagtttttgaataagacgaatggtcaaacatgtgctaaaaagtcaacggtgtcaaacatttcgaaacggagggagtattatgataaacaatcgagcagagttcaactttcagcatccaagtgctttaagaaaatattctccatgctgcgagcgaatacaatctcgtgtcaagatacagacaccaggcaatttttcatttcaaaacaacctatttcacgttataccaggtaaattatcctcgttccaaatggccccactggaatttattttttgtatgttccaaaggagcccttaagtcgctagcatatacttccatcttcatcgactgtggatcagggttttgctttctatttaaaaaacacaaccaaattttgataaaaataaaagtataaaatgattgaattattattaaccggtactccgacatgttttccgagtcaaaattaaatcggcgtgtttttacgaggaaagagatcgattagctttcggtaattaattacgaaccgagtcgagtaggtttttgcacactccgatcgatcgacggcctctgtcgagttatcaaaaccggcggcatcgtcgtcttctccccccatcgatcgatccatcgactcaagtctcaagtctcaagtgatctttttagctagctaattaattttttttagataatactctctccatctatttttgatagtcatatttctaaatctgaaaaatctatttttgataggcatatttcaatccaacaacctatcatcttaatgattttctcggatttaatgcatgactctccattcttccatacaagattggttgcatggacatcgagaaatgtaaatattaatgaatcgcttgtttacgaggaatgactagtagcatgtttaaatgaatgataagtaaaatcacttatcattgttctgtgtgtcaagataaaatatgactataaaaaaaaagtagatggagggagtactagctagctagctatagttaataagtagtcatgatgatgcgcgcggtggcgacgtccctttgcatgctgcgcgccgccgccacggtctgcgccgccttggccacccgcgccgccgtgcgcttcggccgccgcctcgccgtcggctccgtcaccggcgggatcacgctctccgacatcctgctctacatcaccatgacggaggaggacctctcgccggacccggagccgacagccacgtactacgataagcttccgacaaagcgagcgctcgccgccggcgacgtgcaggcttgaggcggccggcgacgtacggtcaagctgccacatgtctgagagatattatttgacttgtactaatacgtgcgagtgatagtctcagtaattaataagggtagtgggttactcgtcctaaccggagaccacctcatcccgtatataattctcccttagttaatgatgtgtgtcttttttttaatctctttagtgatgacttatatcttttatatattttgaatcacatattagttttaagattaatttgcatcattgtactctactcaaaatatgtgacaaaacgagacccatgttggatatattcaaatatttcattgatccaaaagtaatttatttaaattatggaagtaacttagatatgcaatagaagtaactctatatagcattacaaataattacattacgactgagttgatgtaagaaactatatggaataaattcatcaactatatggaataaattcacaagcaaagtgttcagaagatttttaagtaaatatatttatgaaagtaaattcaataaagtcagaaagtaatttatataaatcataaaagtaaattagcacaaaatggaagtaagttgttacaacattagatataaatccgttatagggacaaaaattaaatttaatcagcataaattatgaaattaactaaaaacaataaaaacaataatagcaaattaactaaaaacaataaaaacaataatagcagtaatcaactcagagctttacttatgtgaacctaattaatagtctgtaaacatatgaggtataaaatgaccattataaaagcaaacagagtctgcattagttaaacagattgagattatgcatggttggaacaacagatacctattagtgttatcttatatttgaacccaatatcttggaagcaaggcagtaacatgagctatatatgcacagcagagagacaaataagaaggatttgagcaaatttccatagagcagaaaatgattcactcgttgcaacaatttgtctcaaggacatgaatataagaatgttagatctctatcataccttgggtacgatctggtcagaaatctgcatacttgttaacaaccaaatttcgtaaattctatcattattggcatcggagatgaagatcagatcgaagtggaatccaagatgaagatcgttgcggaaacagagtaagaatcggctgcagtccaaatcggctaaggttaggtcgacagagttcgagtcggacggggctagccgatacagccgattagccgatacagccgattccgataatatgactcggtgtacgtcatcgggttcaagttgatgtgcttcaagatgattgccacgcatggatagagtcctgggaaggcaattgtatctattaattaggatattctatgtaatttctttagagatatgtttgggcaaaagtctgccgtaaagacttatggtatcttagagtttgttagagataatagtcgtgtctgttatggacgtatcttgtaattctcgggtataaatagacccgagccctatgtaaaaaagaacaacacatccaatacaatctcgacgcatcgccacactttatgctttacttttatttcgacgagttcgtgctctcgggttgagctgcatcggtttcaatcttcaacaagaggtaaaacttgtcatgacgacttatgttctcaagattagtgcttccatctttatgacactctaatcttgtctatataattcgtcgagttatcatatatctcacataatctttgataatatcttcgtctaacctataatcggctaacatctgttaatggaaggcagccgattaggttagataatgatgttaacttagactatgtgatatatctaccactctatgaaacttccaacggcttgattgtctagatattgtttttcttttcatacttaatgctgcatcagttgagtttgatctattaagtcgtgcttagaattgcaatctctagcctgctttctggttgcttatcagggtagtatcggagtttcagccaatcttatctgattcaactacttttattctatatgcttgattgacatgttaaatctgccctttatgttaagatcttgtcgcatctaagtatattaagcttatgtttagtatattctacttactgtaaaataaaatcttagtatagagtagtatcggagtattagccgatacatgctagatatacctgatcggctatgctatgaatgtatataatcctactattaatatatatttcgatctaagtgatttatattgtctcggcaaggcgaccgatctatcccaatcatttaatttaagtatatatcgatataaggattatatatcattaatatctacagccgatcgagtagatttagttctggtttgcttattgatatttgtcgatcgatgtacacatgacaccggcttgaaataaatgatatgtcatcggcacctagccgatcggctatcatttataggattaattgcggtttctttgttatttcttgttgattgcaagatcaaatcaactggcacgctcatacatctaaaggcgagctttggacctgcactggagttaagcagatctcccaggcctcgtgttttctgtcaacaatactataaagacatttgccccttaaattaaataaatacattcagatattatgagaaaaacaattgtgcagagatataaaattgtgctaaaagcagcaattaccacccatatgaacgtaccagcaaagcgcatcatatcatcaaccaaaaataccgttcttcttaccactttcttactggataactgaaacatttggtgcatatctaagatcaaatatgccgtaggccatgaccagcctggtgattacatggtgcagtattttacaaaataatatcattgatcttacattagccacccatgagcaagaagaaaaaggcaagattggga

SEQ ID NO: 40116 - DNA, 592 bp, Oryza sativa
gatagtaaaaagggagaacactgcatgcatgtcatgcggtatgcacatgccaagatagcagagacattgggcggagatagcccccattcgatctagaagcaaagcaagtatgctcgaaagaaatcaacatagatatacattattttataggatgagactaccgatcgggcgccccatccaagcgtgaaaaaatcggacgctaacgtcagcataacgtcagagccatgcatgcgtgcaaaaccactttaacttcttttttttcttaaattattatccaaatcatgatcggattacaccattaaattcgtggcaattaaatattcaaaccaagaccacacatggatatattcggacgaaatttttttagttaatattcaaatcgggggttatttcccttaatataaaaccaatattttagcaaaaagggaagaatgtttcagttccctgtaccattagatttatacaatagtgaaccattgtgagtacacttggtggaacattttttgtggaccaaaaaaccaaattcccttaatagagaattttcaaaatatgtgggtgatttgttgcaaaagaagttttgtttactgcaaca

SEQ ID NO: 40117 - DNA, 979 bp, Oryza sativa
aatctggttgggatcctcgtatggcattttcaggttccacccagtctccccattagggttaaaaaaaggatatgccaaaggatcataacaaccatggtatgctttgatataattgggcttatcacctttggcacgtaccaagacatgtctatctaaggttctcactggatcatccccctctaacctgatagtagcaacctgcgaggccgtgggggcattatatcttcgttggtcaggtgttacattggtgttgagctcaatcatgtagtcatctaaattaggcatggatccgactcttttgaaggtttgtacgtatgggttcttggccaaaatacctagaatgactcggacaaggttgatatcaaggtcaggagacctccaaaccctatgagccagtgcatcagcatcttctgtatcataaaagtaaagctgcatatggcgaggaccttgagatcctggaaccaaattttccaggcgatggtacaacgcaccgtgtacatgaaatgtatacacaccagtacccgctgcagtgctgactcgttggtcaagggtctctccaaggctcgtgaatgagaaatgagagttgaagtactgtatgtgctttctgaaatactttgcatcattatgcacctgactggtaaacaaccatattaactcgtcaggcactacaggaatcttaacatttatctttccctccctacaacagaacccaggagactcaaattgaaaccttatcgcatggctgtgtttgcaatcaggcactttttttaagagatggtgtgtcttcgacagtttatggtacacacgatcgtgtggatcatcagtaccaatcccgttaacgccactaacaccaacacgatatgactcgtatccatcgtcctccaaaacttgactggcttcatcaaaatcattgtccgcaccttgttcgtcctcaacacgacctgtggaatgatggttcattatgcatatgctcaaaatt

SEQ ID NO: 40118 - DNA, 843 bp, Oryza sativa
tgatgggaatggaaaaaaaagaggggatatgggttgttatatttcttgtttgtttggtggcatgtgaaacagtaggatcttgatagcggaatgtttagtctgaatgtgtgatccctctgaatctctttgttgagggcaccttggtgctaaggggaactatgaatcatacaagttccattccacacagaaaagagattggaactaaagtgaaacttctgtgcacaatcccaccatccaattcatacatatataatttcttgcttgacctgttgcaaaacatctttatgagcgatcaccatttgctaagtgaacaatgagggttggcaagtattgatggcttgcccttattattgttggctatttttctggtccactttgtgcaatttggccatgcaagaccatagcaactggttagttactgcaactagtgattcttctaatcctactcaagaagagggaaatgccccaataccctgccctagctttgactgtgagttcattcaaactattttgtacggtggttttgcctgcatggcatgttgaccaccagaccactaactaaataaaaaaagtaaagcaggactagagaggctgcaacgggaatgaccaatcaataagcaaagatgaagcataggcctgtccatctgtgtgcctgctgtaattttcttatttggttggtggtcgattttattgcacggtcatgtgtacaggaagaacctaattgggtctcagtccttttgactggtttgattttcttactataccaagtagagcttcagataaacaaatccatcatattttttgtttgtttgatgcagtgtgttaatattcttttttttttat

SEQ ID NO: 40119 - DNA, 612 bp, Oryza sativa
agttaatatcgaggtcgagtacggacatcgggttgagctgcctcgcacattcctcctcctcgtcgtcgtcgacgtcgcagccagcagcaatgtcgccggcgccggcgtggcgcagccggcggaagctctggcgggcgccgcaggagaagcagccggcgaggagagccctcctgacggcggcgccacagaagacggcggcgcccaagccccccaatgcgcggctcttgttgctgacggcggcgcggcggtggcagaaggcgagcaggcggcgcctgcatgcgtcggcgagggaagctccgccggcgaggaggaagggctcctgctgctcctggagcaggtccgagagcctcctgacgtagcagctctcgcccatgaattctctctctctcactctctcaatctgaagaagaagcagaattatatattctgtgtgaagaagaatcaggaatcaggatgaaaatggtggggtgtggatggcgacgggtgcgtatataaagctaagctcgacatggagacctctcttcgtcttcttgactgtctcgttggaagcaaaaggaggcagcagcagctccaaacaactgcattaggctgggcctcacaagtgttatgtgg

SEQ ID NO: 40120 - DNA, 566 bp, Oryza sativa
cgggactaaagatcaacataagctttactcccggttggagttaccaaccgggactaaagatgtatttttagtcccggttggtaataccaaccgggagtaaagattcccatgctatccccgcctttaagtccccttttttttctctcctctttaagtctctcggtatccgcctccagcgcctcctcgatatcctcttcctcccctggcccttccccttcctccttcccctctctgctccccctttctatccccgcctcctcctcctccttcccctctctactgcggccgggcggcggcgacggaacgaggtggcggcgacggagcgaggcgactgcgcggcggcggctggtggggccgcggctgtgcggcggcggtggagcgaggcggccgcgcggcggcggcggagcgaagcggccgcgcggcaggcggccgtgcgacggcggccgatggggccgcggccggcggccggcaacagcggcagtcaacattgtttttttatttgtgattcactgtgatgtacttttgtatggacaatattgtgattcattgtacatttgtatggatct

SEQ ID NO: 40121 - DNA, 636 bp, Oryza sativa
aagcttgatggtcctgggaaagtgtcaactgaattatccctagtcaatctagaagctaaaaatttgcatcctaaacctgagtgcaaccaacctattgtgagtccccatttatcagtaacaatgtactctaaatttttaccatttgaaatttccatatgctcttaaattttcatgcatttcccaatctctttcctactgccgatcctatatatggtggttcagaaaaggaaaccaaactctaatatagttttatattatattgcttgataaatgtctcgcatattcgattggcacaaacaatttatatcacactgatttcttcccctaacaccttaggtccagttccggttgtgaacttgcacaaaacatctagtgtctactgcattcacatcgattttgaataatatttaattggcaccaacaattttatctcacatattgcttttccccttgacacctcaggtcaagagttcgggttgtgcacttgcacaaaaaacttctagcaagtgttttattaaaaaactttatatatataaattttctatgagatcttttaaaaaaagtaaaattatctatcagagaacttttacaatttcactagagaatataaattttcatatccgcctggagaattaa

SEQ ID NO: 40122 - DNA, 734 bp, Oryza sativa
acataagctttactcccggttggagttaccaaccgggactaaagatgtatttttagtcccggttggtaataccaaccgggagtaaagattcccatgctatccccgcctttaagtccccttttttttctctcctctttaagtctctcggtatccgcctccagcgcctcctcgatatcctcttcctcccctggcccttccccttcctccttcccctctctgctccccctttctatccccgcctcctcctcctccttcccctctctactgcggccgggcggcggcgacggaacgaggtggcggcgacggagcgaggcgactgcgcggcggcggctggtggggccgcggctgtgcggcggcggtggagcgaggccgccgcacggcggcggcggatcgaaccggccgcgcggcaggcgggcgtgcgacggcggccgatggggccgcggccggcggccggcaacaacggcagtcaacattgtttttttatttgtgattcactgtgatgtacttttgtatggacaatattgtgattcattgtacatttgtatggatctgtgatgtataagatttgtgatgttactttggtttgggtttgatttgggtatttggggtttgatttgggatatgtatcccacttgattcgagagaaaataaaaaagaaaaaaaaagaaaaggaccatctcaccgccgctacctctctttggtctcggttggtgttaccaaccgggactaaagat

SEQ ID NO: 40123 - DNA, 502 bp, Oryza sativa
caatgtactctaaatttttaccatttgaaatttccatatgctcttaaattttcatgcatttcccaatctctttcctactgccgatcctatatatgtggttcagaaaaggaaaccaaactctaatatagttttatattatattgcttgataaatgtctcgcatattcgattgcacaaccaatttatatcacactgatttcttcccctaacaccttaggtccagttccggttgtgaacttgcacaaaacatctagtgtctactgcattcacatcgattttgaataatatttaattggcaccaccaattttatctcacatattgcttttccccttgacacctcaggtcaagagttcgggttgtgcacttgcacaaaaaacttctagcaagtgtttcattaaaaaactttatatatataaattttctatgagatcttttaaaaaaagtaaaattatctatcagagaacttttaccatttcactagagaatataaattttcatatcc

SEQ ID NO: 40124 - DNA, 1043 bp, Oryza sativa
gggctttgggcgttgctgtcactgacgaaggacattctctctggcgtgctgaaggagtgttggactctgatactaatcttcggctgggctgggtatacgacatattgtcgacaccaccgatgaattataggtcccgatcgatagagatgaaaataacaagattggcaagctgcatttggtgacttctgcatcactactatatattgctcttcttcaaatgcatgtctctcaatagtatgtcaattgtttgggttgttgtacatgtgctatatatgtaaccgtgtgcttacgtttcttgtaaacagtatatgtagtcgttaatattttaccaataataggcaaagtatgtgattgtgttcgtcgacaaacatatactcgacgagccttagcgctgggttggacacgtgcccttcactctgcccatgacgatcaggacatttaattatttccactcttaagatgtgccaattaatgatttgccactcgctgtctacgacatgtgggcccttatgtgtctatgacacgtgggtccagtggcaaatcctttagaaccactagtaagagtggcaaatagttaattattccgtgacgatcgagcagggacatgggcggaaaggaagtgaaaaagggaatttgagaggatctgcttgctttggacaaaaaggtattttaccatctcttgagagttatcaggtaagaggtaccaaatttagaccgttgatatgtcataatcggacaactgagaaagagttggtacctgttggtagcgcactaccgcctctcaatctgcgtggtacctgccgccccccccaattgctaaaattgtattttcggtctcagtggttctggagtccatcctctcggagggccatatgtggtctttagctggtgttgccgcttctggggatttcttgggagtgtagcgtggctctgccccttcccgctttttggagttgtgtttagctggcggaatagttttttactagtttcaatttttgtttgctttttctcccttcccctggcataagccgatctggctgact

SEQ ID NO: 40125 - DNA, 565 bp, Oryza sativa
acataacaaattaaactgaaaatagttagtgtacattgtcagttatacttgttatttttgttacagctcgtagaaatcggatttgaggttacatgtttatagggtgatatattccatattaatctattttgctaattgttttttcagtttatagtatcatgcaagaaacgagagataacttttagattaggttcaataatatttatttgagtggattgcacattaggctacatatatttacctaagttttaatgggccatcctctaacgtgtaggaaaatttccagctaattaggggttaatataatataattcaaatttaaattgttaagtcaaaccgggttttggaagttggaataaccttggtagcaccaggatcttgcatgttgagaacaatccctgctcccgtagttcacggtgtagtgatgtcatactcgctagtcgctactacttgcgaaacaagatatcagggaaaattattaatttcatgagttgttttcacaatcaagtcaatattagagaagtttaaaattcataggttaaggtcaattttgccctacaacttt

SEQ ID NO: 40126 - DNA, 649 bp, Oryza sativa
aactcatgaataacaactcttagtttttataaaatagaacttggctgcatgagaataaaatataaaataatagtaataaaaaactttttaattaatgattagagtatttattatttcaaaaatttaagggaatagtctctaaataaaatgtgtattgtctaattaatattctgtatcaggctttacctttagacaagacatattatagagatgcatttgatactgcagtagcaaggggtgttgttttcaatcttaaagtctcgtgttcaatccacaatatattcacaatttcttcttaatttttttgtgagacgtctctccctccaaatctttttttacttgcaattatagctgtatcattaattcctcatgaatggttaaaatacgtgaaatttaagacacaatatactttggatggggtcatatcgttttaattcttcgtaacattttcaaaataaaacaagagatcaaagtttgacaatgagaacgaatagtttcgctatcgattatttttttaagggggcagggagatatgggatatctgtcaatcagaagcgaagatattctggcatacgtcattagtgttcgactaacccaacatgacagcagtacaacacttatcaactggcccgaccgcaatgacttggcg

SEQ ID NO: 40127 - DNA, 956 bp, Oryza sativa
aaagttgaaggtgaaaaacaaagttaaaggtgaaaatggattttgagcaaagttgtagggcaaaattgaacttaaccctatggatttttagacttctctataattgacttgatgtgaaaaacaactcatgaaattaatgaatttccctgatatcttgtttcgcaagtagtagcgactagcgagtatgacatcactacaacgtgaactacgggagcagggattgttctcaacatgcaagatcctggtgctaccaaggttattccaacttccaaaacccggtttgacttaacaatttaaatttgaattatattatattaacccctaattagctggaaattttcctacacgttagaggatggcccattaaaacttaggtaaatatatgtagcctaatgtgcaatccactcaaataaatattattgaacctaatctaaaagttatctctcgtttcttgcatgatactataaactgaaaaaacaattagcaaaatagattaatatgaaatatatcaccctataaacatgtaacctcaaatccgatttctacgagctgtaacaaaaataacaagtataactgacaatgtacactaactattttcagtttaatttgttatgtttgttgtaagttgtagaagtcgaatttgactttggatatttgtggagcgatatatttcatattaatctatattatagatttttttaaaaaataattattatttaggtgatatgtaaaaatgagacaacgtccggtcgagagataaaaatccatctccaaactaatcaacataccaatatggacgtaacacgttgtagaatacccagttggcaacttcagcgacacatggagaaacatacacggtgcggcaacatgaactgatgaaacacggttgcagaaacaataagaggtacaggcgtacagacaaaaaatgcgaaaatatcaaagcacacgataatcaa

SEQ ID NO: 40128 - DNA, 578 bp, Oryza sativa
tatggtacagcacggagcttaaaacgcaatttattcaccatagtacatggcctacaataatttcgacttatataaaaatgtcattatatatctaaatatcattcaacgaaaggtcattatctaaaaaagatctttcaacgaaaaatggagtaaaaaaatttagacggaatatggagtaaaaaaagtacactaggaaagttaattacaaaaccatattggtgttaattagaatataatctctctctgtcccaaaataagtgtagttttacattattcatgtgtaatatttgaccattaatcttatttaaaattttttattagtattatttttggtggtggtagatgataaaacatgaatggtactttatgtgattaattttttttatttttttaataagacggacgatcaaatgttggacatggatacccacgcctacatttttttaaggatgaatgtagtaactattatataattaccatataagtacattgtacctttaatataaggcaagaataacaatcaacacgtcttggtgctcagttgtaagccttctcttggaacacactttacttttttt

SEQ ID NO: 40129 - DNA, 1162 bp, Oryza sativa
acggacacacatttgaagtattaaacatatactaataactaaacaaattacaaattccacctgtaaactgtgagatgaatctattaagtctaattaatccgtcattagcaaatatttactgtagcaccatattatcaaatcatgacgtaattaggctcaaaagattcgtctcgcgatttacatgcaaactgtgcaattgatttttttcgtccatatttaatgctccatgcatatgtccgaacatttgatgtgacagaaaagtaataagtttgaagaaaaaagtttgaatataaacacggcctatattttaggttggagggagtataaaagattttgattggatgtgatacatcctactacacgaacaaacaaattcccttatatttagagacggagggagtaagatgtcttagcacagttttcgaaactaatttatgatttgtagtttcctaaagtttgtaacaacaaaattataatcatataaaagtaaattaaaatatcaattcaatgatattattttcagcaaataaaatttagtttatactgtacaaattgttagttagtagtaaatgttttaggagttaaatcttaaaatacgtgcacacctgtattataggatggagagtatcaatcaacgttgcctactctacttatacgtcgatcattattcagttaatcactttaaatggttaatgcaatggcagtggaagctgcaatctttttaactttgcagatactatactttccttacggataatgcagctattaatgacactataaaggagaaaaaactttgaggaaaaaccaggccaacctttgattagtcgaatgcaagcaaatattcctcagaccatgatgcaggttacgtggatcataggagaagttaatcgattagccgataaactagtaaaagatgctagaatgcagcaactaagttctccagtttataactgtcaaaaaaaatcctagcaattgttgttacgctagagctttgaaagaccattttagtgcaaccaactgtacggtaaataatgtagtagttctatgtttctgaaacggaaataaagtttttgagttatcaaaaatactcctaagggcctgtttggcacagttctaaccaaacagtttcaactccactaaaactgggagtggagctgggtgg

SEQ ID NO: 40130 - DNA, 503 bp, Oryza sativa
aaatgtgttttatattttgtaacgaatatttggatatgtaaaacatcttaaatgaaaaagttgttaactacaaagttgcagatctcctggagatctacaattttgatataaagttttatttcatctaactttatataatataattttaaattgtaaaatcatagagctaacaagttgtgctggaaaatttgcatttaggtcccttgctgccctctggaagggcgatctcccaaagggcggcaggcgattagatttgtaaatttttgaaacaaaaaaatatttttgtaaatattttaataaaaaaatgtataaattaaaaaattcgtaagatgagcgcaatacaattgggccctaacaggcttttaactcacgtgcggcccataagtagttgggcccgaatgggtgcgcgattcatgcgaggcccggttactcaacttacctttccgaactggggaagtttgttccgaggatgtgctcaacaaccggcggatccgacgtgtata

SEQ ID NO: 40131 - DNA, 516 bp, Oryza sativa
atgttagactgttagagctgaatcgattgcaacatgagcaaaatactactccctccattgttttttttccctgaagtttgtttttttagggtggacggccgaatacatagctacgaggttgggttcttttacgacggaggtagtagatctatcaaaatttaaaaccgggtgtatacgaaaattactcatatatgtttacatgtaataagattttattaaggctaagttgccgctgttatccgttattttaattatgtgtttagaagcatatgtatgtgtagtgatatgtgtacgtttgcttctttcatgtaatcgaaaaacagttgtatgtagcatttgggacgattgtatcctaattttctacctttttcaaggaaaataatatatactcccttcgtttcatattataagttgcctgattttttttctagtcaaactttgttaagtttgacctaatttatagaaaaatttaatggcatctaaaatactaaattagtttcattaaatctaacgttt

SEQ ID NO: 40132 - DNA, 657 bp, Oryza sativa
ttagagatagaattgagatatcaggtaggcaaatatatcaaccaaaccagagagatccaaagagatcgaagcgatgcagccgtgaagaataccaatgtagtcgatagattcaccagggccgacggaacataggacttaccccttcgccggagatcgaactgaaccgatgtagccccacgtcaggtgccaaattccgccgattgataagtaaaacctcagaaaagggggtggcgatacgccgagagtagttgtattgatctgtgagataaattacaatgacctcgggtgtacatatttatagccatgggtagatactagtctttgtaggacaagaaagaaactttcctaaagataaaaagaaaacataaagtccttataggacactaaacacactttcctaaagataaaagtaaactaacaaactatttctaattaatagataacttaccatgccgcatccttcttgaactcggtcacttctagataagttttcttaatagattaatttccttaaccgaatatagcacgaatctgactattggcgatgtgataattctcttaggggcttaccaaatttcaccgttaacaggtgcatatctcggcgaggaaagtgagatacaccacttgaatgataatgacatgcacaatcgagcctct

SEQ ID NO: 40133 - DNA, 606 bp, Oryza sativa
atatggagagcttgccatcgttttcgcagtactggctgtgatctaatttacaattattgctcaagctacaattggtgtttgctctttgctttcgttaacctgctgccccatttgcaagttgtttgttgtatattttctgtaaaaccaatcatgtgcgtcatcagcatataattaacaacgcacataatatgaatagatcgattcgtctacgtattgctgcatctttgtgtactttgaaaaagaatctagctagctgagatgtacgtacgtatggaaaaggattccgttgttatattaattccacgctttcgttttctcaactgtaaagcttgtcaatgcatgtcagcgtcagttgtttttcccttagactactgtaggatcgaacacaaaaaaccaaacttaccagaggggggtgaaaggggggtgaatggtaggaaaaaccaaaaacccaaaaacttttagcggaaataaaagttaccctcaaattgaaaatctcgatgtagtcctgtcgccgccgccggtcggacagctcacacgccgccggaacccaaagaaacacaaatcgaagaactctcaaagtagatgacaactttattgcttctctct

SEQ ID NO: 40134 - DNA, 500 bp, Oryza sativa
cgtagaattgaggcacatcacaggaggcccatagaccccaaaaaaccgcgtggactccgtagaggatgaaaatccatcatttgctttgacctggcagctgaggcaaatattctaactatttgactattgtccggtgagaaacggtaagtggagggtgcccctgatcaatcttcctctgtccatttttttgcttttgcgttaaattgttgatgatccaaccacttacgatatatatttgctagcttcaaaggcagtgcttgtcgaacttaattgtcaattacgtacgttgccaatcaatttgtttgtacctttcaagaataaaaaaattgttgactgaccttgccggccgcttgaggatatataagtcgtccaatcaccatgggacgtgtagataaaatactttttcgaaagtcaaacagctaaaaacccaacatactaatcatagaactcgtcctagtttttgaaaggtcaaactgtactatttttccaaataaaaaaac

SEQ ID NO: 40135 - DNA, 586 bp, Oryza sativa
gtacattacggtttataatcagatcttacctgatcaagatcatcatgcttaatatcgttataaaactaaatgcaaaaccgggtgctgagttgcctgcggcttaccacgttgcgacgacatgaatgaaaagagaaaaacatgaggctacaattaatggatttcggacgtcagaggaatctcccacaagttagcatagcaagccagctgataggactaaatatatagttaattcgttaaatttatagtcgtctcaaataaaaaaaaaggttgatcttatgttgacctttcaaagtcaacaattatataagcactaaatttttatcattcatgtattatgtagtatatgttttaagaatatttcactaaaaatatacatttttaagtgtatacttaccgattttttaaggaggtaccataattttcttgttaattttatatatatattaccttgtgatacaataataccacgtaggtagtgaaaggtattaaaatttacgctaaggctatgtttggttaatccccaagagggagggattggaggacatttattccacacctattgtggtgtggaattattccccctcaa

SEQ ID NO: 40136 - DNA, 632 bp, Oryza sativa
cgatcctcacaagtgttgacggccgttaagtgcaaactttaaccgtaatctcctacataaaggatatcaaatatactatcaaaacttagtggtaggagtttactactaaccacttacactagttttggtaaatatatgtatgcgggtcatttaaggagaaaatacacccgccagacgacaaaaatgaacctccgactaatcatgtacgagtacaaagattggagggcccaaaagtcagtcgaaaccgagtaaagtggggcaagccatccttactgccataagagcccaccagtaagactcctggataaagcagaaaccagaaggaggggctcaggggtcagccgaactaccactagcccctcttaccttggctttccacgtgtaggtcctagatggctcaccaatggcgattatgcccggttctcggcctggataactttcacaaccgccatatggaggctataaaaggaggaggcctcacacacttcaacacacaactcttgagctcaagtagagtacaactcacttgtagtttcaattttagtatgttggcgagtaagggaagctccagaaggagtgccccgaaatatcatagtttcttcgagaattttacaaaggatacagaggagtgt

SEQ ID NO: 40137 - DNA, 680 bp, Oryza sativa
attcttgttttgatgatggcttgaatgatggtaatcttaacagatagagaatggctcacttaatgatcaaaataactaaaaactataggacttatgtgattaaaactgagaaactaaaagatgagaatgaaggaatggcgctagaaattgataggcttcgctccatgatttttcatgtgatttatatctttctgaaatcaacctccttaaggataatttaaattcatattatatatgagttgggaatccctctagtgctatcactgcatgctctttttgctatgaatggaagatggaaggataagtttgagttcatcaatagtaattatgaacatgataggatatatagttgtgaaaactgtcctatactcatcagtgaaaatggtgaattaagacaacaaattggcatggtcaaaatcatgaataacttgctagaatcttctgcttctaaggaaccaattcaatgctcatgttcaaattgtgccattctgaaaacagaactaaaagatgctaaaattgccaccgactcttttaaagcttttgattcatgtgcatcttgcatttctcttaggattgatctcgattatgctaaaagagagtttgccaagtgtgaggaatcccttgtgaacctaaaatgagagaactcctatctacaacagtccttagagaggcttgcttaa

SEQ ID NO: 40138 - DNA, 590 bp, Oryza sativa
tctgtgcaccagaaatcatctactatacaccatgttttaaaaacgtcaaataagaaaaaaaaggcaacatttgtcaggcctgagcactcatcagtgagcactcatagcacacacgagcacatacgtccatttctacagttgatcctctaccccatgccaagtgctaacaccggagccatctctctgaatctcacctgcttacatgtctaaccctatataaaccacccatactctctacccggctactcaagcaccaaccaaaaccaaagcagagaagacgcaagaacaactagctgcatggcaatggcggtagagagcataggaggaggaaggcagcggcagacgcaacagcaaggtgcttggacctgctcgtagagcctctgctgatggaggggtcacatgacaaagacgaggatgtggtaatggtgctacaatccccccttcccctcattgaattttagaactcacagaatagccgcgaaacatccatttaatctctctcttaaaaatatcgaaggagccaagactaccaaagtccagattcatcatatgggtggcaattggccccattggccatgatctactactac

SEQ ID NO: 40139 - DNA, 1405 bp, Oryza sativa
gtcaagagagtcaaattgcaccggttttaagagttcaggggtcgagatatccggttttttggtttagggttacggattagattttgatcacttttgagggtcacaaagtgaacttattcctccaatatacgttttaacctcccactccaaaccaaaagtctattttgtctccttcgaccgaattcctatttgtaccaaagcgtaagaaagtctagccgacctccctcaacaccctctcagcccaaggaatattctttactaaatataaattcttttcccaatatccagaaaatacttctatcttcaaaaagtcatatattcaaaaccgtagctccgattgaccctgtttcagtctccaattcttccttaaattgatatctacaaaatggatctattatttattaatagtatctcctttttagggttttgtgtggttctctctcttttgcgatttgtacttgtcgccagaaattgttttgatcttggaccttcaaggatctgaagacgaagacttgagggaagtcaccctttgatcgtattgctctcagatctgaaactgttttggttgcaaaatcgcataactgagcgtgcacgatagtttgaccggcctcagttcacgcggacaaatcgatagaactacccaatagttgcattatactcatatattgttgttaaccctcatcctttgccgcttcatcctcgtggtacctcggtaaccgtgctctctgagtatggattccgatggtcggcaaaactttcccccccccaattgaacaacgtgttcgtcgatatggtaaaaaagggtttgcgaaaccttttaaaacccaacacgtacttttggtgtgtttgcgaaataaaagtttgcaaaaacccgcgatgcaaaatgatcacatgtgtggtggtgctttgtattcgcaaataaggaccgattcgttgaagaattgcactgatcataaatcataatatagtgcgaccacatgggtgttacggaacacccctagccaagtaattagtggatctaggttcgttttggttgctaataggagaggagtcgttatggcgcgaagtgagcgatatacccacgaccatggttgcacgaaatgttccggctcccggctttgaagactggaaacctcatgtgttttcctgtaccaatcccaggattaatagttggtacacacatttattgccagtacaaaacatatatcaatatgaatttaggataaaggagtttaatacctttacaaggaccaataaggtcttatcctatcaaataaacaatagcggaaaccaacatagtagtaggcacaagtaacttatccacaagcagttgactagggttgcacttgctacttagttctcgatcagccctccgatcatctgctaagtatgccagcatatgctg

SEQ ID NO: 40140 - DNA, 692 bp, Oryza sativa
ggttggaattaggaaagaagaaggtgatatcgatgatataaaaacaagccatttaattaatttggatggtagatctggaaggaatgtgtgcctcttgatcgttagaggagatggtcatgtatttatttatcgaggtgagtgtgtgtatgtatatatgagtatgtgtgttatattggattttccaaataagagagaattgcaaggacaattttgaaggggtaaaacctagattatctctaatttcttcatatcactgtgtattatgtcttttcaaatgaattttataggattttgaaagccctaatattttgtaggatttgaatcctacaaaatttcttcatgaatctctttccttttgagaaaaacaatgcctaacggccggtgaaaccagagactaagttgccctttggtgttgaaaaagtacagagggaatagctaaagaataaaagaagctgcaagtgatgtacggcatacaaagcgcatgggctctttcattgcatcacatcgtaggctaactagacaggtaacgcaaacggttcaataaaaagttgaaaagagaggatacttaacttgctccagtgcaacaaacgaagcggcataatcttgattgaaacaatcttttgatcccataatcttgcccggagagaacgaacacaagaccataggccaatgcaaattaaatacacgaaagg

SEQ ID NO: 40141 - DNA, 739 bp, Oryza sativa
tgatgctacttggagatctttgcctgcttgccctctgcctcttcagtttggtccattttgcgcttagtaccactcaaagtcatagtctcctcagcggaaccaacctctactaccatgtcatcatcgccacctgtattcgagtaaagcccattttgcagcacaggattagagctggatattgattgaggaagctgccacatttgcatcatttcagatggtgtgtgtacaattggaacattccgttgcatctgttcaggtggaagatatgccatctgtgcaacaggattatgccattgcatctgttcatggggaggaaatgttggcattggtgcagcgggatggcgccattgcatctgttcacggggaagaaacggcattggtgcaggggattggcggcattgcatctgttcatggggatgaaatggcatatgtactggggtaggatggcgccactgtatctgttcatgaggaaaaaccggcaccatctgtggagtaccaggatggcgccactgcatctgttcaagaggagcaaatggcgcatgcagcatatagtgatggtggggagcacaagggatgttattactagcaggtggggtgaaaattactgcaggatgggcacttgtctgctggcttgactgctctccttgtattgttgttcctgttggtttgtttgacctaatactctccaacatgtggttgcttctagtaactgcaataatatctactgttgagtttgtga

SEQ ID NO: 40142 - DNA, 1084 bp, Oryza sativa
  unsure (1)..(1084): unsure at all n locations
aacgacagtagcggaaaaggtgatcctagggggggcttcagctctactccacaggcaaaactcaactggggtctgagccttggtcctctaacttcgtcttcagctcggaagcactacacttctgaaaagggggaaccatagtaaggctcaatataaccaccatactcagcaagccataccaatgatgcagacgtgcaaggagacacaagagaggtttgtggctatttgcataaatgcggttgcaaaacatttattgagcaaaacagtaaaactgtagagtaattaaggtaatattaaatatccactgatcaatgctacaccacattgaacaggcccaaccaacccacctgagctaaccaatgcattcagtcgatttattaagggtgagacaaatcacggtgaatctggtcgatcgcccataaccgcgggcacggctattcgaataattttactctggccagaggtgcagaactgtacccacaagacacaatccaccggcatgtcaccgtgccatgcatgacatgtcaccatgtcgagtgattttgacaagacccttcatataaccccctctgaccaagcacaccacacctcaggtttcacccccactcctcaacaggcagcgggcagtcccttctcgtgctagatgaatccagaagcgacanaggttgtcgcaggggccatcccgctccatcacacccactcttgcttggatgcttgatgccttccagggtttcccgtgaaccggtccttatttgttataggtgcgaccagcaaaatcatgcatccatagcccaccattaagtcgcattttaattggataattacgaccaatgaaacatggtcagatttcttgagcacatagctcgccatgatactaagatgtctaatactgtaattatcccatcaactgagctagttgtaattaagcatggctaagcatatagttctagctcgatcatcaaagtaacacaagctagtcgatttatcacccaaggttgagaaaggacatgtatcaattaatatggcacaagcaaacagataagtaaaccccgatcctatgtaattagtaaaacatgcatattta

SEQ ID NO: 40143 - DNA, 709 bp, Oryza sativa
agggtgacatagacaaatctcagacattcatttttggattcacggtagtttctaggtttgcaccacatattttcatgtattattatatatgtacctaaaagttggaatattcattatatatgctttatttgcttgattacagacatgacagaaaggctgttgagatggaagaacgatctttctgaagaaagggataaatacgggagtacacctcttcactttgctgcatcagtggaatcgtcactacacaatcgattcagttccaaagcaattgtctccaaagttcttgaagcttgtccttcttcagcatttcaaccagacaatgaagagtccctaccaatccatgtcgctgcatctgcaggtgtccggagcgccatagcaatcttgatagaaaaatggccaggttgtgcctcatttcgtgactctgatggaagaacattccttcacattgctgtcgagaagcagaggaatgatattgttaggtttgcttgcaaaaaagtagttctttcatctgtgttgaacatgcaggacaaagaaggcaacactgcactgcacctagctgtccagcttgggaacctgagtttagtctgctctttgctaggtaacaagcgggtactcttaaatctgacaaataaggttgggcaaactccactgaatgtagcaagaagaaaaattcctacagggatttggggatcctctagagtcgacc

SEQ ID NO: 40144 - DNA, 578 bp, Oryza sativa
aaacagctaatccggctagcaaacccgatttagagatcaaaatcagcttctagcccgaattagatcgatatgagggataactacccgtctcgtgggcaaaacggaaggttttcaggacaaacttacaaagaggtgtcgcactctcgcaccggcggtggatgggttacggcgcaaaccgacaaagatggactaacttaaggtaaaatagaaaacatagtaaaagaacgattcaaatatattgtatttggaggttttacaatgaaccggtcttgtcccttaatagaggtgggtcttgccctctacaggtccttctccatgtccaactcgggatagaaactaaaggaaacacgaaacatgccttcccgagcaagaaaacccgagacccgacgaaaacagactcgaactcggaccctaccggtctgaccgcccacacacctgcggtcagaccggtcctactagccggtcagaccgcccacgtacctgtggtttgaccggccctatgaaggaagcccggcactttccaaactttagcaatttttccctatttcgtccataggtgccaaatttgggtgtaaaca

SEQ ID NO: 40145 - DNA, 948 bp, Oryza sativa
tataaatttatttttgtgaatttaaatatatacagattaatgtgttaatttaataatatatgaaatatttttagagacatggacaagcaatggatgtatcatacgccaagatatatgccgtcatatatgaatgaagtatctaaataatattgacaagacgcacgctttccaataagaatataacaaagatacattgtccataggatgactacaagaatgaaaagtatgggcacatacaacgagaatcatgggacactagtgaaatttatgaatacctattattgcgagcaaggtacaccacaaaaaactgaacaacaagtggatcttgatgacaataaagaaaatcgaagggatgttgatcatatggacgctaatgatggtaatagttgtggtgataatatttttggttttccaaaaatgctacgccatatagaacctgaggtgctaattgggtccgctaggggtttagataattttgaagccttataaaaggcaaggcagcgaaggaatttttgtacgctgagtcaaaggggtgtgatagagagttctaaacattacgttcaatgcttgaacttacgagattaaaggtcaggtatggttggtctcacagttatttgttagcttactagagcttttgaaaaggcaaaatttactacatgacactcaaaaaatatgtaattggctgagagatattgtaaaaatgtgacacggctgatggatactacacaaattatgtaattagctataggacaccagagacaatattttataatttatggatcaaaagaggtgagaaatttttcaaaatggcgaaattgcccctggcaccatcttcctctcacggctcgcccatccacgacaggttcccaacagcacctccgccggcggagagtcgttgtcctcatcatcgcggcgctggcgcctgcgcgacctcgtcggcgtcggcgt

SEQ ID NO: 40146 - DNA, 912 bp, Oryza sativa
tgggacggcatggcaaagcttattcaaaaataaaatttattttttttggggattatactcatctgtgacaggaattaacttaggcccgattgagatgactcatctgtgacgggctatagttaatgcccatctttgacgggctatagtttaggcccgattgagatagcaaaaataaaatttattttttttgggattatactcatatgtgacgggcattaacttatgcccgattgagatgactcatctgtgatgggcattaacttaggcccgattgaaatgactcatccgtgacgggctatagttaatgcccgttacagataagggtcatctgtgacgggctatagtttatgcctgattgagatagcaaaaataaaatttatttttttttcggattatactcatctgtgacgggcattaacttaggcccgattgagatgacttatctgtgacgggcattaacttacgcccgattgagatgactcactgtgacgggctatagttaatgcccatcacaaataagagtcatctgtgacgggctatagtttaggcccgattgagatatgtcatccgtgacgggctatagtttgacatgtcgtctgggcaaaactattggtgacgggctttaattagggcccgattgagataggtttattcgtgacggccatttgcccgattgagataatttttcacatcagtgacttctagcctgtgacagacgctgtgcccgattgaaatgggggtttgccgcccgattgagatgatggtatccgtgttctagtggctttgagctctcaagctacagatcttggtggcacgtctttttgagctcccatccgtacactagattgaactgtcctacgtgatagtgaaatgagattaattaggtggtttatcctatgataatgattgcaa

SEQ ID NO: 40147 - DNA, 528 bp, Oryza sativa
ttaatttcaaaaccagtaattaaggtggtagctgcttcattcgttcacaaatataagcatttctcattaaagcactattttccctattcaactatttctcatgattcgtaaggtaactctcatggatatcaaattaattttacctcaacattaatctgtgctaaaacccttagaaatggttatatatatatatatatatatatatatatatatatatatatatatatatatatatatatatatttctgaccataacaaaattcctatccaaatttgaatctcagaattcaaattctgctattcgaattgtccctccaaaatcatccatatctcctagtattcaaaattccataaaattcctctccttataaatttaccaccaaaacctctctcctaaaaccctggttcaaattttggaaatcacattatctttcgaacccctcacctttccctccatatgatctcctggaactcataaaaatatcgtgccaaaaatattaaaaatctcagtcagggccctgtttgctt

SEQ ID NO: 40148 - DNA, 2861 bp, Oryza sativa
agctcggattggcctgtgaaggtgcggctcagtggtggattgggggtgggaaacgacggacggggtgcggcgtggagcggcagcgctgtgggaggcagcagcacggccagaggtggcctgtctcgccggcggggagcagctggagacggaggaaagagcccgtggctcggcctcacggtgggaatggctttgcgggggtcgaaggggaggatggagtggatgccgaggtggagcttggcatggcggtggcagcgcagcgcgacggcggccctagcggagggaagtagcgactggagaactccggcgacggcggagggagtgagcgatgcgggggaatggtttctaggcgcggggagctcgaggaaaggggaaaagggacgaggtgaggtgcggtgatcattttaaagcactcgaggagggaaaccgtggccgggagtggcggaatcgggtggcaatggccgacgaggtgggttccggcgatgtgggtgagtggggctcaaaacggcgccgaaaattggggaaaagattggggagaggtggacaaggtggacggaaaccgatcccacgtggtttgggcgcgagggcgcgagcaggaggggtcggaatcagggtgacgtggggcggcaatggcggcttggcgcagttggggtaggtggaggaaggggatggacctaatgggtgggatcgtgggtcccacctatcggccaaaggagagaggagtggcccgtggagggaagcagagaggacttgcgggagagggaggggagcgagctgggccgtgcggctgaaagaggagaggggaggaggcggccgggccgggaaggggaaggggaggcttgggccgagcacaagagggaggggaggggattttaatttgttttctttttatttaaattgattaaatgaactttgtattattataattactttttgagctccgaaaattcacgggaaaatttcaaagaatctttagggcacaaagaatattacaaaatattctcggccatgatttttacgggaaaacttttaattccctctataatttcacttgattaaattgctttaaattttaatataatttctggaaatgcattattaattgttttttaatcccgaacaaaaattggggcgttacagcctgccaccgtcgctgctctagatcccgccctgaagtggagaggaagagaaacaacgagagatggaagacagggaggaggaagaaggatagagaggggatgacatgtgggcccacatgtcagtgggttccacaattctttttgtgtaaatgacgaatggggcccacataaatgtttataatacgacacatatatgttatatatgtttataacactacaaaccaggtcaacactgccacgtagatgccacgttagtgaaactgccctccaaaactgctaagggagcaaaattgcaccggtttaaatagttggtgattgatatatccgatattgcagttcaaggataccaatcagatttggtcgctagttaagggagtcaatgtgaacttattcccgcctggatggctcctacttgtcgatggccctattgagtagtttggattgttgctttatccaatgtagtggtttggttgaaagttttatggtagggtgtttgctacctgtaattttacccacatcatcaactaaataattaatgttgcgttcggaggcctcccgacatagaaaacaaagcacacaattatagtgagattaattaaatattatcctaaaaaacttgaaaaatggattaatatgattttttaaaacaactttcatatagaaaacgtttgtaaaaaatacaacgtttagcagtttgaaaattgtgcgcgtggaaaaccagggaagtgagttgggaaggaggggaaaagaacacagcctaagtggtggtacatgcaatatattatctctaatacactagttccaccagggggcgaagccatgagaccgaataactaatattaatagcaaaggaggtcaaatagtcactgtcaataacaatcaatgggtaaactagtccttatttgtgagattattcaatagtttacattgaaagaatttagcaatcaaaactagtttcatactttcaatgatattattaaagagctaaaacttttgacatatttttttcctcaaaacattcaaatctttactgtcggatgttctttaagatctgtgctagattcgatccgtggacttaagctcatgcatccagtgcgctagccacttacagcgttgcatgtttctgagagaaaagagcaacttacatattagttacataccagttacatattagttacaatatatataattacagtatagttacatttgaaagtttttttctcaaaaaaaaaactgtcgcatgtaggtactcccttctttttattcacttacatcacttttttctttttcctcctgaggttgcctcttatatgtgtagtggctattcctctatttacttctatccgcctaattatttgagtctatgcaatatcttggcaatagtgctaagaatctttaagcattcccaactctctacctcagctatatgttaaataaattgccacgtaagaaaaaaaaagctgaggtgaggaaacagttaacgaggaaaggggaaaaagataagaaaacagttaacgaggctacagcgtaagcagcggcgaaggcagcgctcccctacccttcctcccaacctcccatatatggctagagaaggggagcgacagcggcggcggccactgcaggcggtggcagaggcggcgcagtcccctcccctccctctcttccagttccagatttgggtggagaaggggagtgacgacgacagcggaggcggtgtggtcccct

SEQ ID NO: 40149 - DNA, 897 bp, Oryza sativa
  unsure (1)..(897): unsure at all n locations
ttaaagggcaggtaagtaatctcctaatattgtttaggggtaattttggcatgggatgtttncttcttttcttatcgtatcaggtccgaactccgttgcacgcagtcacctcgctattcctcccccggcctcgccggcttgtccgccccctccgtcgccatccgtattccccgccgacggcgaacttgttcgttccttagtcgcatcgtccgtctgggagcggacgagtgtggtggcgtccgagcgagcgacaatcttgagcaagagttctggcggtagtaaaaactccgacctgggcttcaggggtagcgtcacgcacgcacgcaatgtcatttgcttggcggcggcgtctcggctcattcgtcttcttgccgtttccgatcactgtgttgtttcatagattacatggatcgattaagatcttgcacgaccaactccgacgaggatgacatggtgatcgatctatggatcggaaaacaataataccccttcacgaattatttttcctggacaaaaacacccctccacatttctacttccactaattctggtaggagtagaactaaatcttaactctacaattaaatatgatagagggcctagattactttctactccgagtagaaagcaccggagtaggactcaaaactgtttagctgacttgactccagcttcaagagagagaagaggtgtagcttgagcagtgccaaacagacctgaagattaacaatatgttgttatatttccagaacgatatgagttcaatgatttatcgatttcagagacgacgaaaatgatactaggatggaacaaggatctcatcaagcaagccgaccggcacagagggagcacgcctctccacgtcgcggcgtcatgggggcaccacgacgtcatcag

SEQ ID NO: 40150 - DNA, 637 bp, Oryza sativa
  unsure (1)..(637): unsure at all n locations
ccaactgtttcttccaataaggacgacacacgaccattcagatgctactgaacaccaaacatattctccctttaataaatagtggattatgaggtgcttgttcaatggctataatctaaagagttctgttcaagtttataaacaaaaagtaagaaaaacagtatacactttatggcatctatccatttctcacttattattttcaatcctttccattgatcgatataatatctgatcttccatcatcaattgatccaattgctaattttggattgttaaagatctgatcttccatcatcttccatcatcaagtaatatatgatcttccatcatcttccatcatcagtatataagagcaattttacggtccttgagaaggtaccatgaggtaccacttagagagtttcttttgtgcttggaatcaattagaacccttgatctccttttttctattggaaatttggtacctagatactatgaggtactatgaggtattaaattttacactaaatttttgatacctcatggtacctnctcaagtaccgtagaattgctcatataagaaaactgaatgcccataaaaatttacaatttgcaaatattatactatttatcccggtgacatactaacatgtga

SEQ ID NO: 40151 - DNA, 530 bp, Oryza sativa
aaaaaattgtggattcttgtagtgaatatattttccacaagtttattctttagaacgtgaaagtattctttagttatgcttctgcgaatttataattcatacatcagtttcttttagagcaatatatatcaagttaaggctacagagattcttataattgaacccataacctaacttctatttcactcttttcttctagacaaatatctcactcgtaagcttaatgatgtcaacacggggagaatttgcttaatatcgtgtccttttcctacaacaataaaattgatagttgacctgccaacaccccataccccaccgcccaccctacaagcaatgaggtacatgcagcagaaatgaaaaagaaatcatattgactcaatggttctccaaactatcatataacaactacacacatcaagaatctcaatggaaaaaataattctatattggtcgacaactaatctaaagtagtgaaaagattaatcttatacaacactagattgcgccacgtcatcagctcaatatgcaac

SEQ ID NO: 40152 - DNA, 576 bp, Oryza sativa
tccagaatacaagagactagttgtggaaatcaaggagaaaatgaaagcgagcgtattggctatcatgaacgaatcaaaagcatacctcccaacaagtgttggtgtgccaccgtttgagtggtcatctgctctgtaacctccgggcaatgcgaaagttgcaccgaacgtcacagttgctattagaactgagccaatggccattgtttccgttgcgtcctttagcttttctaattctttgctttcactatctgattttaggttgtgagtgtctttgtgtttttctctaaagtgatcgtggcggcaactgtcattcatagcaccagcttgtgtcaatacaaagcgtaccatttcttcggtgctctgaaaaataaggaaactaatcaattttgttaggaagtgaaatcagtattcaattatcgtttatctcgaaagtagtacttctaaaagaagaatttaaattacctgattattatgtagccctggaggaatttgatcatgtgatatatctctaggagtttggccttttacatttactacatttagttgcacttgccgattgccaaatagcgaacaaaa

SEQ ID NO: 40153 - DNA, 1174 bp, Oryza sativa
attgcccccctatcggcattggctagaactactccatcggcttgttagctgatcagctatttgatctgttgtttacatatcttgtcagtttcatgatcaaacagactctctcgtccacatctcatcaatttttggacctacactggagctaagcagatctcccatgtcgttgttgttgttgacttagttcgcgccaacagttctgacataattggccgagtgcaactagtcgcgtttgccaaaatcaacctctatttgtttcatactgctgcttaggagagccgcatgcaaaaatcaattttcgcaaacagggctcttaacagactcgcatgcaaaaataagtctattttcacatatggacctcttagtggcctgtctacaagtctaaccgtgctcccctttccctctcaccatcttaaagaaataaaaatctaagtcacctcccctctcatttcctcttctactctctccctcaccttaaaaaaaactctctccctcaccttcccctcccaagcggtgggcgggagtggccggcggcagcgcgcgcgcgacgagagccagcaacgatgacggacagtgagggtggtagtgaaggtggccctgcccttgtgggcggcgatacatccagaggccggccggtcggccagtttgggggggggggcctcagcggtgttggatccgacggtggggagggctgcagcgacagagctcagatcccatggtccctccacccataacgacgatgacgacaacaaggacagcgatggaggctttgagcaatgacgacggtggtggcggctgcgagcttctagggctaggattttggtattgtcgtttccttttcgcagacggacgatttaactgtctgcctttagccgcaatgcaaaagtttgatttttctcataccttttcgtgcatacggctagagaaactgcatgcgaaaataagttttgaccatacgcaaaaatcagtttcgtagtaatggatggccgggcgcggaagggaagtggggaatgcttgatatctttttcgctggtcgtttcatggagcacgtgatgcacgtggccatgtgggagagaagagaggggcaaagagaagaaagggggaaggaagaagagggagggggcgcgaactggcaaagccagcaagccaggcgataggggcatgcaagtgg

SEQ ID NO: 40154 - DNA, 515 bp, Oryza sativa
cgtgccatataatggggcaataaaatctagttttcatcctacattgcaacagtgctcacgtgacatcctctatctttccatccacatcttctccatgtgctgcatcatactatccacattcgcatctccatatccgtcggatttctaaaagcacgtaccatatcctcgtttcggacagatttggattggatattatcttattcgttttcacccctacccccccccccccccaaaaaaaaaaatcttcctccatttttaaaaatagttgacagtggtattttttattttcaaactttgatctctcattttctataaaagaattacaaataaaaattatatagtataatcaatgtattgtactatagtgatatacttttgttcgtcatattctaaccatttagagcatgtttggtacagctccaactcctaaatttagcttcaggagttgggtctggagtagagttgtggagctgcctaaacccagctccacaactatagttcattttgtgagagag

SEQ ID NO: 40155 - DNA, 572 bp, Oryza sativa
ctccttttagattttacgtcgtcgatgcgtctctcgttttatacagatcgatagatagcctagtgggttccgaatgggcagaagtatgtggatggaatcgtgaaccgcatgccatgctacagcctacagtggtagatatcttgtgattgggcaatttaggtttggagtgtttgactactactttctcccttttacaatgtaaaaatttctaatattatccacattcatttaaatattaatgaatctaaacatatgtatatgtttaaattcattaaaatctatatgtatatagataatgctagaaagttttacattataaaacggagggagtagcagtctagcacggaaggacaaacactaaaccaactgacctggcggcgataactcggtgccgtacggtggttcgttttgtatgcttccagcaagttggtcttacttttttttcctttccgccggccgatcgagaatgacgtactgatgagcaaactttcgataggtattgattagattgatttggtgaaaaattgacactcacgatctggcttctggcttctggcttccgatcaatatga

SEQ ID NO: 40156 - DNA, 771 bp, Oryza sativa
ttatactgttctcaagcgtgtgctctcttgagtgttttcttatgtcattcatatctgaggccctttgggcccataataagtactcctatgcggctatgatgtaaacgtcacgctttttcattgaggtgtaaacaaacattgtacttctaattgaaattttagagaatgcatgtaactgttaggcactgtgttagcctactgtaaaatgtttaattgaactgttgtcatttgtgaaatatgtataacttcttttggaaatggatagcaaaaccaatgaactaggtgaaaccccgcgcattgttgcgggaatttagtatcataacaataaaaaaaataatgtgtaagatagctagataacatcagattaagtaaattaatgtggtttatgataatttaaatttaaatagtatgtagaatggtgattcaaacataaaaagtaaagtgttatgactttatggaagaagaaaaatagggagatagtttgaaccgtaaattaatcatctaaaggttaaaaacaattgatgtgatatgacttaattagagaaaaaaaaggagaaaaataatttggaccatagattaatcatttaaacactaactaactaaggatgaactatataagtaaatagaatatcataaaacataataaagatatgcgttgaaacattatgtgaattatgttggatgataatttcacatgtttgtatttgaaaagctcataaattataaaactataaagatatagtatgtttacatgatgtttaaatgtgatga

SEQ ID NO: 40157 - DNA, 722 bp, Oryza sativa
ctttcaaatgaccatcaacagaaaagaatagatctagataaaaatacatcaccatgataaattaagaacaggtaactaattataaacacagtgaagaacaaaaagaactatgatttgaaatatctactatacaatcacgcaaaattatttatatatcctaaacataaagttcttgtcctgaaatgacccattccaaattatcagaccaatggtccatcaacaaaaataataatagatctagatccatgtcgaagtacataaagaatagatataggtaagagtatatgtaagcataaaaggggaaacttagaaattatggaaatcacgtagaaaaaagctagccattatccgaaagactcctaaacggacagaaggataattatttatcttcaacaaaaaaaattactgtcatgggagaaatcaattactccaaagtatcacatggattgaaaaaaaatagatctagatctatgtacaacaaaataggatatgggttgaaatatatcaacatggaaagagcaactaaaaatttattggcataatgaagaacgaaaaaactatatattatttggaagatctcttgaacagcaacaaagataatttcttctcttcagaaaaaaaaatcaattggaacagtctataacttcagaaaaaaaaaaccatcaacatgatgaacaaatacaaacccaagtgcataaaaaatagaagtgtactggaataca

SEQ ID NO: 40158 - DNA, 1220 bp, Oryza sativa
ttaagacagactaaagtttataagtctagtcaagagtaatacaagtccctgcgcttatttaaccgcgagcatggttatttgaatagattggtttagtcacactgcagtggatatacactttacccgcactccgtgacgtgcccaacacatgagaagagtcacgacccagtctttcgggtctcttaagattgtggtacccgctccatgacctttgcgccctagtcaactacctcgcttcgcaaaccagaagtgaggtgagttctagcattcccgggattctaagggaagaagtcttaggccaattagtccattttcagtgttggatttcacgctcgccgtgaattcctcgtgttttgctctctcacacgacctacattattatggttttgaaccacaaatgggtgtggtaccccccccttttggtgggactaattgtaacatcctgaaaattcctgacaataaaaatcgctaaaatttcgaactttttaaaacttttgcatcatgatggatattatgattattattgcttgccaaactataaattgtcacaattaaaaattaagctaaagctgcacaactaagtaataattataataataagatatctattattaatcctataagtatttatgcacaagaaagcgaagccaaataaagcacaagccaattattaatttctataatgtacattacaaattgaatgttaaatacttgaaccatgttgacaagtgtcatgacatctaagtaactagaaaaatagtcgccactacaacaaccctatatataaaggagtgttccactggaataattaaattaatatttataactttcatcgaatctctgatggaataaaattcactcacataaaataattagtcctataaatgaattgagctttatataaaatacgtttatgtgagtgtttaattaaacatttagatcaatattgtaccaaatttcaatttacttttatggaataatagattaagcatgtccatgtaaaatacattgttatacaaataaactcgaccaatgtgccattgtattattaaaggacacatttgaatatttaattagtttttaagaaatatcaaagcctagaagttatattggataatatttggataatgtaatggaaagcaaattcattgtggaactaatgaataaccaaataaatattcaaaacaaacatttgaattctcaaaaccaaaatgtataaa

SEQ ID NO: 40159 - DNA, 691 bp, Oryza sativa
actctacttttaattttattatgtttattccaaattttagttagttttaaattcctatatggactctatactctacttctaatattccttatttttaattccgaatttctattttttttcttaattgtatttctatatagactctatactctacttctaatatttcttatttttaattctgaatttcagttatttcctaattgtatttctatatggactctatcctctacttctaatattccttattttcaattccgaatttcagttatctcctaattgtattcctgattgtatttctatatggactctagtctcctcttctaatattccttatttttaattccgaattttagttatttcctaattgtatttctatatggactctagtctcctcttctaatattccttattttttaattccaaatttcaactatttctaaattgtatttctatatggactctagtcttatcttctaatattccttattttttaattccgaatttcagctatttctaaattatatttctatatggactttgctttttctttttctgattaatgtgagaatttctaggccatgagagcgaacgtggaggctcctttttctattcctttaataatataatagattgagcgttacatgtgctcgaatctatggctaatattattttagttatatgcgatatatcc

SEQ ID NO: 40160 - DNA, 716 bp, Oryza sativa
caaataatttttcgggtagtaacttattaatatctacaacttttggtttggtcatttttctatatgattttgtttgaatcgtttgaatttgaatttcaaattataataacttcaaacaacatttacaagtaataaatgatttcaactgaaaaagtcatcaataacaaagttgtataactcatcaatatctataacttttatttggttcatttcttcatccgataaagtgatttgtaacattgttcacaaaatgtacatatttcttatatagtttataaactataagagagatatgtaaattttgtgaacaatgttaatattactttgtcggatgagaaaataacgaaaataaaagttatagatattggtgagttataccactttattgttgatgactttttcagttaaaatcatttaatatttgaaaatgttgtttgaagttgtcataattttaaattcatattcaaattattgaaacaaagtcatatagaaaaatgatcaaaacaaaagttgtagatattgatgatttatacaactttgatgttgatgaccatttcagttgaaatcatttagtatttaaaaatattttttgaagttgtcataatttgaaattcaaattttatataggtcaatcaaactcagaaggagaaataaccaaaataaagtaggtagatagcaataagttatacaactttgtttttgataactttttcaca

SEQ ID NO: 40161 - DNA, 576 bp, Oryza sativa
  unsure (1)..(576): unsure at all n locations
atggaatttgcagtttcattgccatggaccccagcagagaatttttcacttttcctactacaaataaaaaagtagtaaagacaaactatagaaggttgcctaatgataaacgaatcttaagtgacaccaaaagccaaagccttttctctgctaagcttgatgtgagaaggtggaggcttaacgcttaaactattattctcctatgataggtaccatgtgaacatgtatcgtcactgccaactaagttgtggcatgannnnnnnnnnnnnnnnnnnnnggttaatctttcttttcaagcatccactttttaaatttattgatatattcattgtggcatgatggcatatatggatgctgtgaaatggcgggccttcgaaacagacccaagtaaagttgaacagaaaatattagaacccactcttcgtgtgcatagagacgtggggtgaaagagggtcacaatttttgacacatgcattctcactaaactttaacatgcacgtagaataaagcaaataaataagaaagaaaataacaatccgacatgtgttttgcgttttacatgaacatgccaggtga

SEQ ID NO: 40162 - DNA, 758 bp, Oryza sativa
  unsure (1)..(758): unsure at all n locations
agtgattgacacttgtcagtanttcatcattgtttcgtacaatataaccaatcacacgtcaacgaattcatgatttgactaaagattattttatgtacattttgagaaatatcagaaactttttaatgcaaattgctggaggaatatcagaaaaagaatgaaataataaatagtgtcgagcactcaagccttggataacatttatcaccagcaactcaattgtgattcaaatagcagaaaaattcaatcttcaaattatgtcctaaataactgtccctatttaggacaaaaaccagcagcgatgtgtagtgcaaagtttatgaatcctagctaaaatagtcctacaacacatttacctgtccaaccaaaatagtgcattcaaaagccatggtttgcagagcaatagagcatcaaaatgcacaaaatatactaaacatttgaagattagcacaacaacaactaatcacaataaatctgagttagcacatggaatttaaaacaacataaaaggaaatattttttctatggaaaggaaggtcaaaatcaactgcctcacaaactaagtgtgcacaaaggaaaagaaaaaacaataccatatgcaacaaggagttctggatcaccatatatatcaacaaggacctacatggttttgtccatgagtcacaaaggattacactaaacatctcaatcctcttgtagaacaggcaaaatatataagaaaccttgggctctacttctttgcgtgtagagtatggaaa

SEQ ID NO: 40163 - DNA, 741 bp, Oryza sativa
  unsure (1)..(741): unsure at all n locations
actggnttttggacttgcaagnatcgcacatggagcacatcataatgcatatgagtaaaagctgtgtcagtactgtttatgtagcttttgggggtataatacgaggtattatggattttttttttgttgagatgaccactgcaacatgggactttatttcctgatccatgcgggaaatgaattgtttcatgttaagttcctgaatagtttctgtcttccaaaggaacccttaaatggtggagaatgtatcctgtgcacccatgaaaagttcacctaatcccttctatacccctgaattttgntcngnnccttacatacccccgcagtctaggttagactccttacatggactctccgctaccaccccgtgcgttggacgctaaatttttctaactagtactggttaccgtttgctgtgcactagaacaccaatatttgcggctacctcgccgaacaggaaaactccttctttggcactatattgtttttacaatatggattcggactacgcattggacatacatgctcgcttgcccctgacccgaagagatgacgcttgggtaggcgccttttaccgaaggcgattaaaggcaggacgcgccgcccttgacccaaagcgacggatttttctgtttgaccggcgccggaacaagaacccgctttggtggttataacgcgggcggatgggcggccctcgggaacctcttgtgcgccaaaaccgtactattggatggatccgtg

SEQ ID NO: 40164 - DNA, 760 bp, Oryza sativa
  unsure (1)..(760): unsure at all n locations
agtgatgtttacagatggtacagnagctcatcacaaatggtcataacttggccatctggactcggaattggaccgttcaagtctctaatttttccttaagaagtcaagacccatttttgtgctttgttcctgcttgttatatggaatttattagagtaaaagcccttttattttccgttggtcgtgtagacgctgcagcttcggaagatccgctcttcgtggaggttgaagccgacatttgggaaagcgagcaaggcaagtcacatcatccttgaacatattggatcccattttataaaattattttgatttaaattattgcattaccgctttacttaaattcccgcgttatcactgttttatttatccatgcctatttacctttgttatgaccttattattagtttattgatattattaccttgttcaccctagaataaacaaaaccccaactagtggacactctactcatggtaccactagtatgattttaggtagatgcttcgctatttaattaggcaacattatgcggttttacaactctagactttgggatatttatatcacctggacactttggaattggtggattattgtggaattggattcacaccgccccctctattcaaaatccccaaaaatggttttaggctgggctcggggtgcatggttttgatagtagcaccttcgccatataaggaccgctcttcgggcctcttgtgcaaagcactaccgtacttccacatgtctagtgggtaag

SEQ ID NO: 40165 - DNA, 1393 bp, Oryza sativa
  unsure (1)..(1393): unsure at all n locations
aggattggaaactgtgtcatgtctcccgtccgtatgccgtggtggtatgcggcacgtggttacacgtgaggaagatgtgtcttgtgggtaaagatgtacacctctgatcagagtataacctattcgaatagccgcgccctcggttatgggcaagccgagcaatgtacccaagttagtgttttaattcttaaaacctgcttaacaactaaaatgtggaatggttggcctgggttggcttgggacgagctgggacccagggtcgggttgccggttcggtctgaatcatcgtaggccttgggttaaggcaggttcgtgtgggttcacggccttgataaataatattgtatagttctagaatcgtgtttacaaagtagttttgagcaactaagtatctttaaatgctgtttactgcaaccctaaccctttatattataactcccttgtactcccttgcatttattatgcacttgtgggtgtgtcttgttgagtacggtggttgtactcagtcttgctcaatttttcccaaacccagaagaggagttcctggaagatgaaggctttggtgtttagctcgtgcctgccgtcaagcgcctgtggtcgtcgccctagtcttccgctgtttttcgtttgtcttctggtgtgttgggccttcgccgcccatgtaataaattaactatttacgcttccgcttgttgaactctgaaatgtatcaacttttggtgtaccttgcctcctgggacaaggaataatacacgcacgtaaggaacgcccgttgggtcaattccggtcgtgacaaacaacctagctcgattccatgaccggaaggcaaagttatcaaggttttaatttgcacagaattctccatctgcattccagtgtcgcgcccgccagccttccttaacggcgcggttagtcgacgcgcttgacaccgacatcgtctaagctatccaccctaacgtcctatgtgccatctccatactaaccacctcgttgaaatccagttgtggaccctcagatattcgacgtttcgccgaataaacagctgcttcctggcctatggtaagtaatttctagtaaaatctctgggggtccaactctcaaaatctagtctctctagggtgaggcccgtgattctgcagccatcaaaaaaaacctagctcgattccatgaccggaaggcaaagttatcaaggttttaatttgcacagaattctccatctgcattccacagtgtcgcgcccgccagcctaccttaacggcgcggttagtcgacgcgcttgataccgacatcatctaagctatccaccctaacgtnctatgtgccatccttatactaaccacctcgttganacccagtgtggacctcagatattcgacgttcgcgaaacaaccgt

SEQ ID NO: 40166 - DNA, 932 bp, Oryza sativa
ttgatatatagttcctcttagtttaaatggatttactacaattgtctcttctctatcttagaaagctagtatcacattttaataagatttcattttgagcttaccatatttcctatttctgctgagacacgaaataagttgctgtactatcatgcatgtatggcttatatcatggcccaacagcattgtatcactaaaaggggagacatggaaaagaaacatcctcccaagtcatgatccgattttgttgtaccaaaaagaattgaaaaagattgtgatggtgatgacaataaagcttttggtgttcatcgctacagagcttgcatatcaagaaatgtgacaataacaacagtgtaactaatcttctagaacaataaaagtttccacaggcaaaaaaaaaaaaacagagctagcaccaatgattctctctctctctcttttttttttgcagaaaaataaacacaatttccctttaatttggtttcagcaaatccataagttatgttacttcacttgtgaatggaaattatcccaacaagaggaatctttaggaggtggtggatcccattgctcatggttcgtacttttgtagtacatatagtactggtttccaaataaatccatcagctcaattattacgtacttaggttgttctatgatttatgctacatggagtgagacttatctaggaacagaggaaatttacataaatcaaagttggagtaaaaatatgagaggatatgggaagttgggaataatgtatttttcattttgcaaaacacaaatattaccatgagagtgtttatcagagcggatacaataagatgatgtaagcgggctctacatattgccacatcatatttatacttacgtggaggagagagaaaaaacgggctacaaatttatagccagctgcaccacgggctccaata

SEQ ID NO: 40167 - DNA, 501 bp, Oryza sativa
gtgggccgtgcctgggcgggaggttcagcccatgggtcgacacggcccggcacgaagtgccgatcgggccgtgccagcccgatggctggtgggccgtgcctgggccaggccatgccggtcgggccttttggccatctatactcccgtcgtctgtggatagagaggatggtgggtcccattgtttttttccttttgtctgattaacatgtgggtcccacatttttgtttttattttttatttttatattttgcttgcagtgcctcatcaccgccacgtaggacgaggaccaagttaaaccggccatgtaggcaccacatcagccaaaactaccatcaaaaccgttgagggacatactttgcactggttttgatagttgagggattcgttatatctgtgttttttcagttgaagaacgaaaatcggattcgttgacaagttaagggaccctaaatgaacttattccactaagtccagaatctagtacggcccaacatgttggg

SEQ ID NO: 40168 - DNA, 1129 bp, Oryza sativa
taattaagcttaaaagattcgtctcgtaatttacatgtaaactgtgtgattgtttttttatttatatttaatgctctataaatatgtttaaatatctggtgcgacgaaatttttagaagtttgaatgtaatgtctaaatctggaggctgtaatgatgaagagaagacggcgagagtttacgaaccgtcttgtgcttgtaggagtacgtcaagtcttcaactcttcaagtcacctactgctactgcatgcatgtcaaactctcacatcggcgtacaccatacaaatgtaaccctgttctaaatttttttttcgaaacttcaagctttccatcacatcaaacctctcatacatacataatttttcaatcacatcgttccaatttcaccaaaaaggttatttgggaactagttactaaactttagtccctctcacaaaaacataagcccctcctctagagacttatggttttgagtttagcccctctctcccaaataccccctttcaaacttcagtgtgaactaagagggtgtttagatggggctaaaactttttagctaatgtcacattaaatgtttatatgctaatttagaatattaaatataaactaataaaaaaactaattttataaatgagagcttatccgatgcgacacagcttgccgggaagtttacgtgctgagtttactccaagtaccacccttgcgctttgattaccactgcagttcagagaaccatgcatgagagaaaggcacctcagattagacagcgaaatgattgccgtcagctgtctacacgagggaggaaatgagtgaaggttgcacacactcctacaggcagcagtggtttcttgtagcgccaggcaaaagaaagacaggtctctctcagggagtcagagatgacagaatcatttctttctcctgataatcacagttaaaccagctagtagtagtagaaaactctgcctcggtacttccgctttttccacggagtgaaggagtatagtagaaaactccttcgaattatacgtacaaaagtactcctactatactcgttagttgttcttattagtactaaacaatttttgagattttcggatgccgtttccggtttgcgcccatagttttagccgg

SEQ ID NO: 40169 - DNA, 591 bp, Oryza sativa
attcctgcagccctgactgaggaggagcgtccataatcaaagccccgaagattaagtgaggattgaactatcattaacaaacatcgggtgctcatacgttgtcatctggctgtatctgagtgatcaatgacgtagactatcgagaacgctagtcgtcataccactatattaactattttttataacacacatttgataagtcttttttttctgaagaggttcccaataaaccttcgtgtaccgcaggttcaacaatgatccctacatatgtgttactgtacgaacatgctactggcaaatgtgcacatctcgacaaaatcaccaactcgcagccaatacatatatatgcgagcgccgaatgcatttgcatgggctagcactactagtagtagggtccgatgcttcatcaattactgagctaactactgcagaatctaaagcaaacatacgcggtgatatggccatgccgggaccgacaagatcttgcattccatgtgggacggaaccactgcggatggatgaactctacgataccccgtctaccgtacacccctgttactgtcacactcctgcgcttgcgtgcatatgcac

SEQ ID NO: 40170 - DNA, 614 bp, Oryza sativa
ttcccctttttacacgaaaacatgagcttatgttcgttggatagcagcagccagcaagattatagccttggatagctggtacgtcttacgttcttaaataattgattgtttaagtttaagcttgttttatcttcaaaaaaaagtttaagcttgattgtctgtctttttttttcctgaaaaaaaattataaatgctttgttggtgctagatgggatctgcgctccgaactccttgaacttgaacagtagtacagtaccatcaagattttgttggtttaatatacaatagtagttcacaatccccttaactagtttctaaaataataatggatacgtggaacaggaggcaataacgcacacaatgaaaaatatgccactacttcaagttccgaaagcaacctttatgggatggttttagccaattttcgtatttagggcccctttaaatcgcaggattgagaaaacgtagaaataagaaaaacatagaattttgatagaaatgtaagtgtaaaacagaggattgcaaaacacaggaaaaacataggaatgaccgtttgattgaaccgcagaaaaaacaaaggaattggatgagaaagatagactcaaaggaaagtt

SEQ ID NO: 40171 - DNA, 701 bp, Oryza sativa
atgcatcaactctagcctaagtatcccgcatgatctctgaccaccacggacgtcgtcttatccccatgccgactcccggtccatcaccgcaaatactctcccaagacatcgagtcacctacacatgaaataaacaaagaaaccatattccaagaccaagctatctccaacttgactcattagtagcaaacaacagtattacatacgtatagtatccatctagaagtcataatcatgaaataatcacagatatccaaagaaacaacccgaaatcgaaaccgacacagcgtcggctggtcagaccgcgggctgcgccggtctgactgcgcatataccaccggtctgaccggctaccagagcccggtctgaccggacccaaatccagcagtatcctgtatatcacctgtgaaatccaatcatttccaaaaccacttcgagaataaattccaaataacaaaaccgataatctccaatactaattgttcatcacagaataataatcaaaaacacctttgatttcacaatctcccccttgatgaactcattggcaaacccatcaaaaatgttttggtgtttggaaaaataaaaacaaaagtggtaaaaagcacgcttcgtacaaacgtacacatcgtgctcgaaaaatccgaaagaaaacttctccccctttttaaaagaaagaaattcccaattgaaccaaaaaca

SEQ ID NO: 40172 - DNA, 533 bp, Oryza sativa
aaaacaaaagtggtaaaaagcacgcttcgtacaaacgtacacatcgtgctcgaaaaatccgaaagaaaacttctccccctttttaaaagaaagaaattcccaattgaaccaaaaacaacatgctcttctcaacaattccaaaactcatctcctctcaaaaattttcatctcttctcccccttttgacaatgatttcatcaagcatagaaattatgttcattaatgttccagagcttagcatacatatagcatatcaagtcatgtgttgcaataaaaagaagataaacctatctataatataaaaagcatgtattaaagtataaccatgaaccaaagattttacaattaagcttgaatcaacaatcaaaactaatgatttcatacgatttataatgcaacatcttaacaagcacataggttgaaaaataaacactaaacacatatacctattgcatttaacactctttctcaaattacctttagcacaaaataaccaaaagaatttttgaactttttcttttcttgagcctttt

SEQ ID NO: 40173 - DNA, 594 bp, Oryza sativa
acaaactatcacagtacgtaactctttttatttaaaatattttacttttatgaatattgtttatcaatgtagcatctttaaaaccgtgtcgaagtcaaaaacaaaaaaaaggcttatattttgatatggaggaagtattctttatcgtattttcctacttatctatctcatttttcacatgtgtgcttttcaaacggttaaacggtgcgttttttttaaaacgtatgtatgtatgaaagttatttgaataatcatgttaactcatttttaagaaataactaatacttaattaattatgcattaatgaaccgtttcgttttacgtgctcaaagggttagtttctaacactaataatcgaacacggcctttgccgcttagaggaattttaatagtatatagccaactactagctccaaattatttatagataatctaatagccaaattatacaatagttaactacaaatatatactacatcattaattactgctcccacttgtcatacacacgtagcatttaggagtccgtgctacagctagctacaaatctgcagcctgcttcttttctatctcctctctttatgttcaccacat

SEQ ID NO: 40174 - DNA, 769 bp, Oryza sativa
aaaaagttcaaaaatcaccaaaacatgatttttgaacatattggagtgcgttgggtgctttcgcggctaaaaatcacttcgtgattcgcgcggcgaacttttgtcaattgatgccaacattggcatatattggcacacgtgggtgcgatgttttagaccggaatgaaaaagtttaaaaagcaccaaaacaagatttttggacatattggagtgtattgggtgcgttcatggcaaaaaatcacttcgtgattcgcacggcgaaattttgtcaattactgccaatattggcacaggtgggtgcgatgtttttcaccgaaattaaaaagttcaaaaggcactaaaacatgatttttggacatattggagtgtgttgggtgcattcgtggcaaaaaatcacatcgtgattcgcgcggcgaacttttatcatttactgccaattggcacacgtgggtgcgatgttttagaccagaatgaaaaagttcaaaatgcaccaaaacatgatttttggacatattggagtgtattgggtgcgttcgtggcaaaaaataacttcgtgattcgcgcagcgaacttttgtcaactaatgctaatattggcatatattggcacaggtttgtgcgatgttttagaccggaatgaaaatgttcaaaaagcaccaaaacatgaattttggacatatttgagtgttctgggtgcattcgtgggaaaaaataacttcgtgattcacgcgacgaacttttatcaattactaccaatattggcacacgtg

SEQ ID NO: 40175 - DNA, 588 bp, Oryza sativa
attggagtgtgttgggtgcattcgtggcaaaacatgacttcgtgattcacgcggcgaactttgatcaattactgccaatattggctacgtgggtccgatgttttagaccgcaatgaaaaagttcaaaaagcaccaaaacatgatttttgaacatattggagtgtgtttggtgcattcgtggctaaaaatcatttcgtgattcgcgcggcgaacttttgtcaattaatgccaatattggcatatattggcacacgtgggtgcgattttctacaccgcaatgaaaaagttcaaaaagcaccaaaacatgatttttggacatattggagtttactgggtgcgtttgtggtaaaaaatcacttcgtgattcgcgcggcgaacttttgtcaattaatgccaatattggcacagtgggtgcgatgtttttcaccggaatgaaaaagttcaaaaaccaccaaaacatgatttttggacatatttgagtgttttgggtgcattcgtgggaaaaaattacttcgtgattcgcgcgacgaactttcatcaatttctgccaatattggcacacgtgggtgcgatgtttagaccggaatg

SEQ ID NO: 40176 - DNA, 1164 bp, Oryza sativa
atattatggcaggagcagcgtggagtcaaagccctactccgtagagggctcgaggctgcgcggatcgcttcctctctttgaacacagctggggtgtgcgacatggctgtggtggaggatctgcccccacccaggtgaaccctcactttagactgtagattgcaacagctatatgtaaattacaataacgatttctctattaatgaacctgcagtttaatctgaaaatttaggcaaaatgtaaccgttgcagtcctttgttttctttctcaaacacaccattccagtcttttggaatgacccttagggcctgtttggcacagctacagctccagagctcagccaaacagtttcagctgcaccaaaactgggagtggagatgggtggagctctctcacaaaataaactagagttgtggagcgttgtttaggaagctccacaactccacgccagacccaactcttgaagctaaatttaggagttggagctgtacgaaacaagccctaaagctgaccaatcacttgtgaagaatccctctactttgcagagcagaagcgttacttggcatatatactttgcagaagcagaaacacaacttggcggtggctggtttatttagcaatctctacttggctttgatggccagtgtggtaattaatttcagaaatctccgattcttgttgacaaaatttcttttgcaggttgaacatggtgatttcagacatttatcaatgatggattatctgcttgcctattctttctgttacatcagttgtgggatgtttttctgttaaattaatctaggttgctctcttgatctggtctagacagatcctaagcaaaggttgcaataaggaaaacaaaaggaaaaggtgagagaggggcttagtatacctgttgactgtagctgtgtcaattttagttcaaatgtttattggttttgtcatgtatactgcactgtggttcatgaagaacacgaagaatttgtatttggtctacttaattgatctaaattatgtagaacttcatgatttccttcagtgcaaaatatttattaaaaactgccaaatgtagttttttttcttttttttttatccctataaagaactgctagaaccttttttaccacgtgcaaaataacatttgcaatttttttaacaaagaag

SEQ ID NO: 40177 - DNA, 586 bp, Oryza sativa
cccacagtgatttggtaaaaaaaaacacgtggcccacgaataggaatactatgatgttaggtagacccgacccatgttgtctgtgatttcaagaacacgggacgacgcgtgtcgaggagcacatgattctcaacattattattattttgggttaattggattcatgtcattataatttttacggttttgaaatataccactactatttgtgtatttggagtcatgtcattacaatttaatacatatttgagatgtgccattacttaccccctatgatgcactgaaatttgtttttgaccaaattaaccctatcttcttcctccatccccttctctctctactccctttcctcccatctctctctggatcggagctgacccggtcggcatgaatccagcagcggctgtcggccttggacatatttgagatacggcggtggcgtcaacgccggtgccggccgctgatgtgttctcgaagctcgtttactgattgtacatagtactagtaggcaaatgtagagacatgttctttcatccgcgcatttttggtctctttttcttcgcgttttctcaaaaatgatatgggc

SEQ ID NO: 40178 - DNA, 507 bp, Oryza sativa
tcgaattcctgcagccccatacacgcagtgatattaaaaccaacaaattagtgggcatctataatacgcccaaaatgaaataaacatataaatggaaatctacagaagattctacggctgcgacatctggagctttaggatagatttttctttttagccttttagcagtcatgtaattttattttctttcatgttggaatccctaatcaggggttttctctacggagatgtaattaacagaatttctatataaatgtatgaattctggaagtaatggactcgcaatttctgatttttatttatttattgcatttaaattaaattgtctctaacgatttgcggataacgaacctactattacaaccatcccggttttcccggcgtcagattctggcacgcccagtgggacctacttctcccctcctctctgagttccaacatgtagaccgcgaatatgaaaaaaaaaggagataaatgcacatatccttagtggaaaaattcacgtat

SEQ ID NO: 40179 - DNA, 675 bp, Oryza sativa
cattctgaataagtgctactagtgttcttgatgtttctagtaaaaaatactctctccgattctaaatatttgacggatagatcggacattatgccgagacagtataaatcactcagtatctaaatgtgccccacagtagggattatgtatgctcgcagcatagccgatagggcaaacctaacatgtatcagctagtagtccgataccaccttatacctagatattagcacaggtgaaatatacaaaaccgagatcaatctaccaagcagggaaactagcagactgataggaagcttaatatactttaaacggatgagatcttgatataaagggcagatttagacgatccagaaccaagtaggggaacaagacggctaaatcaggtaagatcggctgaaaccctgatgctatctatattagcattcaaagaaagagctagataacacatttcaagacaatacttaacaggtcgaacctaaccgatgccgtgttaagcgtgaaaagaaacataagatctaagcaaatagatgaaaactcattcaaaatggtagatacaccgcataatctaagctgacatcgacatctaaacctatcggccgttttcgatgatagaagctggccgatggggttagatgacgagatcaatctagattatgccggatatatgataattca

SEQ ID NO: 40180 - DNA, 671 bp, Oryza sativa
cagttgatgaaaatttgcaagccaagattaaacttgaatatatagagctccatccattttaaaatatatgtgtttattttgtttccctttttaatgtaagcattcttgccaaaattgcaggctgtactcaaaatagtgagatctggtgatcagataaaactttctaaatcaccactcaaagtctgaacctatattggtaacagttcatatgcaggatggaaatacataaacacatgaggagctttctcttttgttttcccgtttcattatatatatatatatatatatatatatatatatatatatatatatatatatatattatatatatatatatatatatatatatataccaaaatacccatgcatgtgggacccacacgtcagttccattttaatttcttcctccaccctcccctcttcttgctttccatctctgtccacctctccctcggtaataagagaggcagtggcgggcaatccatgggtgtgcggcggcacaagcaacgagagagcgaggcagcggtgaccttgtatgtgagggaggtggacgctgcataaacaccatctttaaggcaggagccctcgagtgaatgattgatgtgagaatttgtagctgctaaataatatggaaaattttaacctttataccttttaaaatcaatgtgggg

SEQ ID NO: 40181 - DNA, 669 bp, Oryza sativa
  unsure (1)..(669): unsure at all n locations
atgtcagaccaagatttccaacaaataccttctttactgtcttcatcattggtacctgtccaccagaatttcctgataatggcagttaatttatatagaagttttttggagtgtaaaatggtagacatatagaaaatagggatggaagcaaacacagattttattaaagaaagtctaccagcatgggataaagtttttgctttaataattgacagcctggttttgaatttttcaatgataaagttgtaggcagagtttctggctttagtatttagaatgagaggatgaccaagatgtttggaattgttgttcattaaggagacagggaaaatggataaaatatcttgagtgacactgataggataggagtatgagagctgaacagaatagaagatttattccaacctggagtttgacctgattgatggcaaaaaaattgaataatttggaagatgcttctagcttcttcaggagtggcttgacctacaatcataagatcgtcagcatacattgaagagtgagggtgggttgttttttaaaagnaaaatttccccccccaaaggggggggggaaaaaccccctttttaactttagtcccttctttagacactaatttagagtattaaatatagactacttacaaaactaattacataaataaaagctaat

SEQ ID NO: 40182 - DNA, 684 bp, Oryza sativa
gatagaaatttttgaggatacgtgcaaagggattatatacggtatattgatttttactccaggttggttttaccaaccgaataccaatcgggattaaagatctctataaactttagttccggttaggaacaacaaccaggactaaagttaagatctaccaactaggactaaagatctttgaggacctgatagcctctgacacgaggtgaacctggattaaagatcacatagtccccttgcacaaataaacctggaccagagatcatttttagtcccggcttttcaagcaaccggggctattgtggaaatcggccgacccagcaaagatcacttctccagtagtgatggtggagggttgtgattggttgggaatggaatgttaacggatatgttattatattttgggacagatgaagtattataatttggaacagagggaataactcccagtcaccaaataacaatgtttccgctcgcgttgctctgatttaggagcagcgaaaacaataattcgagctatcccaggaatctcctgtggatcgccattactactcccaggaaggagtacgtctcaataacattgttggtgtactacctccattccatattactttttaagtttttgtttgtcaatgtttgatcattcgttttatttaaaaagttttagaattattatttattttg

SEQ ID NO: 40183 - DNA, 674 bp, Oryza sativa
atttataaaatgcctctatatacaaattacaattgagtaagaaattcaaatttgtttttattttcatgtagatattataattgcatacttctatttataaaaatagaagataagagttgtatttcaaatctaattatacctttacctacctttgtgtgaaattatacacgagaatcctctagttattatatttcaaatttttctgcttgatctgggcatttttctctttgaaattatgtagctttcacttctatattgttaacagtagcaacatgtgtgtatattccaacatgcctccccccccaaaaaaaagaaaaaaatagcccatacaacatgtggattgaacatactagcgtagtatcgttcaactttccatctccaagttcatcctctgaggctttgaactctgtgaagaattaacaagagaaacgaacaaacctattaaccatgtagcctagtggttacagtgatctgagtagtactcaaggtcctgagttcaaatctcctatggagtgaattttctagaattttttggggggggcgtgttgcggggctaagttccctatttcaatggccgtatatatccggttggatgtagatgccgggtagaaaatacccttctcttaaagaaaaacataacaaggtgcaaacgtgcagtgcagatggcaacatag

SEQ ID NO: 40184 - DNA, 514 bp, Oryza sativa
ggcaaggagcagcacgaccagcggtatggcgccgccggccatggctgcctcaatcattgtttggctttgaggggggaaagtgtttgggggtttggtaattggtagcgtgtcgtaatctttcgcgccatgtgaatatgtgatgatgtgaactgcgattttgactaatgacggtaatcaaggagaccatttgactactgctcacatgaaattggctgtgtttaattgctgggccaaatctttttaagtattcgtacacacatttaaaatattaaatatagtttaataacaaaacaaaatacagatttcgcttgtaaactgcaggacgaatttattaagggtaattaatctgttattattaaatgtttactgtatcatcacattgtcaaatcatgggatatttaggctcaaaagattcggctcacaatttacatgcaaactatgcaatcgatttttttcttctatgtttaatgctccatacatgtgtccaacattcgatgtgacctttttagaaaaa

SEQ ID NO: 40185 - DNA, 649 bp, Oryza sativa
acgaggagcggagggccgccggcgccgtggacgacgacgaggacctcgtcgatgtgcttctcagggttcagaaggatgggagcctccagatgcctctcaccatgggcaatatcaaagccgtcgtcctggtaagtagacaagtacttgctgattaatactgtactaatctcccttaattgcacacgaatacttctgagcttagagtagtatttatcttaccaataattaatttttcaatcgtatctacaatcgtaccctaacgtacgttctcttccctaatttagtgaaggttcaatcacactttctggatctataatccattatattcgtgaaaggatgaaatataagacatattttaccaaacctcttttacctgagtgcacttaaaatttgactactgttaatgtcaaaatctacaaagttttaccgtttaagaataaaattaaataactttaactgatgaatggagcgagtatatatgaaaataaaaaaaaagtatgcacactgaacaaaggaaggaaattaaaaaggtttggggggcaacatattttttacatatatgggaaatatgttttttttcatgcatataggaactttttggtgctgggagcgagacatcagctaatacacttcaatgggcgatgactga

SEQ ID NO: 40186 - DNA, 665 bp, Oryza sativa
atcttgtattaggttattatatggactcttattttaacattccttatttttaatttcgaatttcagatatttttaaattgtattcatacttggactctcatttccttttctaattttagattttattttatttttatttcgatttttgatttatctcgtattgggttcttatatggaaacttattttaatattccttatttttaattccgaatttcatctatttttaaattgtatttctacttggactctcctttccttttctagttttagatttttttttatttttatttcgaattttgattaatctcgtattgggttcttatgtggaaacttctttcaatattgcttatttttaattccgaattttagctatttttaaattgtacttctacttagactctcctttttctttttttctttttctccgattaatgtgggaatttctagctcccacagcgaatgtggtgcctcctttcaaagctgttttaataatataatagatagatttctttctctaaaatttttaaactaatacttaatgaatcatacgctgatacattgttttaattttttttaataatcaccggaggggagaggttccccacctagatttccattgaagagaaaaatagggtacaattgaagtgttcaagctagctagcag

SEQ ID NO: 40187 - DNA, 935 bp, Oryza sativa
tacccatttaccaaacagttaaatagtgtatttttttaggaaaaaaacattttatttagtaatgtttccaaagaaatcgaataaatttaatttttaagttcataattattgataatcaattaatcgtgtgcctgtcttagctcgttttacgtgtaaataaaaaataacagctacttattagaaccgagactaatacatgcattacttatttagcccgtaccgatggttgatgtttttttactgtcactatccagttgttttcttgtgattgcacgagatccaaagtacactttattttattttcttaatgtgccaattggacaattggcttagtaaactcgatactgacaagtcaatgaaggatgtttatacataacagatacttcgagtaaattacttaacaaatgccatcagaaaatatcatgtacagcaaaatgttattcgaaatgttgaaaaatacggaaaatacaactagctatgtcaatatgtttcccatcctgaggtccacatcaatctagtgagaaaatatagaaaatgacggtttacccgttatttcttccccaacatgggcatggactaaatggcacacgacataaatcaaatgaagtccaaacatttcataaaaattcagagatggacttcaaatatttacttcgaaacaattttatatgtattatattgaattagtttctatggtcatttttattaatttgcttgatattgtgatttttcctacttgttttatttttcaaaatacaaaaaaaaatctgggaagctgatctaaataagtcgtcagatttttggatgctatacttatactgtaaaggcctgctaaggttaaaaaaattaagaaaagaaaaaaaaagaagggcatgattaatatgaaacttttataatcttccgatggaaaatgtgatggcaatagaaattggatg

SEQ ID NO: 40188 - DNA, 685 bp, Oryza sativa
cattataattattatgtaatcaactatcgatttcggcttaaacagagctaagtgttaacacggtgcttaattcttctctcactgcatcacacatttaattttcttttcatgttattaacaaaatcggtagcgctgcagcggtcatgatcacctgagatgcctcagacatgacgctttgtcacacatgcgaaaggaaaaggtgtagacgtgcattatgcagcaggccaaaaagagaactttagacactttagttattaataatagatccgatgatttaaataatgggtcgtacttgttctagtataaatataaattagttaatctatattttaaattgttaatttaatgggtacacaatataacggtgtaaactttattttaaaacaatgtattatttgagaataatagtccaaagtaattataaaaatagatccaatgatttaaataatgggtctatctgtttaagtgcatgtatatattagttaatatagatcttaaattgtttatttgataggtacacaatataattgtgtaaattttattttaaaatagtgcattatttaaaaataatagtacaaagtaattagtacaccggtttaagtggaaactatcttacattattgatttaatgggtaaacatataatatggtgtaaattttattttcaaatattatagagctaattt

SEQ ID NO: 40189 - DNA, 517 bp, Oryza sativa
gtcgactctagaggatccccttaatgcttcttggacctcctttcttttaaattggtttgcgtgtgttttagcttggcgcatactagctattgagaggtcgatagtgttcttagcataggtggatcactttgacgtaattgaacgagtttaataaaagcttcgattatctaaaacaagtagcctattaccatggtcatccactggacacctggctgctcggtaacgacatgttattgggagaaatgcacggtgacccacagacatggaacatatgcatgcaaccaaccaatttatgaccacaaagctcccgagccatacagactatttaaagcaatcacgtcacactttcataataacaagcaactcgttgatctaggttagctagttcttgttgcattgaatcatccctcatcaaatcattaggatatatacttcatgatggccaacgtcatcgcacttatgcttgtggttattacagcgtcaaccttgttagcctcacccgtggaatgcgccaaca

SEQ ID NO: 40190 - DNA, 531 bp, Oryza sativa
tttcttctttttcaccgattaatgtgggaattatttttattccgaattttaattaatcttgtattaggttattatatggactcttattttaacattccttatttttaatttcgaatttcagatatttttaaattgtattcatacttggactctcatttccttttctaattttagattttattttatttttatttcgatttttgatttatctcgtattgggttcttatatggaaacttattttaatattccttatttttaattccgaatttcatctatttttaaattgtatttctacttggactctcctttccttttctagttttagatttttttttatttttatttcgaattttgattaatctcgtattgggttcttatgtggaaacttctttcaatattgcttatttttaattccgaattttagctatttttaaattgtacttctacttagactctcctttttctttttttctttttctccgattaatgtgggaatttctagctcccacagcgaatgtggtgcctcctca

SEQ ID NO: 40191 - DNA, 657 bp, Oryza sativa
aggatccccaggtttgatatttttttgggacaaaagaagtacggatctgcttcagtttgcaattttcatttacttcgttttttatttcctgatgtaatccagaattccagatgtatttttaatcaggaatttcttgttgatatcagtaagagtaagtatgaattgtaacatagtactggtccagcttgaaaaaaaatgttgatagataaaacagaatcagacatctatctatcttctatctatctatctatcttctattattatatactaaaagtccatgaaacttcctataaacgctctcaaaccgccacgtggcgctctaataaaatagagaaaatcctagaaattctaagaaaaaagcaaaacatctatcccttgattttcacttaaattggtgggtccaatattatacaccattagataaaattgatcttaaaactattatattatattatattatattatattatatactaaaagtccatgaaacttcctataaacgctctcaaaccgccacgtggcgctctaataaaatagagaaaatcctagaaattctaagaaaaaagcaaaacatctatcccttgattttcacttaaattggtgggtccaatattatacaccattagataaaattgatcttaaaacaaactaaatacc

SEQ ID NO: 40192 - DNA, 698 bp, Oryza sativa
atagataccaaaattcgtattaaaaattttgagaaattttactatcattgggaggtaataagagcccggtactaatttttttttatactaacattggtaccttttaaaattagaggtagcgagaggtatcaaattttacactaaaatgttgtacctcccagtcgaggtattgtaataaatcacttaaaaaatttagtacctcttagtattaaaaattataaaatttctcatataaattaattccatggctgatctaatctagacatatgacagtataatagtatatactcccttcgtacatcccgaaaaaagccaatattgtatgtccagattcgttgtattacgatgtgtcacatcctagtacgagattatatgtctgccctaaattaataagggatagattacgtgtacccgtctgttaatgttataaataagtcatacccaataatcttgggttagtctctgcgggacccaccatatacccagttctatacggaatcatacattatatacggaagatattttggataaggaaggggaagtaaagttctactcgggcactataaggactactcggatcatattcatactttgtctctctagttctatttggacaagggggcacctgagggtataaatacatgaccccctagaaggagatgaaagatggcaagccagaagatagatctagaacaaat

SEQ ID NO: 40193 - DNA, 581 bp, Oryza sativa
aagacggtccagggaacaaccaaagggaggggaaatctcgaggggagaaatggattgattacctgctcgacgtggttgagccgctgcagcgagctgctctggctctgcgggagcatcgccgccgccgtcgacgaggaggacgagggagtagggttttgggtttcgccggagttggaagcttcgagaggatggctaagctggtatatagggtccttcgatgtatatgggcctcgcgtttgtttcggcctgtttacctttctccttatccttggattactttcaggtttcagaccgtttgttattattaataagatttatgttcaaattattttgatatttttgaactttttaaaatatgattttaagatgaaatgctcaaaattttaatttttttatatggttttcaaagtgatttttaattttgcaagcatttggggaaattttttttaaaaaattttaaattttgggggggaaatttaaaaatttcgtacaaatttatttttttaaaatatagtttttaagtgatttttttattttacaaggatttggatgcgggtctcgagcttgtggcatggctaaaa

SEQ ID NO: 40194 - DNA, 1711 bp, Oryza sativa
taccgaaaaagcggttggcgtcgtgggctttgtaaacccggccattgttccccctcctacctcgccaaggtgataccgatgcgaccatgtacgtagtacctctcgtcctcttcaccacgcacacccgcgtagcgacacgcgcatcacgtccgttccgcccacgacaacgactagcaattgcctagcaatctactcctactagctcgctgtctcactgtctcctcactagcttagcttaaattagcttggcttctggtatttttggccgtgtttagttgtttggtcaaaatttcttttgcgtccgtatgcatgtttgaaatattaaatatagactaatagtaaaacaaattatagattccgtctataaactgcgagacgaatttattaagtctaattaatccgttattagcaaatgtttattatagcatcacattgtcaaatcatagtgtaattaggtttaaaagattcgtctcgcgatttacatgcaaactgtgcaattggttttttttttccatatttaatactccatgcatatgttcaaacatttgatgtgacggaaaatgtgaaagttaaaaaaaaattaatctaaacacggcttgtattggatccctgggtctccatctggattaattaattttactactatactccgtcaaatggagactttgatctggatcgcgacaaacatataccgcctgcttcttcggttgcgtatgtagcagatgaaatttgacggaatatgctcgaattctaaataatactccctccgtattttaatgtatgacgccgttaactttttaaccaatgtttgatcattcgttttatttaaattttttgtgcagatatgaaaatatttatatcatacttaaagaacatttgatgatgaatcaagttataataaaataaatgataattatatattttttttaataagacgaatggtcaaaagttaggtaaaaaggtttacggtgttatacattaaaatatggagatatatatactagtagtattacttgttgctgctgcggcctgcagccaacttgtgggaggagaattcgacgacgacggcagcggcggtgtggacggcaaatcgttgttggctttcccatgttcgggaagaaggcacgcgatttgttggagaccatggagagagaggtagagaggaaagaacacacaccaagtacgcaagaagtttctgcgtcgacgtagacactatatatattctggccagtttttatttttgttgctcttgtgattacgccatttcgattgtcttttgcttttacattcgtttgatctggtatatgcttgcgtggattcaagagctggcagagctttactatgcggctatgccgtgatgacttgggtcgttcgttggatagatgtattcccacaaagtgttaactgtacccatcatagcaattcatttttgctatatatctgtcgacaaattttctcctgaaaatttgacagatataattacaatacaatcgtagtgtaattaacttgtatgtaattacactataacttgtatgtaactttcacataattttaaaccgttagatttgtttcaagatttgtacaagtgaagaaggaaaaaagtcgctgcgtgcacatatgtgagaggatccattcccacgaccttcgtttcatcgaaatagcctgttatagagagatttttaaaagttacatataagtagcgggctgcagg

SEQ ID NO: 40195 - DNA, 678 bp, Oryza sativa
ttaaaaacaaagatatagtattaatttgaaaaaatgtgttaaatgccaatctttccaaataagaggaccgcaagcaattagcagacatcaaaacctgactttaattcttagatgcattatcatactaaaataacttttctatgtatattattatagtaattaaacttctctatatataccattcctagttgcccttaaggtattcgacaactaagctactagctagctagctcaatacgccatcagcgacaccgtccaggttgttgtgagaggggttgtgagatatttaactatttatcactctaagtggcaatctggcactaattcagccatgaattaaaaaattgccaattttcaccgtgagttcagtagtcaactttgcagttatcgtgaaccatgcattaatgtgtttgaattgcaatttgcaatttgcaaaggtcagctttgtcatagatagccagaaattccggctgcctctgctgcatcacaattactacttcatccgtactaaaataaaatataagtaattttgaaccgatgagatacttttcagactatgaatctagacatagagtatatattgtatttctagaaagtgtctcatctgttcaaaatcttttatattttaagataaaggaagtatattgctgtgccagcatcatcagcatgggtgttgtg

SEQ ID NO: 40196 - DNA, 746 bp, Oryza sativa
cccctctatcaattcggccggagatggaaaggagcgacggaattttggaaggagacggcggctgcaacggctagggtttcgggcggcggcggccgaaggaggaagacaggccagacaggtgggacccacctgtcagcgggagagagagagagagcggcggctcggcggactgggccgaactgggccgagggagagagagaagagaggttttgggccgactttcggcccaaagccaaaagaagacttttaaaaacctttttcaatttaaattattcatgaaatgcaattccatttattaaaaatactcccttagctcaaataaatcccagaaaaatctaggaattatagaattaagcaaagtatttaacaaaattttatatagcccaattttatattgagatttaacaaattaaaattagatcttctcttttaagcttttaaaatcatttctaataattccttttaaacaacaatttataatttaaggattttaaacaagaaaagcacttaacaattataattagatcattattgatcaaataattactgaactgttctttgtatcatttaggaatgagctctgaaaaatccgagaaaattccaaagagttgatttaatcatggagaatttaataaaaattaaatccatccatgctttatattaaggaaattttgtttcccacatttaacttcacttgtaaattaaagatcatttaatataaattctattaataatttattaaataa

SEQ ID NO: 40197 - DNA, 589 bp, Oryza sativa
agaggtgtaccactgtacccacaagacacaaccccacatcatgtcaccatgtgcctcaataccaccacggtacctcggaaaggagttgtgacaataccccttgcataacacaatccactacggcgcacctttcctggatcataatcacccccttataaacaaggtatggactccccagcgacccccgtgggcttatctccgccacttctcagtctggtgccccgcaatgaaccatgctacacaaaagataaagccgttgcccatgctggcttgtggttggcacggttaatgtttcacaaccgaaactcgtgaaccggtccttaattgtcatgagcacgaccatcaaaaccatgtgctcacaacccaccattaccaggttttagttggcacattaattaattaactaatcacgattgaccatcgtgaactatcattcagccatcattaaataacagtgagtcataagttaacccaatagtgagctaatgtttctaagcagggctaagcaattatatctaatatctagttgaaccaatatataaagctcaactagtcaagttataataacccaaggtatcaaggaataaag

SEQ ID NO: 40198 - DNA, 562 bp, Oryza sativa
ctactaaacatatcggacctagttacctagtgtgctaggtatacaaaatgatggaggttcgtgttttgcttttaaaactgtaggatgattatgttgctcggagtgttacctaagtttaaaatatattggaattgaatttagtgtccataacggacctcccgctatggttgtctccagatgaccacgacaggaattagccgaatctattgtctaggctcataaaaagttaatcgtcaaaaaaaggctcataaaaaatttaaaatttaatatgtcactgacaagaagcaattatgacatttcataatactattctgatatatgaaccccataaaactcataataataggtattctcatgcaacttgtagggtcaatatcgtgcctcggtaatgcctcatgtgtcatgtaataatatactagacaccatatgttaaagtgtatcttcatatcttctactactaggtatatccccacaataccttattaccttcataagatattcatacaaataataattgatggtcttcctatcttaattctcttatattttgaaactgagaaag

SEQ ID NO: 40199 - DNA, 520 bp, Oryza sativa
cggtgtcgacgtctatggggtgggcttcctacacaagggggtggacgggttagtgcatatctggcgatttgaggattgattcgtgtgtgctgtttgcctgtttggtgtgtttttttttttttttggggggggggggggggggagaggggagatttgctcatttgggtgggttatgacttacgagggtgggggtggttttgacttgttgggtggaatcgtcggtaaacatttgcaattttgtttgtgattagttctgttggtggattcgatgggtttgctcaaaacagattactcgattgattagctaagaagaactttttttttctggggagaattttttctgctgggagctgagaagtgtcttgaagcagaaaatggtttttgtttggggaaatggtgagttgctgatcaagttttgtggttttgtgtgtgatttgctgattaatcatgcgagcatacaacaccgcaacattcacctgttttcattggatggatgaaccaaatgatgcgtggaatttct

SEQ ID NO: 40200 - DNA, 507 bp, Oryza sativa
acataataattaatgcataagtaaaacctttaaaaattgtgttattagtaactaaaaatacaattctgaaaaagaaagtgccttaaaatatcttcaacttaaaatttaaattttagctttggttttagcttattagtgcaactgatggggcatgattcaccttttttaaattctatttttttattaaatttcgaccactaatcgtatatttaaatgatttaaatatggtattcttaaattcataaaccgataattaaatttttaaaaaaatacaaaaatgaaattcgaattggatggcatcttgcatattccatttctagcccatcatcctctcgtgcggtcgtgccaacgaagcaacccgcttggcgccacacaaacatacggcggcgacaccgagacactctcgccggccgtcgccgccgccgtctcctcccatggcgacggtcgccggacgattcggcttcccgccaccgctcccttttcatcgcctccgccggcgaccacctt

SEQ ID NO: 40201 - DNA, 735 bp, Oryza sativa
ggggcgactttggaagaaccccttgcattaaagcggcacgccggcggcaagaaagcggcggccggggcggggcttgggcggggccggttccccggccggccggcggaacccggcgtgcgccacccgcggcgcaagcaccggggcgcggcaccattggccgtggcggccgtaaaccggcgccgcgccgcctttttccttttcctcagccggtctcggtaggcagggcgagagagagagggagaaggagccgaaagagaagagaggaagagaaggaaaagaaagaaaggagccgggaggagagaagagagagaaaaagaaagagaggagaggaaaaagagagaaaagaaaagagaagggaaagaagaaaaaaaaggggaaaaagaaaaggaaaggaagagaaagaaaataaatagggtttgagtaaaatttagaagtttagaaaattcaaaatagttaagaatttaatcgtaggttaattatagtcgtaaaattgcgaaagttaattataggattaatgaaaatatagttagatgaattcttactaattaaatacctaaaatactagcatttaattataggattaatgaaaatataattggatgaactcctatagattataatctatagattatttttagtaatctccctaagaaatcaagttcgcgataataatttacatatgattaagaactccataattcgatgagtcttaggacatggctaatacctaccaaa

SEQ ID NO: 40202 - DNA, 516 bp, Oryza sativa; identical to SEQ ID NO: 39223

SEQ ID NO: 40203 - DNA, 532 bp, Oryza sativa
cagtgctctccgttgttttttttccttcttcaaatatatatatatatattctcgtgtaataaaaaaatattaatacattcgacttatttttaagcgaactctatttaatagacacttgcccaatcatatatatagccatcataaatacatatatatcttctcgtgtagttaataaaatacttatacactctatattaataaaatattaatacatatttatcttctccctcttcttcactagctagacacctgtccaaccatataggtggtgtattaactatgtgccaatgttctccaagatccagttggaagtctctgctgtcactaaccctctccagggtataaatagccgggagcatctactccatggcactcaccttaccacacaccactccaccattacttcacaaccaccacccgccgccatggagcaagtctcgtgcttcgccgccgccgccggcgccgtcctagttgttctctcgctcgctcgcatgctcctcgcgccgcgcaaggagtgggacgggctgaacct

SEQ ID NO: 40204 - DNA, 600 bp, Oryza sativa
cctcgaatatacgaatatgtttgagatagctaaatagataatatgttatgtatgggtggtctctgtatgttataagttgtaattaaaatgattatacagataatattcgtctaaatcacagtatttatgctctgaactcaactgagaaaatttcatacaatcactattcatgctctgaactccacaacattcctaattaaaaggttgcatgtgcttgaatactaaaaaatcggcacccgatttttttacaactaagcacatataactaacggtagcgctaatccacgcgctgcacacggaatattagatcgagcgccacacagcgctccctccttccagttttttcgttttttaccacccacctttactccgcatcccacctttcatcagtttatttttttcgtttttttaccaccctatcttccgtggttcttttttctcttttccatcttatccgtgcttcatcaaagggcccggtaaaatattaaacatccagattttttttgtttttggttccttctctccagttattttgtttcgcgttttagtaaaatatttatcatctagtttttcttttccagttttctgtttttctagtgt

SEQ ID NO: 40205 - DNA, 599 bp, Oryza sativa
aaagagattgatctgactatgctattccatacatcacccccaaaaggaggtttcttcatcctttacctcacattttgctatgactgtgaagatatccataaattgtataacatctctccacacaaacaaaccttttgctatgactctgaagaaggccgctaaggattgtaagtgtctaacccgcgaaacctacttatatgctaaaataagcgccgcgagtccacttattttgacctataaatgggttacaccctgagccgccaactcattccgcagcagctactactagagtgttattactagttcttttaccactcctcgtatctgctgcatttttcattgtagatgaaaaattgaaaagacttttgctttattggaattttgctgaccgacaacatatataagtttacatttactccatccgtcccacaatataagcattttggactgtgacacggtttttgtgatactactttgaccaacaatatctataaaagtaagatgttttaaataaaaagagttacatattattatagattgtctaatgataaatctaataatatcaattttacgtgacaatattttgtttctattaatag

SEQ ID NO: 40206 - DNA, 663 bp, Oryza sativa
gccaaaggcgttgcttttgtatgaaacaatctcccggtttagctaaagatattttccaaacaactctactccactaacagcacaaagtatatattgtcgttttattcaaaaaattaatataaatatgctaaagtataggtcatagttaatgtttttaatgttaaaacatgcaaaacaaaataaataacattgatataatttttttaataaaatgaatgatcaaacattatgtaaaaaattaacggtgtcatgtattaaaaatatttatgtatttttttaataagacgaatgatcaaatgttatgctaaaaattaatggcatcacatattaagaaaacggagggagtacaatttaagcattaacacagattcaagtgcccaaaagcatcaacaaactcaattttgacttcactcttactaaaccaaacagattcaatcacagttttcaaatgttcccaggaccttagcttctggagtaccaaatgatcgactaaaggttaaaatctcgtcacctagcctcataacctcactaactatgatgttttgctggttacaaatctcgtagagctcatgaaaagtgggggttctatttcagttcaaaagagaaatacctaacacatgtttgttttccataaactatgtagcttagtgatacggttgtgta

SEQ ID NO: 40207 - DNA, 645 bp, Oryza sativa
aaagaaaattaagaacaccaaactcctaaggtacaatagacaattcagtaattagtagttgagttttgaactatgatgggttcaatactaacattcttaaaagtagaattgaaaaaaatatgtcatatttcaaaatcttcgcacttccaaccggaatggaaagcaaattgaattgactccaccattgatttttttcttaaaagaaaagattaactcctccatggtcacaacgtatgccttgcaaatcgcaagaaaaaaaaaaggaagaattaaaaaatctgcaagacaaaatggcaatacataggttggtggagaggatgcagaaattggaaatgttgcaagcagaagaaatttgaacatggaaaaagaataaggaacaaaaaatgttgaaaaacttgagaagaaacattaaagccaaagtgaaaaggttgaattaatcctaggggaaaaaggagagggtatatacctggaaattgaaataaagggatgaaaaatgtttggatggacaaaacatggaaataaatagaaaagagactgcctatcgaatgtacattcaagagaatttctctcacaaatctgtcaaatgtaactacataattgtaatgaaattacaacataactagtatataactacacaattcgaat

SEQ ID NO: 40208 - DNA, 661 bp, Oryza sativa
aaacctgactttaattcttagatgcattatcatactaaaataacttttctatgtatattattatagtaattaaacttctctatatataccattcctagttgcccttaaggtattcgacaactaagctactagctagctagctcaatacgccatcagcgacaccgtccaggttgttgtgagaggggttgtgagatatttaactatttatcactctaagtggcaatctggcactaattcagccatgaattaaaaaattgccaattttcaccgtgagttcagtagtcaactttgcagttatcgtgaaccatgcattaatgtgtttgaattgcaatttgcaatttgcaaaggtcagctttgtcatagatagccagaaattccggctgcctctgctgcatcacaattactacttcatccgtactaaaataaaatataagtaattttgaaccgatgagatacttttcagactatgaatctagacatagagtatatattgtatttctagaaagtgtctcatctgttcaaaatcttttatattttaagataaaggaagtatattgctgtgccagcatcatcagcatgggtgttgtgcttgttggagtgatcatacaggagttgcaaattgcaactcaaatcgttaacaatagtacagaaccattgctta

SEQ ID NO: 40209 - DNA, 585 bp, Oryza sativa
ttgatcccttccaatgcccctaccgttacattttccatcatttcactgttacgtttggttgcaaatgtcctttttgcccttgatgatttaggtttaaatataagcttcaaaaacaattaaaaattttgtttgagtgtacagtatgtgcattttatacaactaaagagactaaataattagtgcataaaattttgacataaattttgaaaataaaataaatgcaataaattaaaatttttatttgaaattttaataggacaatggatttttttatcgggagcattcattaaaagaatgttgtgaacattggtagttctatttttatatgaatgctcctcacttttatgactttttttttaaaaaataaatatgtatttttttatttcattatctatcaatatttttgggaataaataatgcatcgaacaacaaactcataactataatagtcttatgcaagaagcttttatatttttaataatgtaattcatgaatttctttgttcatcgaagggtaaaatggtcatttttatagaaaatagacggtcaactaacggtgaactgacgggaggggtatggaagggat

SEQ ID NO: 40210 - DNA, 589 bp, Oryza sativa
  unsure (1)..(589): unsure at all n locations
caaataacgaatagacttaataaacgaatataaatatgtagatcatttagaaataacatcaaaagaatctatatataaatcaatttggaatggagagagtactacgtagtatccgatagtgacaaccttacatggagcaaagcatgggccacctcgagatgactagcaccgggaattgaagcagtgagcccgtacctacctatctactactactatatgccactccaaatactcgcagaattaaacggtagtctttgtcacttaattggcgccgaagcctcatatatactacgtatgtgttaaccttgcgaagctgcaatgttgcacttgcactgcactcgcctcgccgcgatctgatcgccatggatcacgtcctcgcctgcgtcggcatcctcgtcgccttcacgccgctgttcctccttgccgtgctcccgctcaagctgacgaacggcggcgacggggtgaagctgccgcctggcccgtggcggctgccggtgatcgggagcatgcaccacctgatgggcgagagcctcgtncaccgcgccatggccgacctcgcgcgccggctcgacgcgccgctcatgtacct

SEQ ID NO: 40211 - DNA, 696 bp, Oryza sativa
gccgggctcgtcgccggtggccacgtcctccgctgtccacgcgctgcaccacgtcggagctcgtcgccggcggccacaccgaagctcgtcactggaggctgcatcttccgccgtccatagccatgcgccggagctcgttgtcggaggttgcatcctccgccgtccacagccatgccacgttgggagctcgtcgccggcggccacgccggagctcgtcgcttgcgaccgtgtcctccgccatccacaccccggggtgtgccgcaccgagctcgtgcagcagtcatgctttgagagagatgtggtaatatggtagaatagataaggtagaagaagatagaatcgatggattggttggttgctaacttatcccatccatcatggttgggacgggatcccgtcatatagcacttctgtaaattctgatagagtttttaagagaggaagcttctagaactgcaaaatttagtaaggactctagcgctagcccgggcgtgcttctttccggaccatgcgtgcagcacgacaggtcgacgacagctgcaaattaggcaaattttgttggcttatttccgcattcttcccgttttaatgacctcacacaaactgttcacacaaagatgctcctcgcgaacacagatttccggcccgatctgtacagctacttcatacgtgttgcttgttaaggcggtgaacgtg

SEQ ID NO: 40212 - DNA, 810 bp, Oryza sativa
agtgtactcactaccatggctagttactcctagtatcaagcatgaatactggcactctgatcacctctcgacgtcaatgtgttgcacatgccaaaagatcacgccttgcatgcacagctgattaaactaatcaaggcacgaacaggcacctaaccgggctcatctggatagctagagaccaccacccaccataccataccattccttccccccagcttgcgatttgttgcaatgcggcgccaggaccagcaaaagcatgcgcgataagcttagatgccgtgggaacagagcagtagtacttgcaacgcgttgcttttgttcatttccagatctctctctctctctctcactctctctctccttttcttttaaattttcttttttatcttctctattggcgagcatatccctgcaaaagtcactgtttccggcttcccacctgttgctgataagtttagcatatcatgtctacagctacgtgtgtcagtgtgtgcaatttgtgcatgcataccgccatgggcgcgcccatcagatagctccaggccaccacgagctttccctttccaatcaaacaacaaacatagggcaccccccgggacatgcatgcacctggggcaaaggtgcaggtagagagagagatcatcggtctcggcacacaacacgtcacgtctcgcggactgcacaaacgcatcagagaagctaaaggagaaaaagaagctgcagatggggaaatatctccattggttgtggttaattgacatttgacagatatgatgatggataatttcaaatgtttcttcttcttcttgt

SEQ ID NO: 40213 - DNA, 508 bp, Oryza sativa
cgagtattttcgttccaagtgccaggccccgaggacttcagaaaccaataatgtatttgccatgttcaatgtcaggttttcacaatgcgcacgctagtacggtgtgagcttgcaaacatttacccgttgtgcctgtttctgaaatcaaaatctagttatttgccccgtttggaaagtttatttgttggctcatattgcagcagaaccttattatttgctcgaagttggattcgggacttcacgtcttccatggccatagaaattgtaacgctcccttttaaattgctagctccagtggcctcatatttcaggtgggatatcttcttccagcatcagaacgtactgtaccaatcatctgcacgatcgcacattcacaatggactagaatggcagcaaccatcaacccatcctttgttcgcccagccgtcaaatctcataggctgttcactctgaattctgaaaaccttacgacggtttgacaaaatttctcaaacaatctagtatatat

SEQ ID NO: 40214 - DNA, 1282 bp, Oryza sativa
accctgcttcctttttcgtttccatctcgctcttttactcatgcaccgatgcatgcaaagacaagcagaggtccccttgattggggaatttgtactgatcttgtttcttaatcaaacctaaagggaaaaaaagaaaaaccctctccactgccgaatgctgatggaccctctttggatggcttcaaattttggactgtatagtagtagtggattctctactcgatctttctggattctttttttctgtgatggacattgggcagcgtttgctgttgattctactacagaatgaagtgctaacctaaagagattacagtacacagtaatttaccctacatttcctctcttattggagtgggaccgtgggactgatatacttgtacggtcttacggatgggtgtcgttttttggttttgcccatgcaggtttaagcagcagagagaagtcagcaggtcgtcacgttaaagtattcagctgtaccagcatcgctcaatcaaaagtccactattgacgacgagcttgactccaacggagcgctcttctccatgggagaaatattctttgcttttttatctagtgggcgcgcatctaaaacctaaacgatgggaatacagttcgcagccgcttttggcagccaaagagaagcgacgaggcagtagaaagaaagaggagatgcctcctatctcagctatcactcactgtgggcctgtggtcactggtcgcgacctcaagcaagcaagcaagcgacggagggcagggatggagggttaagtatcattcctgcacttgggcttcagctcacctcatctttattcttcacttccttgtcttcagatgcgtggtgtaattgactccctacttctaattatactttggtttgctgtgtgtcctttgcctaaacaaaggtagcacgctgtatggttcaattcatggaggaagattagaaagaaaaaggcagcagtgtccagtggatggtgaccagcaggaagctataggcagtagtgactagtgacgctgagcagcatcggctttctttcttcagactgcgctgtaaaatggactaaattgagctttcacccttctttgtcgaggctgatgttttccgtattctggccgtgctttcaatatgattgtcaaaacaaaaggtattgtttcccataacaggggaagctgtttcagatttttagttacacaaggaatagaccacacgattacacaagaactggccagctatatatatactcctatatatcttttggataatctgtccaatagggtgatg

SEQ ID NO: 40215 - DNA, 643 bp, Oryza sativa
attcctgcagccctggcttttaaactgctaataacatataaaagttttatccacatttttttttcattcatacgattaaagaagcaactacatcgatcaattgatctttttattcctatactaattgggaaccctctaagaaagctctcatatttagaaatgtctagtcgtgaattaaggctatgttctgttagctacttcgctagattattgttgcggattatttgctttatgtctctaaaaattaatttccttaaaaaactttcttctacagtatttcttggatctctcaaatgtatttatcaaaacaagaaagtttgggtggttaaagtaaaataaaaaaccaaaaatacctagcgaaaagtgaaaaaaaaataaaagatggtctagaatgaaactttggtaataaaagatagttcacagtgtaatttattcttcattttattttattttttagcagaaacactgtacggttcaatatattaaaaattaaaagaacaatttacagcatgtctatccaatcacataaagctgatctctcgtaatgatttacacgatgtagtaagagaggagtattcacttttaagaggacttccaagaaaacaaagagggtcttctattccaaaataggaataatatggcc

SEQ ID NO: 40216 - DNA, 668 bp, Oryza sativa
aaagttgggaactaaacccggcctaaaacatagtactttctatattaccaatcaaaccacggttcgaccgggcaaaccagtgatccgaccactaagggcccctttgattcaaaggaaattcataggaattttagaagattttatttctataggaatttttcctacaaagtcttttgaataaaagaaatgaaccttatggaatcctatgaaattcctatggaatgcctcttctcatacaagtttttgaggaattttaataagaggtagaaccttatggaagaaatcctttgagtcgttatatctcctcaaattcctgtgtttttcctgtggtctaatcaaacggtcattcctatattttttctgtgttttgcaatcttctattttacacttttatttatgtcagaatcatatatttttcctattcctgcattttttcattcctgtgattcaaagggaccctaaaccaattaaccaagagctttaccggttcatttaccggtccggtcttttaacaactactactagtacgtacgtatccatccctcgatcaaatccagtgatgcaccgaacccgcgacaagaattcactcaccagtcaccacatctcatttcctcgtgctgcttccacccctccctcgtcgccttgccagttgccagtttgccaccctt

SEQ ID NO: 40217 - DNA, 790 bp, Oryza sativa
tagttgtagtagatagcacactgttcttgtggttgaacataactagtgtagtgatctgatgggctgaaatgtatattctgacttcagttccctgactgtaatctagcgctggcgagctaattaaagaacgcataggctcagctagcatagtttgattaagaagcgctcttctgacttttgacagtggactctgttttcttgtagttaaacgagacttggaacattttttttcctagttttgagatatagcacatgagattagtaggcactagtaaagaaagacaagccaaggatcctaagagataatctgctggtgtttggactttggacagctacacatgatgatatggacatgcaccaaactatacactagtacttgtgcgtgtgaagtacatgtatccgccactaccagctaaactagctagtgagccaagttagtgcgtcacgcgagaaacaatcgaaaacgtgacagtcacaacaatatggtaatgttaatgtactcggaagtgccaatctatggagcaaaatgtagctagctgttgttgcaacgattgcattggacgcatctacctactatcgtagaaccaaagcagttttagttaagatttcccatgacgcattcactcgtccaggtactagtacatgtttatttcctcgtggtgcaactagctagggccaacgaggcgaacgtgaacttggtaactaaccattaatttgtacatgtgagacggttctcttgataaatcagagtcagattcaaacagtgtaaacactgtaggctcgttcgtcc

SEQ ID NO: 40218 - DNA, 905 bp, Oryza sativa
tggtttgtatttcgtttcgtcgatgaggatgctgtagtttgaagttcacgcatgtgtcttttgcagagatagattagagcaaaaattggatcacgtgcgtcagtacatgagattcatcgatcaaaactgtgaactcggagtgaccattgaatcatcggttcattgcacattcacacaggggcttcgttaaaatatcgtcgtatcatgtaacatttcttctacttttgcgtattggagttaaatcttaaaatcatgatcttaggctatgcacgatcacctaatttctcttatacagaatttgatggtgtactgaccggatgaagaagccatatggttgccttagatgcgtcggtgtagtagttgtgaggcgacggtgatgaagatcaccatgcagtgacggcgatgggaattcgcccttcactccccttcaacacgccttaaaatcggtagtttgagggtttggagaattggcttagcgtacatgagtcgtcgctcgtgcacggggttaaggttccctttttatgcgtattgaggggatcaggggtgattccttctcgaggaaaatgacgcttccgatcataaagctaaagagagaaacgtgtgagagaatgcgtgagactcgttcctcaatgttagggatcgcgtgggctttggtgggctaagcccaacgctctcctttctggctcggtggccagacatcaaccaacattgcgtactcgttttgcacatgtactatcttggtgttatgcatctatttatatatgccctctgcgttccagacttccgggcgtccccaacctgcaatggaataagttcactttgagtccctcaaatactgctccaatctgattcatacccctcaaccacaataccatatatcttgattcttgacccttaaactatat

SEQ ID NO: 40219 - DNA, 716 bp, Oryza sativa
agatatgttggatattatgttattttgtttctgtttgcttgattatccggtacttttaaggggtgaatgtaacagatgaatagatggctaggaaagagataaattttcctttcttttagctctgattgttaagaattcatccatttatcaatttgataattagtttttgcaggaaaaaggactggttatgttcttttgtaggacgtgcacttttcatacaaccattcacatttgttaccaatatgtgttccgtacacttttttctaacacttctgtttaattgtgatgttgcctatttatttcatccgtacatgcaggttccattatactgtacccataaaactttgcctggaatgtaatatcttgaagtacttgcttcccaatgaggtctgtatatcacccacgattttagctaggtattaacctttttgagttcaatcttctatacggttcactctatggaccatcttccaattggtgtatttttttttatgttacaaattacccttcatgattcctaactatacgagaccttgttcggtttggaggggattgaggaggaatgattccacaccagaattgttatgaaataaatctcctccaatatatctctttggccttattcagtttggagggtattaagggagaataaatccacagtacaatagatgtgaaatagatcccctccaatccctcactcttagggataataatcg

SEQ ID NO: 40220 - DNA, 673 bp, Oryza sativa
caaaatataagaatttagaatcggatggaacattttatagtagtatgaatatgaatagatccggtcttaggttcttatattttgagggacggagagagtagttaattataagaaaatatgtcgctctgttttgtgtgtgcgggagccgaacatagcctaattaagcaatgcagccatgggtgatgttgatgaactctatttactactatcttatcctagaatataaaaatttgtagagttgaacatgctactatgaaagtaagtagaattaaatgagagaagattgtgattggttgaaaaatggaagtaagtgaagaaattgaacggtggaaggtataattggttcgaaagagaatgttgatagaaaagttattatattttagaacaatttctaaaaaccaaaacttactatattttataacggagggaataattactaccttcttacatgatcattgtcgatgtcattataacctcctaacttaattttatgcgatgtccctaatgttgatgctaattttcggaagtcaccaatcaagaggtgcaaagtatgccctgagacggatgctgggcctagatacttggggtatatttttgtttaaagacgagaatgcatgtggacaacttataaattttgagggtcgttgtcggatatatgggcccggggatatgc

SEQ ID NO: 40221 - DNA, 668 bp, Oryza sativa
tatcatgaaaaagaacatagactctgatatactaaatgataatatctattatattcaaacaaaaaatcactttatcccagttatgtgtaactcgtctatcaccattcttcgcaaacatataagttaatatatattttttattatacatttgatccacctgtgtatgtacataggtaatatacaaaataatctatattgccaaaattattgtgctaattgttaattaaaagggatataatattgtggctaccacctgagtaacctaggtctcggtgttcaagcatgagcgaagaatgcagcggcagacggcatcgtggttgagcatgagtggagcagatggtagctggcggcatcggatcatgaatgggagggagtagatgaggtgatgaccgttgatgttcgcaagagagctggagaagaggatgcaatggtcgacaccaatgcggcgatgcgctggaggtagcggtcaatggaggaggcagggaggtggtgtacgagcgtacgagggagatcgggaggtcgctcaatcggaatcgggggaaaggttgatgcaaaattataatcttaccctcccacgaccaaaacacgattggtacacttgctctcgcatgggcgcaatatttggacggtaccgggctctttgagctgttagatcacgcgtaattaac

SEQ ID NO: 40222 - DNA, 531 bp, Oryza sativa
tgttgtcggttgcttgtcacccttttctatgaggggaatgaattcgtcagccggctaacgatcgctttcaggctttcactctctccactccagtccaaatctagcaacaagacaaccccaagtttcatgcacctccgctgggataagccacctagctctccccgtcacacacacacactgggagtacttcaaatgttttcatgtgagctgatctgataagggaaggcaacagattgtctcttctgtttggaaaattccaagcgcttcagtacactaaaggcagtctcaacccataatgtctataagcaatgtctatagtgccatatcaataagacatcacaatataaactacaatctacaacccatggtttcttaaagtgggccattaataaatacatcatctcacttctctactaatcatatttattcttcatctattatgaagacactattctttcccaatgcaaaacttgatagtatctagtggataggttctcatgttgaagctgtgtcttgtatgagacccagttt

SEQ ID NO: 40223 - DNA, 1077 bp, Oryza sativa
aagtaagttctctttttatactccctccgtgctataatacaagagattttaggtggatgtgacacattataatacaataaatctgaactacatctaattaaaattctatatattattaaacgcagggattataacgcactagccgtcctagccgagctagaggagtcgtggagtggggcaaggaacggcagggttttggcgtcaagtgcaggcggcgtcacggctggggtcacacacgtactcacgcgccgtgaagactggtaaaacccagcttccagccgcaagacggatggacggacggacggaggttgacagcgactacctagtacgacgagtggtaggggcataggcattgctgggttcgatccctaaacatcactgagatccgcagcaggggatcacgagtgcgcgcgagccaggaagagaccatcatatatacgggagtaattccattctttttatttaaaaataaggggaatgccaccagacgataaacgatgtctcttctaaggtattgcctgatacctgatatcatcccggctaatatctaccaggtatcacgtgatacctcaaaggtatcatcccgtccaaacaggtatcaaccgatacctacctaccagatattaggggataccttaaagatatcgtcccgtccgaatagaatatcattttgtagtattttactttcaataatagaatcattaatttatttataaaagttttcagattatttaaaacttttatgtaaacattaaaaaataaatcatgcttaaaagtatttcataataaataaatccataataaattaaattaaatttattttttaaaaaaatatgacaaatgattaagcatataaaaggtcaacaatgtctgatatactactttctttttttaatatgtgatgttttaactttttacatcatgtttgatcatttgttttattaaaaaatggaagtacacatttttcttttgttgtagcttgatttattattaaatgaacttaaagcatatttttaagatttcctcaaaattttaaatgaaacacacgatcaaagcttgtaataaaattttatggtg

SEQ ID NO: 40224 - DNA, 739 bp, Oryza sativa
tcttcaggaatcaatatcaggaggaatatgtctggcacggttcgagtttgcatgatttgagagttttgaacggttgcaaaggagaatgtcctttgcaaaaaaaatgctcgaacctggaatatgatggcaaccgaaccgatggttggcacagcggtactaaggctttcagcgcaaagtttggattttgattaaaattgaaaatgatatgattgaaaagttatgtgtgcatgacaggttaatgtgatggaaaagaactgaagtttgaagtttggatccaaattttaaatctaaacacagcctaacacatggtgtttgacttgtcgtgagcaaccgggcagccggcgcgacccgaccctgacagacaggtaagcgacgtgagatcaggctcagcagcgaaccagcaccacggatgtgagatcacgtgaggatgatccgaggccgctgcccgcgggcgcgccggccaaaccaccccaaccaggcacaggcagaggatgggcgaagcagcgaacgctgcggaatcacggcagggcggggacgcagtcacgcagccgcacgcggtagctgtcggctcggtgactctacggtgcgcgcgggcggcaacgaggcggccgcgtgccaaccccccacaatgcactcgttgcacctccgcccgtgcgtgcgtgcgagattcttttgttcgttacgggtggacgagggagaccggcggcggaagggcatgccttctccgcgccgttggaaa

SEQ ID NO: 40225 - DNA, 636 bp, Oryza sativa
tttccatgtgatttcgcctctatagtacggtgattcttgacctcggaattcgtgagggtactattcagtctcggtgcacacagcggatgatcgtgggaatgcaaagctagcaaactgctctgtcacatgccagcaatgtcatcccaagtattgcatcaacaaacactcccacatttctttcacgtgatcctagcgtaacgagccgcggaccgtcgtttctggaaccacctgtttaaatatagataaaaaaaaaactaattacacagtttagatgtaaatcacgagacaaatcttttgagtctaaggggggtgtttgggagagaggggctaaactaaacataagtctctaaggagggacttatacttttgtgagagggactaatgtttagtccctagttcctaaacaccccttaattaggccatgattaaacataaatgctacaataacccacatgtgctaatggcggattaattcggctcaaaagattcatctcgcggtttccaggcgagttataaaatttgctttttttattcgtgtccaaaaacttcttccaacatccggttaaacgtctgatgtgacactcaaagattttcatttcaccaactaaacagcccctcctaagcaggtaaacgtgc

SEQ ID NO: 40226 - DNA, 622 bp, Oryza sativa
catgagagtaggtgggggtggcaaattcactaccgccaccactatacccccctccatcccacagaaaacaaatctagaacgagatgtaacatattctagtacaacgaatctagataaagatatatccagatttacagtactatgatgtgtcatatctagtattagtttggttttttagatacagaaggagtagataataaaaataattttgttagaaatgaaattatattcggtctctgcaaacagccaagaaatatcatgatgttatttttacagcaactcacttaaataaaagcaagataatctctactattataaaaattgaagatatttttaccggtattttgataagtcatccatatttaagttggttttttaagtttgttcgattttgaaaatacaaacggattttaagttctattgcttttgaaaatacaaatggagtcgtacaataaatctctttttaaaaaactcacatactaacttgagataaaagtcggactcctaattgtaacctataattttctaaaaaaatatccaaacgaatttcaacagtgaatttcaccctagctataccgtataacaataataagattaaagtagagttcacccgttgcaatgc

SEQ ID NO: 40227 - DNA, 879 bp, Oryza sativa
tagataataaagtaagtcacaaataaaataaataatatttttttaaaaaaaataaataagacgagtggtcaaacgttgcaagcaaaaattcaaaatcccatatattatgggacggaggaggtactaactacgataaaaacgtactctagatgcgtacttcctccgtttcacaatgtaagtcattctagtatttttcacattcatattaatgctaataaatataaacatatatatttatatatgtctagatttattaacatcaatataaatatggaaaatgctaaaataatttatattgtaaaacggagggagtaacaaactatcatatgctctacgcgcacacatcttgttggtggcatacccaatccctagtggagtgtggaatgcattaatttgttcactgaactacgccgcgtatatatgtaatcgtaatgaagattagtgggaaacaacacaaagtctagaccttgacaccggggatggacattaatctcaccccttgacgtacgaccactacaaattagtaagaggtaacggtcaaggcacatgttagatcgatatagtgtttatatcctcaacgacaggtaaaaatgaaatgatgtgcgaaacaacgagaactaaacgttgcggtttactggaactattataaaaacgatatttcttttactatcgagatcacgtacgaaaataagtctattttttagacagacttattaagagattgtatgaaaaattaaatagattttttcatgccggcaacttggagcagcaagcaagtgggccctacgcatccccgcactattttttctcccacacctttttttttctcctccttatctccaccgtatcactcttttttttctctcttcttctccaaaa

SEQ ID NO: 40228 - DNA, 2028 bp, Oryza sativa
tatctcttgcttctttctgttggcgatgctataggcggcaagcgtagtatcagtaggagaggagggagacgaagggggaggagggatatataggaacggtgggtggggggtgtgggtgggtggtttggcttgcgatagatgccggaatgtgtttgtgtatgggggcaatgggggctaccatactgcgccccctatacggctataccatgtccgcgtggagggaaggaggaggaagctgatggtttgctatactacttttgttctggtgtgtgtgtgtgtgtgttttttatcttttcctcttttcggtggctggaaccgtataaaaaatgccctgctgttgtgttggactttggatagaacgacgtcacggcacaggggagatgagggagggagtggcaagtgttggtttgtgggggcagtcagctcagcccatggataccgcgggatggcttcatcgagagctggtagctggataaagatggaggatagattgttcttgttgctctggtgatgtgagctggcttggcctggaaaatgtgcccttgggggcagctcgccatgtcacacttggcccctttctgtgttcttttttcttcttctttttattgggtttgctttggcagttgctttgatcaaagcaatggctgcattagtgttgcttaaatatccatggtttattctgttcgggtggatatatattgcgtgtgatgacctgtgcattgtggagtgttctgttgtgccatgcatggactagtatgcgtcttttctggaaattttggaggaatcaggtgggatattgcgtcaacaggggaattctttggtcctagtgagtgtgatagaaacaaggaactggaaagtggaaacaccatgtaaaagtatactgggacatgttttgtaccatatgacagaaagaaaagtatagctttattacatgatgccaaaagaactgaggcacaaatttagcgtggaaaaacttttggaaagtaaaaaccatgaacacaaatatacaattaattgaaatcagttatgcgtatggtgaccaaggtagcaatggtgtatgtagtaataaatcatgaaaaagatgatgccctagtgctatctttggtttcaaatatactttgtccccatatatataaagattatattatgcaaaaaaccttcatatagttagatttttaaaaatataaataggcccacatctagataagtgcaaggtaaagagatggcataggcctccaaaaactagggcccctaaaatttgtgtttcaatcaatgctaatataacattaaagggttctgatccattatttcaagttccactctttctccttcactcagagccccatcagttagcctaatacgccaaagcaaaagtcaagatttgaattttgaacttcattttaaagttgattttaagatattttcaacgtaatttatttttagtattgtcttttaatttgctgcaaataaagatgttttggtttattatgaaatatgagcaactaatgaggctctcattcggttggaaaatgtcttactttccttagctccgactttgatgatatcatctcaaaattgtatccataatggtaatataaacgtgcgttgccagcactggagattttatttttccacttgtaaataaaactaaaatgttcatcatgatgcagttcttggttcacgcacttggtcagagcgccatcgccattatctgagcgtccagccattgttgtacgtccgtgcacgattcctacatgcatcttcagtagcagtgcataatatagctagagagagaagcacgttagatttgattgctaactctgctgttatggatataaccacaaacgacaacaacgcggactcaacaaagagcaatggggatggagctcctctatgttatcttgatacggggatatggatacgcgatacggagatacgaggatacggcatttcctagaaaacactgatacggggatacgtttatatatatttaaaaaataaaaaatatagaaagaaaacataaataac

SEQ ID NO: 40229 - DNA, 563 bp, Oryza sativa
aatactactactattctttatctgttgcccatcaagaagacgcaccaagtctccggtttagaccccccaagtcttcccccccgcgcaacagcactccggttttagtaatgcatacgccgcagttttaaattgcctcattaactttgtagtggtaccttgcttcccccactggcacactacctagctggatcggggtatacatccaacagtggcatatatctggtgtgtgttgtgttgttttcagtttacacaggagtattaaaatcccacgagacgagaggagagatagcacagctaacacactcatcactagcagccgcgcgcgtgagagagaaactatggagagcggaggccgcgcatgcgccacgcaagttgcaacgtgcaagtcgccgctgcaattactctactggttcgtagcgagtccacttgcgcgcgtcgcggtcgcggcggccatatcgctcgcgccccggttgctgcttggctttggcattggcatacgcattctctctcaaagtacgcccgcgtcgcaacaaatctggccaaatttctcgcgctgttgtttt

SEQ ID NO: 40230 - DNA, 543 bp, Oryza sativa
acaccgatcaaagataagtaattttacttatcatccatttaaatatgctactagttatttctcgtaaacaagcgatttattaatatatttacatttctcgatgcctatatagccaatattgtgtggaagaatggagagtcacgcattaaattccggaaaatctgcgcgagttaagcaaatagcgcgcactttttttatcgagaaaggactcgtcgtttgtgttttttctgttaggcccgcatctttttcccttttttttcacgttttgtttttttagttattttctatttttgtgttattactttgaactcaaaattttaaacttttaactgatatttgaatactttcaattcaaatttgaaacgttttcaatccatatttgaaaactttcatctcaaatttaaaaactttccactcaaaatttgaaactttcaatctagatttgaaaattttcaacccagatttaaaaacttttaactcaaaatttaaattttttaaagtcaaattttggaactttcaacttttcatcttacatttgaaaaa

SEQ ID NO: 40231 - DNA, 750 bp, Oryza sativa
ttatgctacaaggaaaattcgtcttaagatggagattggtaaatatgtgatccaaatttcagcatgcaatatgttcagattgtcaaaacttggtggtacatttggctacaaaggaacgcaaagatcttcagaggagaagaaccggacatgcaaaggacttcacaccagatcatccaagatattcaagaaagcttattttgtctttcaactatatgtttagtttgttaactaatcacatagttgggggctacacctaattaggtgcatctattcgatgcaccatattctttatcttttcgccctttacagtccactcggcagattttggcttgaagagtttgaagtactcggattatcatctttgagaaggctatgatggtcgactgcaaaggactcgggggctactgtggagattatgggtatcccatatctacacggcgatggtattcgaactgggtacaggatacctaatgtagatagaatatcttatctgtatctcgggtttgtttcttaacttgtgtatcaaggaaacacccagagacttagtcggttacgactgtattttatctgtatcttcatattccgttaggaatatagattatcttttgtaatccggactccttcccatatataaggggggtccgggcgcctctaggggcatatgctgattttttcccgaatcatacaatcaataatacactccgcggattcatccccggacaggagtagggtattacttcttttataaga

SEQ ID NO: 40232 - DNA, 858 bp, Oryza sativa
cgatacacatatgtgccggttcataaaaaccgttacatatgatactgccgtagttataggtgcgagtttattataagaaccaatatctatgtgatgttcataggtatcggtttattatgagaaccagcatatatgatttttgaggaatattggtaccggattttattataaacatgtaccaactaactcagtcaatgagttgttataggtaccggttcttaattttacactgaaatatgatggaaaaaatgttataggtgtcggtttaaagcaaatcggcatgtataaggttaaggttggtctctatgggggtgttttggagtagctgtgtggtataaatttgcttgaaccaaagcagaaacacgatatactctgggtgcaattcctgtgtgcacaaagcgttgatcaaggagtctcctggtacataagcttgggtggacttagcagtttcaacgtgaaattgaattggcatgatcagtcagagccgatgctttactctgcacgtgctgctcgtcgcgattgctgctcgtcaaatcggagtcgatcagtcgactccttgtcggcgtttgatgcgaagccaaatctcgctaaacaattgacgacgatgatgaagacggccggcggcccggatgggcctatttggtatgggattggtccaaatctaaaatttagttctagagttatgtttggataaagccgtagagcaatttaaatccaactctatctttctttctagtttattttgtgaaattattttactcagtttcgtttttattttaggtggaggtgaaactgtttagttaggctctaactctagtagaggtggagctgaaattgtgccaaatagggctgcaggaa

SEQ ID NO: 40233 - DNA, 977 bp, Oryza sativa
ggactgagtgtcccataaatacttatattggggcataaatttttgaacactcaaaatatttgtgaaccaaaagaagtatatggagaggtgtgtaccattaatccattctttcatatgactgtcaacgccgtaaaatatatctgtaatattactctcagtacagttaattagcatatggccctgaaatttttcggccgaacccggcaattttatatttatatatacccttgccttgagcttaggcatcatgtagcctcgccgctcaagcatcgctaactcagttatagctgtctaacaaagcaaattagctttcgctgagctttgtgttgcttttggtctcctagataggtttgtgaagcatgaagctcacggtagcaattgtctgtgccatggcgaccgcgcttctcgccgccgccccgtcgtcggcggaggccggcgacggcgagctgaaggtgggctactacgacaacaaatgcagcggcgtcgaggacatcgtcaggtcgcacgtcatcaaggctatcatacaggaccgcggcataggcggctccctcatccgtctcatcttccatgattgttttgtcagggtatattttgtttcttcctccgtttaataatgtaagtcattctatcatttctcacattcatattaatgttaatgaatctagatatatacatttcctatctagattcattaacatcaatatgaatatgggaaatgatagaatgacttacattgtgtaacggagtgagtacatatcggtacttcatctatttcatattataaattgggccgggttttaaatggatttatgagtgaattcatttatattacctctatttctcattataaggcattctattttttttcctagacaaacttttaatttatagaaaaatatagtaactttttcagcacaaagaaaatattttattatcaaaatggataaaaggttaatcttaatgaaattaaattgggt

SEQ ID NO: 40234 - DNA, 625 bp, Oryza sativa
ttcctgcagcccgggttgccgaggaacgggacgcagcgacaacctcagatcggttcgtgggatttgtcgatgttgaccccgacgagtcacccgtgttgcatattttggaagaccaagagtcctctccgtcgatttcaccgcgagacgtcaacgtgatcaatacagctgagaccagcacgtccgcggcagctaggacgcctgctcaatagctacaagccctcaactcgatattgagagagccctttcgatcctgccctgaaccctgatgttgattagtaggcagtacgactataagagaccatggccaacctcaatagcgcatttgtagaggcagcaactgagcccccgctgcgagatccaccacgaggaaatagagaactagctaatgggaacgcagaagtataaatccctactggtgaacgttccccctatgctcaatcgccacgagcaacctgagatcccactccaccacctcgcgaaaatcacgatcttcgtgagcatctggacgaccgacggagagaacgtcgggatcagaacaacactgatcgccatcgacatcgttctccctcacgacgaagagagaacaccaattgacaccaacatcagcgtcattctccttcgcgac

SEQ ID NO: 40235 - DNA, 512 bp, Oryza sativa
tatgttacaaaactgccctggattggatcgaggagggtaatttgtccggtattaaaagttcagggtgaacgatatctagttttctggtttagggggtaattcggtcaaccgcgatagttcggagggataattcgtattttttgcttaaatatagcatccacctcccactagactggctgactggggaactcccttctaacgcaccttctcccaaccccgcgcctacaccctaagtgcatgcttaatgaaaggcttggtggagtctgatatggaacttgttataaaagttagccgatatagcggaacgacgactaaccttcctgatcgcttcaatcattgatcacccaagacacgccagatgacgacacaggaacacacgatatttgttaatgaggttcagctgaagcctacatccccggggctctgattatgggcgctcctccccaaccaatatagctcctagccgctacgagtccatggccacactgccatcatatccctgcatgtctaca

SEQ ID NO: 40236 - DNA, 646 bp, Oryza sativa
atacagacggaagacgtgacatagtttccaacccatcctagcaatagacaagagtaccgacccaatcccacctacggccggaaccccttgaacaggcaggcaggactgagcccctaacagcaggacaccggccctgtgccacaacatctcaactaccgggccgcagttcgtgcctgccgtcaagcgcctgtggtcgtcgccctagtcttccgctgttcctcgttggtctttgtgtgtgctgggccttcgttgcccatgtaataaattatctattaacgcttccgtttgttaaactctgaaatgtatcaactcttggtgtaccttgcctcctgggacaaggaatattacacgcccaaaaggaacgcccggtgggttaattccggttgagacagttccatgatcctcatagcggacctggtacgcccccccaattcaaaaacctaggggagtgggaaagggaacatgctgtggaataaaaggtttatttgtcgcggggaaacttgtaacattacaaacactatacattctatgaaatttgataaaatgagatgtttgaaacaaagctcggtcaatttttggctaattttccatatattctcccgtgcggtcaaattataccgactgcacgggataataggttatcata

SEQ ID NO: 40237 - DNA, 717 bp, Oryza sativa
tttcacaaatagcaaaggatttttatttttgataatattgctaaggcttgggatctacggctcgtcctagggtcaagggggctctgataccaacttgtcacgaccggaattaacccaacgggcgttcctttcgtgcgtgtattattccttgtcccaggaggcaaggtacaccaagagttcatacaattcagagtttaacaagcggaagcgtaaatagataatttattacatgggcgacgaaggcccagcacacacaaagacaaacgagaaacagcggaagactagggcgacgacaacaggcgcttgacggcaggcacgagctagacaccaaagccttcatcatccaggggctcctcttctgggttgggaaaaattgagcaagactcagtacaaccaccgtactcaacaagacacacccacaagtgcataatatatgcaagggagtacaagggagttataatataaagggttagggttgcagtaaacagcatttaaagatgcttagttgctcaaagctattttgtaaacacgattctagaactatgcaatattatttatcaaggccgtgaacccacacgaacctgccttaaccccaggcctacgatgattcagaccaaaccggcaacccgaccctgggtcccagctcgtcccaagccaacccaggccaaccattccacattttagttgttaagcatgttttaagaattcaaacactaa

SEQ ID NO: 40238 - DNA, 581 bp, Oryza sativa
tgtgtgcatggtgtgtgcccaatactttagaaatttctttattcacagcatataagcttctttatagctattttattttcaatgatgtagtcaactttaggttgcgcgcatcatattttacaaagcagttggtatatcactcggatcatgttatttattccttgactatgcttggtttgttcaagtaaccacgtagtcggggctacacctattaggtacatctagtcgatgcacctaaattttcatttaattatttttcagccctccacagtcttctgatttggtaaaagtactcaggagacaatggcgaagatgattgaaacactcggctttggagtaatctagttcgagagaagattatcttttcgactgtgaaggtctcaagggctactgtggagattataggtaccccatacccacacgacatggtaatccgactagttataggggataacttatatctatggaatatgtaacagatcatgacttgggtattacgtttccttgtatattatggaacggccttaagtcttggtttgataatattgtaaagtagatttaagaaaccgatatcggattgg

SEQ ID NO: 40239 - DNA, 649 bp, Oryza sativa
agtgaggatcactgcagtaacctcccaaaaagcgtggggctctgcattcgtcaccctcctgctccggaagcgggcctgccctggtagtccactccatgcggataccccagggcaccgcacataccccgcagctccaagacaaaccagtcatgtccagaccacgacgactgacgctgccggccatctacaaacaaaaacaaaaagaaaagcaccatttaaaagtcagattttggcgataaatgaagcagcaggacagagagagactagagagttttcacaaatagcaaaggatttttatttttgataatattgctaaggcttgggatctacggctcgtcctagggtcaagggggctctgataccaacttgtcacgaccggaattaacccaacgggcgttcctttcgtgcgtgtattattccttgtcccaggaggcaaggtacaccaagagttcatacaattcagagtttaacaagcggaagcgtaaatagataatttattacatgggcgacgaaggcccagcacacacaaagacaaacgagaaacagcggaagactagggcgacgacaacaggcgcttgacggcaggcacgagctagacaccaaagccttcatcatccaggggctcctcttctgggttgggaaaaattga

SEQ ID NO: 40240 - DNA, 680 bp, Oryza sativa
atcattgaatctcttaattttgaaattgctagataaaatctcttattcctaatgatgatgattgcaaaagttttgaggttttaatgaatgagatttcaaatattagagatgttaatgttgcacatgatttgaaaaataaatcttctcttgctcttagttttgctttgcacacacgcacttcggatgagttgtttttaactaaaaagttgttgcaaaaatatcaaattgattttcatgctagtttgatgtttaacatgatttctgctaaaaagttaaaacaacctcatgatgttttgaattgctcaacatgtaatttgaataagatgaaattgaaagatgctttaggtcgtgttgagtacatggaagatgttgtgaaaaacaatgaagtgctttcttgccccaaatatcttaaaagcaaaggtgtcatggtatattgtgaaaattgtgctaatttggaaaaagaggtttcttatttgaaaaattctttgcttagattttttgatagtaaaaagaacctcaactgattttagatcaatctaaggtttgcacaaataatcgtggtttaggttttaatccttatgctcataattctagacatcctcctgttgtgttaggtgctggtgctagaggtggtgagattttggttaaacctgatactaacaaagctgtgtttaaatctg

SEQ ID NO: 40241 - DNA, 536 bp, Oryza sativa
gaccgcacgggagaatatatggaaaattagccaaaaattgaccgagcttagttacaaacatcaaattaaatcaaattacatagaatgtatagtgtttgtaatgttacaagtatccccgcgacaaataaaccttttagtccacagcatgttccctctcccactcccttaggttcttgaatttggggtgcgtagcaagttcgctatgaggatcatggaactgtcacgaccggaattaacccaacgggcgttcctttcgtgcgtgtattattccttgtcccaggaggcaaggtacaccaagagttgatacaattcagagtttaacaagcggaagcgtaaatagataatttattacatgggcgacgaaggcccagcacacacaaagacaaacgagaaacagcggaagactacggcgacgaccacaggcgcttgacggcaggcacgagctgcggcccggtagtctagatgtcctggcacacggccggtgtcctgctgctaggggctcagtcctgcctgcctgtccagggggttccggccgt

SEQ ID NO: 40242 - DNA, 1953 bp, Oryza sativa
tttttagaaaatgacttgatgctagaaaagtagtctgatatgctgttcttactaactggaaggcattatataggcattacagttacagaaaacatgataaagcttttttgtatagaagctccccagtttcatggaaatggttatttagaattctcaggctatagaacttggtgcttatgattgttcagaatctcagatgtatgatgaggaacagatgttaatatccttgtggccacagtgctctcatggctcccctttgccatcattttcaccagtgacctggaaatcgctcgtctcggctgtgcgcaggggcaaataacagacatcagaagcctcctttagccctttgtgctctaactttatatttttgttgcacatgcttggaattagtgtggattacttggttctcttgttattataacatgaagtcatcaattggtgtgtgtgggacaatatgcagattttttttatgtgctcctcctgcgtgcatcaatctagatgctgaaagtgattacctgctaagttgtgatcataaaggcacaaagatgctgaaaagtaggatcagataggacacactccaagacatcggtctgcactcagatgggtccacagttgcgaaaaacacttccatttgggccaattacaaaattaggggcttagctaatagctattgaagaaaaagacactcaacatgacttggaagcactgatactggacaatgatgcagaagttctcatttccttgtttcttttactggaacaattcacagttgggtcattgctgagcatttgaacagatagagaattggttggttcaagaaatgtgtgcattgtacagcagattttcagtccactggggagaatgttgagcagacaaggcattagagctgtagtagtaccattttgttttcttcttgagagtggtccctttatttgcaccaacctttagttatttccttccaggtttttgtatcctggacattgctctcccttcgcttccttctacagtgtttggaagagtccctagccttcttgatttcttctgtgaaattaaaaataaacatgtggttcatgatcattgatactagcttattgcattgaagagttctcagttgggtggttgttctttctgaacgatcgtacaaaaagaaagataaggacattatgttggattggttcttgatgtcattaccttgtcatatattatgaaaattatttatgtacatttatactgggccactgggttagtaacatctattaaatgtttggcaagagttgtaagaaacaaagtacagttaaaaccagctctggatttacagtgcacatagaatatctctgatccttatctccatcagctaacagggggaaaatggatcgtcttgtttctttcaggttaaataaacacataaataaagaacaagaagctgaatcaatttgccaactccaacggcctgtattacttaatggttgacctgaacaaagtctttggccttctcttgcttgccacccaatctgttcatatgccgacacaatatcgatttacttggaaacttcgtcgtatgaaaatgacacaaagatttctttgacgaaagcagtatcatactatcatggtcggtggcttaaccacatgagaaactaccagacaattgctaattggataagagtgtgagtgtgtgtgtgtgtgtgtgtgtgtgtgtgtgtgtgtgtgtgtgtgtgttaaaatgttaatggccatgaaaacgattgccacctaatgatgtgaaaaaatattcagtgtctggttggaacctgcagattcccacattttataccaccagaacacaatcttcagcagatcatcagtggtaatcagtgactaatttttcttgtggatgggcacatggcatgaggccaatcatcactgggatgttgcatgtatctttcctaaattttgttgagaaacaactaggatatt

SEQ ID NO: 40243 - DNA, 615 bp, Oryza sativa
tgctgcaactttatcactatatttctgtatcaagcacacatgcatagtttcttttacattttagtatacacttctgtactggggttctgcgatacatggggattgcaccccaaagtatgatatgaagaatagcttctcatataaagtgatttggggtaacgcatgttccatatcttcatgtgtatgagtgcaccatttgttgtcatctgggatagcgcctatgtttttatttaattttatagaaatgagaatcaccaagatggcaatgctgcactatgagataaattgctacttttattttacagaacatttatgaattttgttgacatggcataggtttaacttataaatacgttagaaatcattttaatgcactgtatactgggctttgtgtacctttgaaatattttgatctgaatattcttttcagccaaccctattaaatgaatattttcttgtgaaggcttctagtgctaagtagagtgtatccagcatgatttttgtttattgattctgtgcgtacttaaaacccatgaatccacaagcaatatcactcaaatattggtctgttatacatctgtatgcccacctaccgaggttgtgattttactgtct

SEQ ID NO: 40244 - DNA, 501 bp, Oryza sativa
gtgttgtgccaccacttttgagtcttaatttgtttcttcctcttacttgaaattttgtgggaaattacaagaaatgcgacggtgatgagtagcatcggatcaagctgtacaataaccgttacaattgaaatgactgtttagtacaaccgttatgcgttgccctagcttctactcctaaatggcaacattagtattgcctatctatgaaccactcgtacatatacgcctgtaatggttgatttgcatgatattttgctgtctaaatgttaacattagacgtcggggacgtaaattcaattaccaggttaactacatgtaatatttcacactgtagttcgcgctataaacaaacgttggtttgcttattaacagagtagtttatttcaagtttttttttcaaacaatgtatgtgaaccggcaagaaaacatgagattaaaaccacaactgcagttcatagggtccacgtctaactactggagttactcataaattcatatcca

SEQ ID NO: 40245 - DNA, 527 bp, Oryza sativa
ttatgcgctgcccctatggggagatcaggcggaggacaaaattcaggaccaagatcttgatcacaccccccacacaaccttcaataaggctgggagagctcttgtgtcattgatatttgtgtaccataagcgacctatggtatactctctcaatcaaattgatctacatactcgatacgtacaccatgaccaaatagagctgataactctatcatattttatttactctagcaacaaacccaaagcatgcaccatcctcactatttcctatccaatagcaaatgaagatattgcacgcgggttataaacacttgagtgcatggatgcatgcatcaatgcacatttactccaatggacaattcactaatacacttaataaacccacacaaatatgtacatcatttaagaataaccttaaaaaaaactatctgcagatcaatttggaatggagggagtatctaacatcttaatctattggagaatgccataaataacttcggaggaaacgatcacatctattactccct

SEQ ID NO: 40246 - DNA, 523 bp, Oryza sativa
  unsure (1)..(523): unsure at all n locations
cacgcttgatgactgactgnctcctggnacccctctctcggttttggtagcactgtcgctctgaggacactgttggattttgcgtgtgcttgatttcgatttaggatgacacctatcaacaatcctgcttgtcctataccatttttcacttataatttagtactagttgtggaatgatttagtcgatttaggatgacacctatcaacaattctgcttgtcctatgctgtttcagttatattttagtactagctagttgtgcaatgatttaggatgcagtagtgtctcgaggactgaggcccatatttactactaccacttttttcccttgcatagatgtacctggtgctcctgaaatggctggctattactctcgtgatgaagaaaggccagggtatcgtcctgcaagagacactgaggctcttaacgcttcctatgaacgttttctgcgcactggggtatcaaaacctgttcttaacacatactatattcaattccttaaacacattgtcggctgacacttt

SEQ ID NO: 40247 - DNA, 633 bp, Oryza sativa
cctgcagccccggaatccctctttagaacagacatatgcccgagattttgtagtatgagttgctgatttttccaaccatccttttcggacgctgaaccccacagttccagcataggtgacatagcagtcataggccttgtcttcattcaggaaaaccattccaacttttggttctccttcaggtacagcaactacttccatttctggatctggttctccttcaatgatttcatcttctttactctcaccctggaccaaagaaaacaactgtatgtgttaaagcaatgaggaatcgagtataaagaagtggttcattcggaatttttttggggttcattaggaattaataatgtaaagcctaaaggataagccatcgttccctttagctacccaatcaaaaatgtgacggaggacacaaacaattagcttcaatgcagcattgcagagaaaaaacttttcaaataaacatacatcatttcacaagtgggtcttaccttatcttcttttttgagataatgcttttcaagacgtttagagcgcctttccgaaggttgctgcagtggttgccaattcatgaatataagaaaatacaaccagatggcataaatgaaatatctatgtggaaccaatata

SEQ ID NO: 40248 - DNA, 617 bp, Oryza sativa
gcagttcagttgttcggctgccgccacccctgttgccaggctccctacgaaggccacgagcctgttggaacaaatcatgacttgcatatgtctttggtttttgcattagttgcatgtagagaggaacgtgatatgttcatgtatctgtaagtgatgtgtatgtgtgcatcacgtaggttccatgtttgcatgtagaatcagtcagtgctagtgaatggcagctgcgtgtgttgcagcacaactagcaactaaacaggttaggtgaataacaagattagcggcaagttagttaggagcatgcaggattagtggagcacgttgtggcgtggctcgcggtcagcccggaggagcgaatcttggcgtaagatgcgcagatcgttgtatgagtgagtggctcgtagtcgtgcgtgcgacccggccgggctgttagctatgtgcatgtacgggaggctatataagccgtgtaatcatcagttagttttagcagatcagcaatatcagagaagccagcaaagacgtgcgtcgccgacggaatctgttgtgtgtgtgtccacccaatttgctgctcgtgtgtgttctcccgtgagtttgttgcttacgtgagtttgtgattttct

SEQ ID NO: 40249 - DNA, 681 bp, Oryza sativa
tctgctaacttcagagttggggagatatcataggggttcacctggaggggttatcaaattttagcattcggtgaaatcgtcattgtcttctttcgacagtgaggttacaattggcagcgttctggtacacacattgtaatttacaaggtcaccttaaaaggtttcctttcatgtaacgtgttttaggcgagagctaggcagctagcatagtgaggattcatgataggacaagtgcctcacaattttgttggtgagaaatttatcacatatgtttatgtatctcttgtggcctgagtttttggagctcttctcgttgaacttgtgttggcaacttgaaatgttgtcatttaaagctcctcaaagtcgcctttctaaggctgatttcatttttggatgttcccaacttacgttttttgttcgcacggtttccaaactgttaaactgtatttttttctaaactaagttataggaaagttgtttaaaaaattatattaattcattcttaaattgttttaactaatacttaatcagccatgaactaatctgttttgttttctgtgcatgggatcagttcccaatccactccaaagaacacatctctaaattttcatgacatggtaccatactacaaatacatcgcaatggcttgttttgatgtaacagtagaaatttaaatgaatt

SEQ ID NO: 40250 - DNA, 537 bp, Oryza sativa
ccccccccccggcgcgcgaccaccaccactagtactacagtactactatattagctagtagtctactactatagtactataactactacttatactactattactagtactactactagtatactactataaaaaaatatataattttatatgtatattttttatgtataaaaaaatacacacatacaaactttatatatgatgtgtacaaactttgtatacaacgtgtataaactttatatatgatatatacagactttatataacgtgtacaaactttgtatacgtacatattaaaaaaatcaaaaaaactaaaaaaaacatcacgtatattcgtatacacatatacaaactttatgtacacgtatacaaactttgtatacctgtgtataaactttatatatgtgtatacaaactttgtatacgtacatataaaaataaaaaaatacacgtatataaagtttatatacatgcatataaactttatgtacacgtatacaaactttatatacacgtatataaactttataaaacgaa

SEQ ID NO: 40251 - DNA, 612 bp, Oryza sativa
tctagttaagtactccctagatgctctgcagtgcatgaaatcatttcattcacttgtgaccaatggtaggccccggttaaagaggatcatgtagtactgtggaagtgctgttcttatgtaggagtaccaaccatgatgaataataatagtattggctgaaacctagctttgttgcatcagcaaccacctgtgtggtcacaatactgaagcaaccctgaccaagtgtatataaatttatgaagtagagtatatggagtatgtagcgatgtttcgtcttccctctaaggattagggctcctttggaacaaagggaaaattgagggattttagggcttattcggttcgtaggatttccaaatcaaaagaataggaaaaataaaggattagaatgtcgcgtgcactccattacttaggaatttttcgaagaggtctcatctaatgctaaaaatcttatggaattaacttgtaagactacaatccttaggaattcgataagatctattactataaaacgaatgatgcgcataggaaaaaaatcctaaggattcaattcctacaataatcctctaaaccgaatgagccctaagaggattgaaatccattggaaataat

SEQ ID NO: 40252 - DNA, 701 bp, Oryza sativa
tttgcagaaaaatgcaccgtttagtagtttgaaaagcgtgctaacggaaaacgaggagaatctaatcctactagcctgaaaagaacgcagccttgagaggagaaaagaatccaaattgatgctgacggaagatgaacaaatgcaagtaggcaatcatcatcagacactaaaactgaaagatttacctgctccaaacattttttttcctgacatgtaactctgatggagaaagtgaacacacacgcctctccaaattctctcaagcgtagcagagcaaaaaggcccacgaaagccagagaaaattggtatcacggactgaaactccgaacccctggatcagcatgagcaagccacgttatcttctgcgatgcgccattcgacggcgaacttggcaccggcggtgcttaccggcgacagcaagcacggcaaagtaacccaacaggatgtagttaaggatttcaagaactaattaagtgcgtgccaattgaaacttcaaatgctaaaccactgtcaatatttaaacctttttgaaacaataacttaactaggaacatgcagacaactagtttagccataagtcaatctagtaccagactaccctgcagtgtcatgttgagtgtgtcactgtgacgccccagcaaaaaaaaaaaagaatgaaagcaaaaaagaaagggcaaagcagcagcagcagcggcccataa

SEQ ID NO: 40253 - DNA, 1668 bp, Oryza sativa
atcgctaaaaacacttatgcaaaagttttatttataaattattttttgtttgcgaatatgccgtttcggggacggaatcaataaactgccggatgattatatataaagatgataattaaagaaacctcttttggtagcatgttgccgtcacctgtatatagggaaatattcagcgcctgtttggaagagtgtagggttcatatattatttcgttccatatatatatatatatatatatatatatatatatatatatatatatatatatatatatatatatatatatatatatatatatatatatatatatatctcacaattaatcattcttagtacgaggcataggtcttctgcatgtgatagcacgatcgagagcgatcgctaaattaaaccaggaggattagttgacattagcttctaaattcttattgagaatttagtaattgagacgatgagcagtagctagatctcatctgccagaaagaaaaaaaaaaggcaagtacttcacgtggaattaacgggcaagaattcagaaatgaatattggagtagttctagacttctgtttttttaatttcatcatgataaggaatcactcttgtatttatttcagtatacagaagtatccaaggatgtacatttgtacactagttctgacgaacaatctctcaatgtgcacatggacacgtacagatcacgacagcagatcagatcactatgtattttcagtattgtcctacgtattgtctgtttctcttgagaacagttcttcggttcttccatggcgattgtcagtgtgatcttatacagtacatgtgttcagtttatattatgcattcatggatcatactagttcataatttataactttatggatgccaacttggtaataatgtactacatttctttgatctgcaatcgcatttacttgtctgcatcatgtgcgagagcatggtagtgtgtctaatgacgagcttgtgtaatcgctttgctagctactcttgtcattttcctggcagatttcagattctaatctttagtactccctccgtttcatattataagattttctagcattactcacatttatatagatgttaatgaattagacatatatatatatatatatatatatatatatatatatatatatatatatatatatatatatgtctagattcattaacatatatataaatatagaaaatactataaagtcttataatatgaaacggaggaagtactaacctaccagtcactttccagcactgaactgccatgtattaggagcatatataaacacgaattttaaaatttatcaccatatggtgtaatgccaccgtgttatccttatctcgtttgatcaactgtcactgttttcagtgttccagaagctggtcatgaatcatgatcacatgatctgataatttaacttgatcaccatgtgaccttaagctttataagatgatgaatcactggcactaaagagcagtccgtggattggatgaagtccctgaatcccaaaaggcaaattctgaagaagaaactttctcagttgcagtgagaaaacaaatcaagccaaaatttacagccaaatgtgacactttgtgcaccaattcattaatatttcagaggacattcaaagaattcagaaaaggaaatcattcgg

SEQ ID NO: 40254 - DNA, 648 bp, Oryza sativa
atccccgattttgatctatacccattctttacccccatctttctaacttctactcacttgttttatacgcacatccttctcaaaccactaaagggcgtgttttttttaagaatatatagaaaaattactttaaaaattatagtaatctattttcaggttttttaaactaatacttaattaattatgcgccaatgtataatacttaattaattatgcgccaatgtatatttcattttacatgatggagagaaggggttccgaacacaactttaattgtccgacaccaattatttttcttggttgtccaagtactctggctttccattctaaaatataaaatataaagacactattatttttctccatgtcttataatatatggcacgcagtcatgtatatagtactaactagctcatttaaatttgctttgttttaaatcatctaccatcaaacttccaatcacataattatttacatgtttcgaggtgatccaattgatgaggtgattaaatttactttttgtttttgtgttagtggtggttattttttatattttgggataaaaggagtatttgttttttttttgaaaaaaaatacactctagatccaggggcttagcccccgggtacttttgttatagccaaccat

SEQ ID NO: 40255 - DNA, 637 bp, Oryza sativa
tgatattatcgttactagtttaaaaaaacttaggttccatgaatatctcacgtttggccggagctatctagaggtttaggccctgtttctttcagcttgggattattataatctagattattgagtcagattactataagctagattgttataatctgtagtagaataagcggttagttgtttctttcctagattattagagcctagattattgggtttgcaagtctaaagagggagtggggtggtattgtgggtaatttttcacccaataatctggaaaaagctcacctaaatgagcttatcagattataataagctgggttccagattataataagctacttcaataagttgtctgtttcttaatcccaagctgaaagaaacagggccttatatatgttctcttttagaaaagtttgtcatttttagccttttaaagtccatatatataaacgaacttttttttactacataattataatcagcttttgtttaattaacaaatttagctacaccccaaaacctatgttacaatgacactcttttgtaactgtggagagagaatattaactacctccgctctaaaaaaggtaaagtttttatgtattattatcagatgacaatatcttaaatcatt

SEQ ID NO: 40256 - DNA, 733 bp, Oryza sativa
agtttatatacaattctactcatttttcaagttcttacactaaatcgcacgcatctacaccaagttcttgtaccgtgggtgcaatttactccattctctttgtcaccttggtagcctaattttgaattttaaattactaacattcccctttcaaacgcctgattaactgaaaatgaatgaatttctgtatattcaattgttttgaaatacttgaactgtggtaagtaaattgtagagatgcttatagttagaacagatggaataggtttgttgtactctcttcggtccaaaacaatgttagacctttcaaaattaatgaaatgcaactttcaccacctaattctttcacataaattaaaagttattacatcaatcaataaatatataatgttacgaaagcttttataacaaacacctgaccatgttgcggactaagctagttggtttccttatagttgaaattgcacatcggggtttaagtgattccaagagtacgggtgcttaaatttacagataattattctttaacaagactttgttaccctcaatatgtacgtgttggtccaatctaagaaagcgtgaggttaactcatgatatgtcgattaactattaactcgcgaggttctcaacatatgccagccaactcttcatttttttttcgttgtaggttatgataatctcgacatatactggtccaatgatgctaatctcttaaaatgtgctattagaaat

SEQ ID NO: 40257 - DNA, 1010 bp, Oryza sativa
ccaaaagtagaagtaaaaagggtggcgatgcgccgaattgcattgatcgtgaagatagattacatagaccccgggtgtacatatttatacccatgggttgatacaagtccttgtcggacaagaaagaaactaacctaaagaaaaaagaaaaataaaaagtccttatcagacactaaacatactttcctaaagataaaaggaaactaacaaactattcctaattaatagataaactgccatgccgcatcctctttaaactcggtcacttagggataagcttcctttagtagattgatttccttaaccgaatatagcaggaatccgactactgatgacttgacaattcacatcagctaatctcaggacttcgaagccgatgctgactctcagccgatgactactccgggcttaccaaatttcactgttaacagtgcgaggcgtggcggagcgcgccgggaggcggtggcggcagggcacagcggcgacggcagcggggctgcgcggcgacgacgcgcggcgtagagggccgcggtcggcggtgccccgtgcggcgggctgatgccgcacggtctaatgccgtgccggtgcctgccgtcccggttctcctccgtgcgcagccggggccatggcagcgagcctcgacctcgcgcggcccacgggaagcaggcgcgaggccggtccaggacgacggcgaggactccaccgagcgcgcgggcgagctgatgccacgcgcggcgacgacagtgagggtcgtaatgtcggtatgttatttgctaatccgccgggaatttttacggttcttatttggggaatttctcaaattagggttttgaaattttggggaaaatttggggattgttactatccgccgaaattcacctccttctaattgctacccaagccttaaatgattaaacaacataaacatgaactaattggccttgagcagtggtaaataagccttaatcttggcctaattaattattaacagaacactaaacatgaggaaa

SEQ ID NO: 40258 - DNA, 601 bp, Oryza sativa
cttccgtggagcgtggggctcaaggcatggttaaccttccttcccaaccaggtgaggagcccacaattcgacccgaggtgcgtcgagtgggcccatgaggtagacctcccgcgttccaccgttaatgtcgaagagaggtcaaaaaacaaaaagagaatctctctttatatcacctatcaacacatgctagccaaaagaaatgtcatgattttatgcacgtattgtgtatatgaaatgaacagttaaaataagaggttaagaatctaaactcagacgctgtccatatgcgccgattcatcatgggcatcttttcttcttcgcagggcataggctccgactttaagatagatcatcttaatacctgatcgcagccctaatcgtaatgtatgcaaactatttctataagggcgcatctattatacagcagtaatggtataaccccccatttcaaatgctcatgagtcacctcactctcccactccatgcgagcacgcaactcctgacacgtgagcgcttgacacacgccatatgcatccattatgggtcgagccatcttgatatgtctttatcgggctgaacagtctagtcaactttggttgga

SEQ ID NO: 40259 - DNA, 1113 bp, Oryza sativa
cagtcagtctaaaagcaagtttaataatattagagcaagtttaataatattgtcaactaatatctttaaaagttaacacatatcatctacagccaacctaatagtatgttcactcatacaatagttagttgcaggcccggccacaggagaggagggggagggggttgagctatgccaccgcacagggcccacaaagtgaaggggcccaaccccatatatgctgtatataatagcccatagaaattaggaagcctattagcccaggagagaaagagacacacctacgtgaagaaatttccatcattttggcttcctttcgtgctatcgcctattcgcctccgccgcccttctggccacgtcatcttattaaagggcccatttttctaacttcgttctaggccactaaattgacacgacagggccgggttagttgtacatatgtatgatgcatcattttacaaatatgtgatcctgtttaacatgggaaatactaatgtatgttcaggtgtacgcatggatcctaatgcgaatctgacgtctctccacttgagtgctattgcacccgggtgcagaaaaatactttccaccttaatcaaccaggttatatacgcacgatgcgtacaagaatgcagggcactgggaacacactaactagcttgcacttgtgttacttagctagtataattaattaagctcactcgatcgccatggaccaagaaatccaactgaaccagagaccatcgcagcgagagcaacaacaagaagagcatggcgccaccgcggcgatgccgccacaagatgatgaacggcaagatcaccaagcagctgccgccgtgcatggccagggcggcggcggcggcgcgactgccgagcgccaccaccggagcaagctaacgctgctgccgctggtcttcctcatctacttcgaggtggccggcggcccgtacggcgccaagcgggcggtccgcgcggcgggcccgctgttcgcgctgctcggtttcctcgccttccccttcgcgtggggcgtcccggtgtcggtggtaaccgccgagcttgccgccgcgctcccggggaacggcggattcgtcgtttgggccgaccgcgcgttcggcc

SEQ ID NO: 40260 - DNA, 571 bp, Oryza sativa
gctccacccgcgccggtccaaaaccgggagccagagctctcgctcccgcttctctccctccccgaaacgacatgatcaagctcctctttcccccttctttttctctttttccaacctcagccaccgcacctccactgccgtttggccgctagctccgagcacaaccgccagctcgctccccttgatcgccccaatgccggttccttctcctcgacgccccaccccgcgcctataaaacagcagtcgccccgtattcggtgtgtttgaaaataaatgaattatgaaaactcgcgatacgggggttgtgcctgcgtggcgttgtcccgtattcgcatataaggatcgattcctgtgggaaactcatcaagcataacaaagtgcaaccacaaggtggtatgggacaccctagctaagtaactagtcggttcagggaaacctcgcatgccaatagttgggaacgcgggggtggggtcggttggagccaacccgggttcctggtaaggcaagaacgcgaagcttgccagattaccgatcgaggtggttggagtttgatttgtgaaaactaaatggc

SEQ ID NO: 40261 - DNA, 641 bp, Oryza sativa
ccgttggtatctgtgtccaacgtttgaccgttcatcttatttgaaaaattagaaaaagtagtcacgcataaagtaccattcatgttttattatctaataacaataaaaatattaattataaaagattatcaaataaaacaaatagtcaaacatatataaatatgaacaatgtaaaattatatttattttaggacggagggagtgctgtactgtcctagtagatttgatttatacgggacgaatggagtacgtgcagctttgcttgttctgtccaaattacatcgtgaattattacgcaggaggactcgttgattgcgaactcacggcacatccggcggtcgccacagtgccgtacggctgggttggccgaccaccgaaaggtgcgggaaggagagctgtctgcgttctactccggtactcacccgacaaaaaccaaacttagtattaaatgagatattttctgctataatgaatttagatatgagtctatccacatttattttactaagaagaatcttatacaattactagattgatttttcatgggacagataaagtattccttatttattttactaagaagaatcttatacaattactaaaatgatttttcatgggacagataaagtattccttatgtc

SEQ ID NO: 40262 - DNA, 725 bp, Oryza sativa
agttgagtacaactccaccgggtgaattttatcaaatccatggcatctattgcttctatggctgagatgaagccatctattgcttcctatggtttgaatgggaattactttatttttttattatgttagtaatggttaagtttctgcctaccaaattaacaaagtatacatgttctcttctttcccaaacacaagaagctacattcatgtaaaaaaaaaagtgttaaccgcatagtacatgcaaacacacataaaccatatacatgcaaaactagaggcacgtgctcagtacggtgtttacaccatggattaatcaaagaatttctgggttatgcaagtaaaattagcttgtatattctcaaattgtctaaatatattgtagacggtgatttgttattgttacaagattaggataaattctttttttttcaaaagagactagtgggaagtgggaactaatggcttcatcccaaccgtcgataaaaaagagaccgtagagattctatcaaatccaccgatggagttggagtgactccaggggatccagacccattgcacatgcccttatacaatagagggatcatgttcgtagtaatgtacatatcatatcttactataaagttatctcccactaactcgttaagcttaacatgcaaagatgccacatcatatcatccactaacaagatgtcacattatcatccactaatccactaattaacaaga

SEQ ID NO: 40263 - DNA, 790 bp, Oryza sativa
  unsure (1)..(790): unsure at all n locations
cgcgtgtttgattatcataactcaatcngcatgcccgcaagtctactctagaggatccccatgctctatcagttctgccaatcttgtttaattcgtgcattgcaaacgtaacaaagttaaaagattcagttttccccatttgtttatttcaatctgttataggtagggataatcctaatgctaaaattagctcatgataccctctgatatgcaggcatcccttcggcaaatgtggtgatggaccgaccacaagatcctttcaactcacgaggtatcatgacatgtactccaccttccaggtaaacggtgttttgctctggtaaactggatcttaatcgctgtccctatatgcatttgtcttgttccagggattgcagttccccctgcagtcaagatgaggaacatggctggaaacaacagtccatggatagaccctctgccaccaccgatgaatgcgcgcaatgggctggcaaatgccagcctcttctccacctctttgccagtccttcctcatgaaaaaagtatgccactttcactcataagacatgtcatgctctagtctgtgcatgtcatgctggaaatagcttgctggccaaacaactgatgtgctcattggtgcagtagggtggttattttttaatttttggctatagtactgtagttacataagtatgactganggattntaattgtgatgtgtgcaaagcacagttggtaagagggattgacactatggaccgagatacgagggaggctgcaaatggaattagtgtgttcaaatgccaaatat

SEQ ID NO: 40264 - DNA, 748 bp, Oryza sativa
  unsure (1)..(748): unsure at all n locations
cgcgggttgaattcatttctacccccctggaacagatttaaatgaatgggggaattgaatcttttattggtggtactgatagcgtgtgattagatttgaatagttgcaagaactatgggcaagacttggctgttggggaaaaggggtggaggtgaggcnatgcaacgatgtggcaacggatttaaatgaattggggaattgaatcttttattggcggtactgatagcgtgtgattagatttgaatagttgcaatacaaactatggttgccatggtatggtcaatgtggctgggagtggaacagttttgatatcaacttgggggaagaaaagaaaaaaagaaggcatatatttctcttggggtgatgagaattgctataacaactgacaagtgaaagcaacaaacattaccccccatggaaggtatccgtgacacgattgatcaatctacaagtctgcaaatgtaagcatgttaacaaacctggtaatatcccaagacgacgacgaagatgacgactaaccaagtggagaagttaaagtgcttggatgaattagttgaggaaaaataggcaatcaatcaatcaactgcatattgaaccttaataaatggtcacaaaagccccagaagaggaaaacaaccgcaggggtagagaaggaatgagcagtcaaccagcaatagtggaagcgctaagtattgatttctattcactttctcctctagactattggggggtgagagtgatatgtgaa

SEQ ID NO: 40265 - DNA, 1747 bp, Oryza sativa
tggcataacgcttctctcctatcgaacattaacggttagaaggtatggatccacatggaaaaagattactctcccatagtgagcccatgtccaaggcccaaactcatcatgtctaggcctgccatctcgtaagcatcctgatacagcgaaccgaagtaattttcttcataaccaatctatatacatcatatctttatcatatctttctggtttcatataattattaacgtttaaattagaacatgttctttaaaatatatctttgactatatttttatataacatttaccataaagacaaatctatatatgttgtaaactaaatatttttttaagttattgatagttaaagttataaatatttaaccttaaccttatctaaaacgtaaagaatcatataatcagaaggagttgttgtacttcggcactcaacatttaatttatcatgtggcgaattgatcaactaagaaaatggcatgttttgcaaagcaaaaatttatattaaaatattataagagggcattttgtatatgtttggcaactgttttttctcttttataccagcattatatggtcttggacattaaataggaaagaaaataaaatggaaagtcatatttacgacataagctaagaggcaaagaaagaagatgagtctagatatgagatatgggcttgagggtccatgagctctacgctcctgacccctgtcgtacattttgttcgtactaagattgtacgtaaaatatcgtattcatagcatttcctgaaccaaattgctcgtgtaccactgccacatgccgttgctctagacctacacttgcattaacattacattcaataagctgattaatcgaagaagacccatcttaaaagaatgcattattctgccttccacgtccttccttcaagtgtagcaaagctgtaaaccaccgatgtcttggctcaaataacaacactcaatggtttaacagtgagtttttttatggcgtctttttatttcctttggtccaatatgatgggcatttgactacaaagttttggcacgggctgaatgttaccattgccaaaatacaggaaatactccgtacaatatagctatggagcattgtatacaagcaatcacatccaatttttacgctatcaatctgtttaacaaaatttaactgtggtaaccaaaaatccaaaccataccatactggaggccttcatttggaaaggagagaaaatgaagccattaggatcaatggaaatttctggagtcctacatttcctttgtcacggacacaatgctacaaattttcagcatacatccacttacggtcagaatactcaccacaaatcgcatggacatctacaagcggcaacctcatgcgggagccaataaccaagcgtagttcagcatcatatgatatcaagccccagcatcctttcacccttgcaatggagattgggctttgttctcattgaatccatacatcccatacccatagtgatctatgtcagcaatagcaaggctcaaaccgtaataaaactactggtataatgcatcccaacggtatgcaaagcaacttctctgttccgactaccaacaggacaacaggcaagcaaaagtacacaacacaacggtggattttcagcatttcaaaaataattctgaacatagccattttgagaggaaaaaacagagacacaaacttaattggaactaaagactagataatgggaactaatgaagaaacttattc

SEQ ID NO: 40266 - DNA, 810 bp, Oryza sativa
  unsure (1)..(810): unsure at all n locations
cgcgctgcccttttgaaatgctangtttcggcatgccccangncgactctagaggatccccaaatagatgatacgtaatagaagacattgaatgctttacattggaagaggtttcgattgcgagactttaacaatatgagtgtccgttttacatattatcggtgtatttttcttttctcaaaattgaacaaaaatgcacataggtcgagttcctaaataggaggatttttttaaaaactttttacatatatagttatcattataagatgctatttcaaatccattctttttaatcttgtaataatagttaaattattgtttgtatgttccattacattgaactcaaaagaacacacctatctccctagaaagtaggagcaatggagcaccagctatatgaatacaaattaaagatccttttgtgaatacattatctaaaaatacaattaaagatcctccaacttttcctcgagaagaaactctctcgtgtaattttcttattcgagtcaaccagctttcgtgtgctcatgttctcaaaaagcaaccaagaaaaccaaaatttgtccggcacctgtttacccggagctcgagcggatcttgctgctcatgccgacaaatcttgttgcccttgccataatttttcgtggggtttttatcccctgccgaaagcgtcgtcgccacgggcctcttctttggcgtgttccgacgtgccactgttcacagccagaacataccaaacaccttttacctgtacaacacataccnccccccccccccccaattcgttctcccggcgaagtgaacccgtct

SEQ ID NO: 40267 - DNA, 722 bp, Oryza sativa
  unsure (1)..(722): unsure at all n locations
gaccgacgagacgacggggtctgaacgtgctcaccgctttccaagcgtgaaagttttactctggtcacgtgatgacgtgaagccgccagatcctgttgcttttgcttgcctcgggctcctctcggacgtggtcgccgaggagcagggccgactatatcttctgaatttgacccaccagcttgggccgcgaagtctacctatccaaaacatgggccacgcgcgctgcgcgaaaaggggggaaggtgacgggccaatccagcattgccggctggatcgtcctctgcgcgggccggaaaagtggcccacacgaacggtaggtttggttggaacgttgggtgggctgcctgaaatcaccgctccagcttgctttttggcccgcttactcgagttgctaacttgtgttgctattaattcctctttaatcaggtgaacggaaggaacccacatgtttgcacctttgcatcccttagccaatcgctgcaactatatgtaagtaaagctttgaccacatgcatcttgcgtgatgaatccgccgaggagttggagtggggacccatgataaatagtccagctactgcttgcttgcttgccccctaaattatacgggaatcctcagacctctgatccgcgaagttacccactctaatatacaaggcataacactggtaaaacaagtttagacaattntgggtgccgagtgtcttgaggtttccatgacgccg

SEQ ID NO: 40268 - DNA, 918 bp, Oryza sativa
  unsure (1)..(918): unsure at all n locations
agttagtttcttaaatttgtggntattactcgctcccggcgctgcatgatggctttcatattaatgccctacaaagaagcatttgctggatgtagtatagttgttgtaccaatggaaactgactttcactctcccagacccagaaaaaccgcgccctaaagaatattagtaattctccacttgtccactataagaatcttaagtattatgtttattgtgcctacaacctatttttaggctttctttncnggatatagaggatatggtaagcccaaaaagaggtcagttcttgaatggaggaggtaccatatgctagccatccattccacttaatctaatggcctgggaaggcttggtacttggcgctggcggtactgcatctctcgaaaaagcaggtttcgaatgctgttgatggtgggatgacaaatttgtactttcgcattcaggtaccaagtcggagcagaacaccgtcaccattttttcgctgcagtcatctactcatcgcatcctcaaatcgaacaaaaattgtagaggcgaacatggtgacgagcctgacgcaactgatgtggcggtctcccgggcagcattgaccttgggggatgtgggccgatggggaacgctggcgatttcggggtacccccgttgacgctctcgtttcctccctcctcctggttcgatcatgacgacagtttttttcattaatatctaattagacttataaatgactaattagggatggggattcgaggtggggctaacaaccaacgagccccaacaaggattccgcaatggatagtacgtgggagaggggaggcaaggatactaaaaggtggcttctaccgttggttgcgtgagatagcttaacacacatggaaaattgtcttatatttcttttgaatatatagggccaatatggga

SEQ ID NO: 40269 - DNA, 650 bp, Oryza sativa
ggataatgttattttataataatttaagggttctatttttcttaaggtatcttaaaaaaccattcaaaaactttttcttaaggtatgagttttaaatcatttttttctcgagtaaataagaaaccattgctagttaattatcatacagtccatctatatatataccgtatagtatggccacaaatgaaaaatgcgagagcaagatactcaaaattcttgtgattaaatcgtctcaagaaggcgcatgatatagtaagaaagggagggaagtgtatgcatggaaaaaagaaaaaagggaaaaaagaaaaaagggaggggaagcgtacataaccatgtacgtaggtgtatacctatgacacgggacgagaggtgagaccttatagtattttgtttttttaagatcaatttaatctaacggtttataatattggacgtaccgattaagtgaaaaatcaagtaatggatactttgatttttttcccttagaattctaatacgtggcagcttgagagcgttttaagaaattttaaaggacttaacacatgtaataagaatattaaccgcttaatatatatatgtatagggcatatggtaatatttgttctagcttggtgcatgtttatatacatgttgagagaaattaatgatgt

SEQ ID NO: 40270 - DNA, 612 bp, Oryza sativa
cgcataaaaaaatatgtactacttagggtttaggacagctgaaattgatgaattatcttatttatgtgatagctatttgagggtataaacgaataaattgacttataaaaagttaaaatgttgtttaaagagacgccatttagaaacttggaaagcgtgcaaacgaaaatccaactatgaaatcagggaaaaaaagaggatcttaaactcctttataacaccctagtctttgtaagagtgctattgatattcattaatattgtgctcacatttataacataatgaattctttcatctatacgaacaaatagtgcaaaatccaaatacgacataacacaatacgttataattattctgtaatcaactctcggtttcagcttaaacaaagctaagtgttagaaaaaaaacacaacccacagtgcttaattcttctctcgctgcatcacacctttaatttttttttcatgttattgacaaaattaatcatctccatatatgatttgatatgtggcaaaacggtagtgccagacatgatgctttgtcatgcgtgcaaaaggtaaaggtgcagatgtgcattgtgcagcgggcaaaaaaagagaacttcggacgttt

SEQ ID NO: 40271 - DNA, 756 bp, Oryza sativa
agtaagatatgatatgtacattactacgaacatgatccctttattggataaggggcttgtgcatggggtctgggaccccctgaagtcactccaactccatcggtggatttgatagaatctctacggtctcttttttatcgacggttgggatgaagccattagttcccacttcccactagtctcttttgaaaaaaaaagaatttatcctaatcttgtaacaataacaaatcaccgtctacaatatatttagacaatttgagaatatacaagctaattttacttgcataacccagaaattctttgattaatccatggtgtaaacaccgtactgagcacgtgcctctagttttgcatgtatatggtttatgtgtgtttgcatgtactatgcggttaacacttttttttttacatgaatgtagcttcttgtgtttgggaaagaagagaacatgtatactttgttaatttggtaggcagaaacttaaccattactaacataataaaaaaataaagtaattcccattcaaaccataggaagcaatagatggcttcatctcaccataggaagcaatagatgccatggatttgataaaattcacccggtggagttgtactcaactctaggggatctgtaccccaatatatataagcctatgatggagaaaacaaggtggctccatgcacaaaaggtacatttgttagcttgtgactgaactacaattcattttttatttgtttgttgccggtagcaacgtgatg

SEQ ID NO: 40272 - DNA, 542 bp, Oryza sativa
cattaattttgctcaaatatccaattaattcatgtttttttcatcaggtcaagctaattaagtattctctctatatctcaaccatgtcagtatggttccaagtagttgtggtactaaacaaatggacgtgatggcatcagtttatttttttaagctaaaaatcttaaatgtaaattttaaaaacttttttgacactcttccattctaaaatataagcatttctaaagtttcatgtgaaaattaggaaagcaagtggatataaattgtaatggttgtggtgggttgagatgagaaagaagattgattgagatttaacatgttatattctgaaatgagtattaaatgttcctatttgttcccccgcaaaaaaaatattccatttgttatattttaagatggtgtaatatatttggactaattatctacttatacatatctaacctgcactaattgaataaataagtgaccaagatctactagattttatctcgatcctacgccatatagaaaaacatgagtttaattagtttggatgtcaattt

SEQ ID NO: 40273 - DNA, 708 bp, Oryza sativa
tttcattgttgttaaatgataaaacatgattaatattttatgtgtgacttgtctttttaattttttttataatttttttcaaataagacggacggttaaacgttgggcacggaaaccagggtttgtcttttttttgggacggagggagtatgttttagaggacaatgactgaaatatgagcaacagccatcgtagcaaatgcttttaagctaactaggaaagtagcccgcgcacatgcgcgagcacctagattatataatttagtgttgcttgaaattttattatgaatgtttatgtgtaggtgacttttcttaaatattttatcaataatttgttttgaattggttttttctacttacccctccaacattttgattctaaaccaaaattactttgaaaccgtactatcatttgctcatatgaaactatcatttgtactacgcgtgtttcttcttgttttttaatatgtagcacatcttattttgggaatttctaaacttcaagtaacaaattttattatatattatagatatctttatggattttacgatatattactcgatgatattttttattaaaaatatggccagtaggattgtttcatctcattaaagacatacttctactcacttctccttttatttcataagctttattattttctttggaaataaatttaatttgcaataagagcgcaatcatactgat

SEQ ID NO: 40274 - DNA, 583 bp, Oryza sativa
ttctgttaataattaattaggccaagattaaggcttatttaccactgctcaaggccaattagttcatgtttatgttgtttaatcatttaaggcttgggtagcaattagaaggaggtgaatttcggcggatagtaacaatccccaaattttccccaaaatttcaaaaccctaatttgagaaattccccaaataagaaccgtaaaaattcccggcggattagcaaataacataccgacattacgaccctcactgtcgtcgccgcgcgtggcatcagctcgcccgcgcgctcggtggagtcctcgccgtcgtcctggaccggcctcgcgcctgcttcccgtgggccgcgcgaggtcgaggctcgctgccatggccccggctgcgcacggaggagaaccgggacggcaggcaccggcacggcattagaccgtgcggcatcagcccgccgcacggggcaccgccgaccgcggccctctacgccgcgcgtcgtcgccgcgcagccccgcagccgtcaccgctgtgccctgccgccaccgcctcccggcgcgctccgccacgcctcgcactgttaacagtgaaatttggt

SEQ ID NO: 40275 - DNA, 785 bp, Oryza sativa
ttgactttcttatagcattcagtggttgtattgaaaagagcttgcttgagtatttgctgtgataacactgtgaaccaagtcaatattagtaatgccaactgaaattggtagcctttcagtttgataccacatttttctaattggtaatgagcatgaaaatttgctactccctccgtcccaaaatataagaacttttgaactctgacacggtctccgagatgctactttgaccagcaatatctataaaaggaagatgttttaaataaaaagagttacatattatgatagtttgtttaataataaatctagtaacataaatttgacatgattgatctttttttttgctattaatagtcaaagttgaaaatgtttgacttgtcaccatgctaaaaatgcttatattttgggacagagagagtaattccaatgaaatttaacgtcagatatggacattttgtgtatgtggacatccaaacttcatgttaacacaggaaataggatagggtcctttagtacttccttttattgtttggggggggggggggggttgctgaaaccactgtatatgattctccagaattgacttgctacaattcaaacaaaatttggccctgcccaagtttaagccggttcacaatattgacttggactttgtccaaaaatgaaaaagcttgcacaaaatacagttgtgattgttagatgactttgccaggttcatttggccaaatcagtccatgttctccatctatgcatcgctaaggaagatcagcaaagggctgcaggaa

SEQ ID NO: 40276 - DNA, 647 bp, Oryza sativa
gtcgtatgaagaaatgaccacaataaaagttttagatcttgatgagttattcaactttgttgttgatgactttttcaattgaaatcatttagtatttgaaaatgttttttgaagttgtcatatttttaaattcaaattcaaattgttcaaaaaaatgttatattaaaaaatgaccaaactaaaagttgtaaatattgataagttatacaactttgttgttgacattttttccatttgaaatcatttactacccgtaaaattattttgctataatcaacttacaaatataaacatttcatatgaaaaatgaaaaaatagtcatcggtgacgggttttagttaatgcccgatagagattaagtatatagcccgtcactgatgagtcatctatgacgggcctagttgttatctcaaacgggcctcaagttggtgcacgtcacagatgatggtcatttgtgacgggctccaacttgaggcccgtctgagatatctgtgcgaccatatctcaatcgggcacttttcggcccgattgagatgacttccttatgacggcccgctatttctaagcatattagagcccgttacagatagaaggatctgtactagtgatcattggtgggccccacaaaaaccgagccgagccgagtc

SEQ ID NO: 40277 - DNA, 2425 bp, Oryza sativa
  unsure (1)..(2425): unsure at all n locations
atggtgaagattaaaacaagattagaaaatttcaactgctagttggtagacaaggccagtgacttatccaacaaaacagttatgtggcctgtctgtgaaggctggttcaatgattggagacattttactaatcatttgattcatcaaggacaggcaaagnaagtaaagagtttcctacagcatataaatttgtataaaatgcagagagttgtgttggttaagaagatggaataaataaagttaggagatgcagagtgaggcctgcacgaacatggagggaatctcaacattcttaagaactcaatgaagatattacagcgcctcggcgatatcgaggcatgttgccttcttggcttctcttgtgggctgttcattctgccaggctcattgattctgcaaacttgcaaaggatttcatttccatagagtggttttctcatatatttgtgtcattaacatctgaaacaattagaccaatccagtatactttattaacttaacctgtgatagaaacaagattatgaacacagttgaatcaatttggaatacaacaacaatgtaccttggggaaattcaacagaacccttccataggtttattatcagattatctgttaattgtcacttctctgaaggtcaaccagagtaagatctgctgcaagattaccaaatgactgcatagaactcaaataagatcttatattaccataatggcacgttttaggaataaacgagcatgtgcatcatcaaacaaaatggaaagccacaatgcaggtctccatttaaggtgtcaggtttgcgaaacacccgacaaatctgagtctgcttgagatctgatgctgatatccccccagcaggaatatgatctgcatattatccagcaattaaaggctgcacatgactcagatccaccacagtgcacaaatctggtgtatttctgtcatgtcctcaagagggacttcctgcctctccttggtaaacaagaacagctaagatgctggcaatgaaagtgatataaagggaacaagataagatttgtttatggcgccattcttaccctttagctgtatgaaaggagcatgtaagcatctgatgttatgcggccaattgcatggttatgtatttttcaaatgcctaaacaaccaaccagatatcattagtagcacaaacaatgaacataatataagatatcattagcatataaacactaatgtttattttctgacttcacaacattcaacttcatagtctgggaaagccaaattgcttctgagagactgagactagtccctttgggacatcctaagagatattctcttcttagcatttcttttttgggttataaattaagtgcacaaactggccatgataaattatgctgaggaatagctgcattctagtatgagcataattgcttgcatagataaacatacatatgcacttccatatctaccattgtttcagccatgtatttttctaacctccctcaaagtaaagtcatattttcgacattattaagaaaataaagaaggaatatgctgtgaagataaatttcaagaacaattaaagcacagacataaccaaagcattcgaaatcattcatagttgttgttggtttgtatccctgttccttgaagaaaattgtagcaaacagatgaagtaactgaggaaggcatcaagtgacagcatgacaatactaagtgctcacaatccactgaattctaatataccaaatatatttctatgcataaaacaaaaggaagaagacaaaacaagtactagtttttttctgtcactttcagttgacaatgctaacgcaaatctttacaatattcttgacttttattgattagcttacgccaaatgtcaatataataaactaaattcttcaacggtgtatccaagcaagttattgtcaaaaataaataaatatattatggaattacacccatgtgtaattagtaatcgaagctctgttctcatggtcaggtaaactagtcaattagagatgctgctgctactgaacttgcatgtagctgcttccaagatttgcaggcagcatcacaaagatattttctgcaacttggatacataggcatccatcttcatctaagaaagaaacatcaagtcctcatcactttacaccaaacaaaaagcaacagatgcctcccatcccccactaaccactatgaatagtgcaacggaaataggtcaaagtaataagcagatgagactttcaaaagaagatggaacaagtcagaaattctcgcggaaaaataatggtacaaattagaagtcagattatacacaatagctgaaggtcaaaaataaagaaataggcagctatccaataaaaaaaaggcaggtacaaatcaatgtcttcaatctagaacaatgttcaagtcaaacaagactcagggcattttt

SEQ ID NO: 40278 - DNA, 791 bp, Oryza sativa
tttgtgactttaaaatctttcagagctcagtcaaaattgaatttctgaagacaaagtagttgctccggcaacaatgttctcgagtgttcagtgaccgtatttacttcaacagtcatgatttagttttgtttatcagtttggtgaaatatttggtttcctatcactgatgagtgatgagcaatctgacatgataaaacttcatttctatgtgggcatgcctcgtgtatagtatgtattgtttgaacaagtatggtctcatagactcataccaagctatatatactaccgtttggaattgtggagattgttaatttgagggtttttctctagctgcatctaagtgcaatacctgattgatgctttcttcttttgatattctgattgaaaaatgccctgagtcttgtttgacttgaacattgttctagattgaagacattgatttgtacctgccttttttttattggatagctgcctatttctttatttttgaccttcagctattgtgtataatctgacttctaatttgtaccattatttttccgcgagaatttctgacttgttccatcttcttttgaaagtctcatctgcttattactttgacctatttccgttgcactattcatagtggttagtgggggatgggaggcatctgttgctttttgtttggtgtaaagtgatgaggacttgatgtttctttcttagatgaagatggatgcctatgtatccaagttgcagaaaatatctttgtgatgctgcctgcaaatcttggaagcagctacatgcaagttcag

SEQ ID NO: 40279 - DNA, 2425 bp, Oryza sativa
acaaccacacaatctgcgtgctttagacgacgatgaataaatatcccagcgcagagctgctacactctcgtgaaatccgagatgaatatttcacatggccgaagcaaaaagcgggagagagcgagggaggtgggggcggaacaccagacctggcttggggaagtcggggatgacgcggatggtggacgcgatccgcgccacgcgcgcctagaagcctcctccccctgccgccgccgccggcatcaccgccacgccgcgatgcccccgccgctgcttcccgccgagggatccgagccgcacgctcgcactcgcgctccagccgctcgacgcggaggcaaagcagcagcagcgcgtggtcgggaggcggcggagcaacgacgacggcggcggcggcggcgaggtcatctgcttccgctcctccgcttcgcctcgcctttttattggccggagcaaaagcgggtcagcaaccgagattgccacgcggagcaacccgacctcttctcactgacgtgtgggccacgctctcgatggggcccacgtgtcggtgggtgagggtaggttggtgggtggggtgcgagagagagagggcgtggttcatgatgccttcaccaacccgggggggtgtgttggattgggccgacgacacgtgggcccaggtgcgggcccacggcggtgtgggtggggggggtgacatgtggggcccaggtggaggtgacagctggggcggctcgattcttgcgtgtgcgtcttccttccttccttcctgagttggatcatctttcgcgtggttcggttgctcaaaatttcagggtaaaaaaaatgaagaggttcaaaaattttatgggctcaccttcgagctgcatcagtgtcctggctgggttcatttgagagggttgaaaaccttttctcgcacgtaaaactaagcgatgaattaacaaatgattaattaaacattaactaaaaaatttaagaaataaattaatatgttttttatatttataaattttttttataaatatgtacctttaactgtttggaagcgtgcacgtgaaaagtaaggagtagaagttactactttcaaagtgttcaaaagaacacaaatcacatgggaaaaatgtatagtgcaaaccacatatctagtgaaaatatgaaaattattattggatctaaaaatagacgcatgagatttatctacatcatcgagagtaaaaattttacttataaatttagccatgagtaaaagttttactgggaatataaattttactcttagtaacatagacaaattaatcaaatgcgtccatttttagatgtaacaataatgtttaggtttcaactgcatatgttatttgcactgcatattttcccacctagaggagtcctataaatatctagtactagtaaaaggtttcctcaattagtaaaaccagatcaatttatctctaaatgggcgatgttgatgtgcgttacttttgatctagtattttatgctgacatatggtacttacatgacatttcttgtaagtctctctaaggaaaaatggatctatcatttttttttgggtgaaatcatgcatcatcctagatttcttaatggcaactttctttctttcctcttgtgccaagctccaaattaactcaaatacatcccacctatacaaaattactttcaaaaacactaaaaactaattgcaaagtgcatcttcccttttgggccagcccaacccatctaactgtaagccacacctagtgctagcccagcccacccgatccagccggcccatctgccctagccacaaggcgtcgcgcgccgccacgtcgtcgatcggatcggtgaccccgcggcggcgacacgtcgtgcagcaaccaaattaagactttcggataagggaaggacggaggtcctaccaaattttcttccttaaatcacataaaaacttttcacctgccacatcaaatatttaatagtattaaatatagaaaaaaactaattacacggatacgaatcttttaagtctaattgcgtcatgatttgacaatgtggtgcaactataaatatttgctaatgatagattaattaggcttaataaattcgccttgcagattacagcgcaatctattagactatatgtttaatactttaaacgtgaatcggtatatatccgatttgacatgtcataacttttcacacttctcagtgtatgtatacgtttaatacggcatggagatcgcttaaaaaaaaaggtgatcttcaccaatcccagtgtaaactacgaaatttcttactggtggaaagcaaaccctaaatccaaactagtctcgccgatgagtccgccgccgccgcggcgatcgagagcccggccgaggagaccgccggacacgatccacagctggataattctcgaccggtgcgcccactgcagcg

SEQ ID NO: 40280 - DNA, 699 bp, Oryza sativa
  unsure (1)..(699): unsure at all n locations
aacaagggagtagtacatggaatgtttgtgttgaataaggaggtgtttgggtgagagggactaaataagtccctccctaggcactactgcaaggaagttggaactagtaactatatccacagctgtatatggaaaggctttggtctctgcagaggaccaaaatctgtacaaggattgtgtgggtgggggttcagtttagtctctctccctctctcttttttggttttcagtttttgaacaggagttttaagccctgtttggcaaatgctctctgtttaactgctatgcaagccattttcatgcctgttgtgcagcttcaggttttcactgttttattgttcaggatttatgtagacaacctcctgagaaagtgtaaaatgttgtcacttaaccttgtaccctgttcttagagctaatatatcctagtatattttttttattttctaaaaatagtaaattcacagaactacaaatactttaagtaaactatcccaagactagatattttatatgttttattataaaaaaatatataaatttagcattgaatttatcataaaactacatattttaacttttgtgaaaaatatatttattattaaatttatcacaaaactactgattaatcattgacttcatcacaaagctacatatttacaagttccatcatgantaaaatactaggatggaacctcttac

SEQ ID NO: 40281 - DNA, 1042 bp, Oryza sativa
tatcaagtcaagattgtcatgaaaagaaaaatcctcagtatggcaaattgaaaaggatgcttctcttcttcacaggtccattgtatcctttagagtagatcgtttcaaacaactttttctcaaatggcaataccaagctagcaccaacatggccttgcatgacacacctccagtgttcatggaagtctgggcaaattatcatggggtgtacaatatctcagcaccctaaagaaccataaaccttgcataccggaaacaattgatcccaataaatacaaaaaggacataacatgttgtgacagcccagggcccgaaaacggcattggtcgcaaaaattccggaatcggagtttacagtcaccggtaatatctcctatttaagctagtgtagatagagctagctagccgaggtggtactaagctggctacaagctgccgctactgctcgcttgcttgctgcacgcgtgcatgcatgggccaaggcccatggcctgctgctgctgggctggctgctagctagctttttcttttttttttctttttagggtgttacacatgtgcagttaaattagtaacatcaccaagctcttataaattagtgattccctgctgatatcataagcagaccaaaccagatcatgaggcgcttaatgaaatacctgtgtgtcaccgattttcccaaatcctagtatctctatagaaaatttagcatatactgtaatatcattacatacctccctatggaaaatagaagcatatgtatactataatgtcagtacatacctctatggaaaattacagcatatactgctgtataaaattcagtatatacccctataggaaataaagcagcatataccatctctaaggaaaaatgcaacgtatacacagaaaattgtaatttactttccttcaacttcaaagagagaatgtataaacgtgaaagaggatgggctacaataccagagtgtactgcagcaaggcgcagcgttggcgacgcatcgacgtcaacttatgaaagggcgaccgagaccggcaacaag

SEQ ID NO: 40282 - DNA, 2244 bp, Oryza sativa
  unsure (1)..(2244): unsure at all n locations
atgatgaagatgcagtccttggcaagttacacctcaccaacgataccctgaatttcaataaaatggagaacacaaatggatcaaatagcttgttctaatatgcaagatggaacacataaatattttgtcaaatatcgattgttttaaaactgtagtaggaaaattcattaggacaaattttatatgtctgccactgttcatgcttatgctctaccaactgccatttcgtcgcctccaatgcttacaggctcatggaaatcgaactatgacaatttgaaggatgtaaaaaaaaaaagagaaagaaagaagaattagaatatggctagagtttctccaggctctagtagtagcattatatcagaattcagattcttcatacatgtattttttttcctaagaaaacaacaaactgaaaactatgatgttgtctcatatattctttaaaattaatttatttatttttgtgcatgggtgttggatttgcctccaattttagtaagatcaaactaacaaaaagttcagttatgcctgagaaaggaaaatactaattttagtacgatcaaacgaacaaaaaaagtcagttatgcctgagaagggaaaatactctcgtttaacatagacatcatcagatcagaacaggttatcccccagatctcagtaccttcagtttgttcttagcgcatcatcagatcagcacntacactgtgccaaaaaaatttgagctaatcccagttttctttgaacaaggttaatccctcagatctcagtacctcagttttgttcttagctcatcatcagatcagcacntacactatgccaaaaaaaaaattgagctaatcccagttttctttgctaactttatctgacaaataaaatgatctaaactcatatcacagtaataaaaagacccaacttaatatcaaactttaaatcctaaaggttttaaacctacgacattccaaattttttatcaaggttttgctaccttaataaattttactgattgaacactgaatgtctagatcgtacttcctttcgatgcatagttgaagccaatactactcaatgcaccggtagaaagtgtacattatagttaaaatgccagctcatgatagtgtataaagagatggggatttcggtgcattcacgtttgggagggaaggaaccgggatataaatttgcaatttgcagtgaataaacatgcattaattattggccccggcattaccatcaatctatccagtctgcaaggtgctctaccattgttagactctcgtagtctcgttcccgctgtcctgcacacacgcaaataacaaagaaaaaaaatcagagaatggggattagactcaaggaatggagatcagaaaggaaggaggcggcggtcaatggcggatggcgtgggcggagaaggctgcgaagacggcggcgcggtggaaaaaaaggggacggcggtcaatggcggatgaagaagcgtggttgtcgtcgacggagtgtgaggcggagtcgggcgaagacgaacatggcaagggagtcgcgtatgagatcggggcggcggccagtggcggatcggagaccgcgggatccagaggatctcaccgtggatgtttgcggtgcgacgaatggagggcacgacgaggaggcgagatggatggcgacctgacggtgatgaatcgacgtatgccggtggcctcagcggcagagcggtggctgaacggcgagacgacgatggactaaaatgggggggcggggaggacgctgtgtcggcgacacggtgggggaggacggcgatgggcgacgcggtggaggaggtcggcgatggcggcactggggttgacggcgtggtgggggagcgacggcgatggcggcgctggggtcggcggcgtggtgggggagcgacgcggtgggggagcgacggcaatggcggcgctgtatcggcgacgcggtgggggaggacggggatgggcgacggcggtggatgcgatggatgcggccgcggcggtggatgcgatggatgcgggcgctaccccccgatgcgtgaggatgagccgaggagttgggtggggaacgttgcgccgttggatttagcgatccgatggctcgtactccgcgtatctgccagggttggagtcaccgcccccgatacgaaattttaaaatagtagagatatagtaatatttttgacccaaaacaaaaaatattaaaatatatttaatgttacatttaatgaaaccagtttagcgtaat

SEQ ID NO: 40283 - DNA, 992 bp, Oryza sativa
tgtgtcacggtcaagcaaagaagcacaggcttcaggaagcttcgcccatcttcctgtcactcccgtacttgccatatgtgatcagtgatcggttggttaagcagacaaataggctacttaggccgagtttagttccaaactttttcttcaaacttttaactttttcatcacatcagaacttttctacacacataaacttccaacttttccatcacatcgttccaatttcaaccaaacttctaaatttcgagtgaactaaacacacccttacatgatgtatgttaatatgcatatgtaacagtgtagcaagtcttcttttaagcatttttattaagtacttcctctgtcgtatattaagattatttttagctcatcccatttatctcaaaataaattgatttttagtaataattatatcaaagtttataatagtaaagaataattgcattggaagtagataaagtgataaatagttatattaggatgagataaagtagggtattttagtcttttgatgtttgtattggtatgtgtaggatgagtgaacaatgaactttttttggaacatctgtattactaatatgcatttgtactaatttttttaccaggtatgcatatatacaaattactccctttattttaaaatgtattgagatatatataaatataattaccttttcaaacaatcttttcaatactatactttaactactactgttttctttcgtttattatcaatacctacaaaatcaacgccatataaaaatagtcaaataaaaatctaacaatactactttattatataatgatataaaaatcaaataaaaagtcataacattaatcaaatatccaatcataccaggtatgcatatgtacaaattactccctttattttaaaatgtattgagatatatataaatataattaccttttcaaacaatcttttcaatattatactttaactactactattttctttcgtttattatcaa

SEQ ID NO: 40284 - DNA, 639 bp, Oryza sativa
caacgatgccggtggatgctggtggtgggggtggtgctcggcggtggaggcagtgggggtgtctacctcgggcggcgggggtggtggggcaccctggcggctgggacggcgtcggcgcttggtgacagcgcgcggcagcggggtggtggcgtcgctggtggctggtggcgctctgcgctcaccctggaggagggatcgatcgattcgatccagagagagatttctctctttgaatctgacaggtgggcccaagtaggggtgaaaacggtcaaggaaattcccgatcgaccgggcgccattttcgtttaaggggtaccgtttccgaccgtacctttttggctatttttaaattttggtttttctaatttctttctccatcgtattaatgtcgataccgagtagtttaaatgataaatatggtcaattaccggccgatcgagcatcgtttccaaagagatgctaccgattctgaccgtttccgatagttttcacccctaggcccaagggcaaaaatgtccataaagatatacatatggaattaagaaataagtgatacatgaaaaacagagaaagtggtaccaaataaactaattagcagtcctaatgatatattatagagggcatgcgaattaagtggta

SEQ ID NO: 40285 - DNA, 2488 bp, Oryza sativa
caaatattcaacaaaccttgttaagatggcagttgagcttcactcacaatctgtggattatggtgctccattttgtacatgttcttttcgtatttttattgggatcacaaagcgaactcaatgcaatttaagaacgagtgaaagtgcgaaactgacaagctgggagctcgaaagtccattctgggttctggcgatagtgttgggcttgggtaggaactcatcatgggccatctataactattcgggcccaatatgtatgggctggacatgaactataatactgttttggcccaatatatatgggccgtatgtgagccacattaccattccagacggcgcagccgcgttcaggcccatagatttgggctcagcacgcaggacctggccttcttgggcttcttgcgggaagttcaaatttttgcaccacattggcgcgggcgccactacacgtgaaagctacttgaattgggacgtccacgcacgatccgacggccatcattgcatggcgtcttcagccgatggcaagacacgctcaggctggtctcagatatactagatactagtactagattagcagctactagtagctaatttttgttaaaagaaaaaaagggggaaaaaagaggcaaaacgtggtaacatggattgagcagtaaatttgcaagaccatgaagcacccatttccattaccagaaatgagaagtttacaagttcttaaccctccaaaacaagagccaagaacatccacagttcacactgccagcacttgaagaccttacaaactaaaacgagctactaacctccactacatgtgtgaagcaaaccagggccaaataataggagctagcaactcaagccatcatcaacaaaacccaccacccaactgacaacagcaagcacgcagaaaaaacacactcagattctggagacgctgagccacgaaaatataaagcctgaggaaataaagtgtaatacttcctccgtttcacaatgtaagtcattctagtatttcccacattcatattgatgttaatgaatctagacatatataccgtttcacaatgtaagtaattctagcatttcccacatttatattgatgttaatgaatctagacatatatatgattcgacagcaaattaagtcttaacatcaataacagctatatgagggagtagtttattataaacttgcaggtaggtttgaggaaataaagtggaatagtttattactactatatgatttgacagcaaattaagtcttaacatcaataacagcttactccaaaatgacatacaccctccgtcccaaaataaaccaactaaaataaatcaactaattaaaacatagctaggatttgaatctttttgggacggagaaggtacataccaataaagtggaaataaagtgggtatatatcaacctgcatccaaacgctcatacttcatacaaacagcccttcattggcagggcatcctattaggtaaataataacatcgtataagaatcaggttgcatattttgaagaacctgatgaattgctacaagcctacagcagttttaaacttcaaatgactacaaaatacatctactggatctagttggtatgtatgttgtgctctgactgtttcgtgcccacaatagcacaaaatggtacgctaatgtatacccttaagttctttaaggatcattgtacaaatttcttccgtgttgattgatatgaagagaaaaaaaggaatgtatccaaggagagctggccaactccggcccggctaaaaaaaaaaaaagagctggccaactcataggagaagtgagagctcatttctcctgtatcacaactcagtctcaagcgtatgtaataactgttagtataatccttgttctagttagttatttggtttccttagacagtaagctataggctgcagctgttactcggttgtcagactgctgctattagtggtagtagtcaatttttattttacctctagcaggaacatagcagcagcagtattgtcggttcagcaaccgacctatccatgtactataaatatagctattgtgctaacataagtaagctttttcagctcattttcagtttcagtttcagctagactattgagtgtagttcagaagtgatcctaccaacaattggtatcagagctcaggttaaagaagtgtgagagagatggagggagtaccagctgctggagccaatgcttccaggtcgccacaacaccgcggccgccatcactcgttatcgccaacaccacggcgaggacgaggtcgaggcgctgctgttcgagaggttgttgtgcaacggactgtcagggaggttggcggcgctgctgctttccccaccctcacgcgaaccaactacacccagtggtcgctgctgatgaaggtgatgctgcaagcccgtggcctttggcaccccctcgagcatggtgaatgcgatgagcaagaagacaggatggcaatggaggccat

SEQ ID NO: 40286 - DNA, 746 bp, Oryza sativa
  unsure (1)..(746): unsure at all n locations
gggcgtatatatgacgtgcaaagaatagtttagacccaatgaaactgtagagtattattgtttatgcctgcagttgcttcaaagagaacaaattcaatctatctctgttgcttgtgtttcttttgaagccacccttataatttttagcacttaatgaagccaactcttctattgggtatttcaaggaagatatggggtcttgctttcagaatagaaattgtttctggtggttgtgcctgtgcatcctttgttgctgcttaggaaaaataagtctgcatggctcataccatcacttggaatatttttgtttcatatcatctgaatttcaattaataaagtctgtatccggttctatttcactattggtggtttctaaccgtcaataatacttgaaatcaagtttgtagtctgcatctggttctacattctttggtggcctcaaattgttatcacatatgcagattcactattgagtatgtgataattaattatttgtaatgacatttctgttatatcttatatactcccttctttgtaattaacagtaatggaattattgttagttcaatttgaaccaaccaacatgtcatataataaaaacaaatagagcgtgaaaatagcatttttcgaggttatgtgactaaatcccttgaacaaagaactttaaaatagaaagggagaaaagaactaattcggggaccgagctcgaattcgccctatagtaggcgatcctatcnngacgcacg

SEQ ID NO: 40287 - DNA, 713 bp, Oryza sativa
cggctctggtaagaaagagtgtttgaggctctcttcctgatggaatgggcgaaggcgtgcgtaaaccccctgtcgccacctaccccaggatctgatcggtctgtgactggtcacagcccggataaccaggcgcgttgcatggcgttacatgcggcgtgacgcgctcgtccaaaccgcaataaatgtggttaggtgagccctgctatgctcacctaccccgtatacgcggcgcaaaacccacaaggggtcggggcgcctcggccctcgaggccgagacgggagcggtccgacccctcggggagacaaagagaagggcggccgtatcaccctcgggcccgacccccccccccgagggggttaggccacgtgggtgatcgtgtctgcctcaagtctctaagtcatgatactcccggtcccatgtcaccgacagtagcccccggcgttatgccagggcgatcgccctcctcgagggaagcggtcgggcgtgacgccacttcctaaggcctggtgacaggtggggccggtctaaaaatcgggacaagccggttcgtttttcctggagatatggtgatggcgcttcggtcggcgagcgtaattaacgcgcgcccgagatgttccatctcgactgccacagccgcatatccacctcatgcaccgcaaacgggcgaatgggattagtggaagcgtgggcgcgagaaacgagggggcaagat

SEQ ID NO: 40288 - DNA, 1813 bp, Oryza sativa
ggagcaaatctcgtactagaatgatccacccatatattgatctccatcttcgtcgtctctctctctctctcggcagctttatgtgctgtttaaaagatgcactgtgcatctcttgctagcttctattagtagttattcaagacctgcaactgatgaggttgatcatgagatgattcatcagtagcgaccccacccggaagaaaaggaggggtatttttcataaaataccttcctattatccttgagcaagatcaatgtatgtgtgattaccaattacatatgaaatgtaatttgatccttgagcaagatgtggttattgaagtctactaacttgagaaatgatagtaaagaatttggtaaaaagtgggttatccataataggacagctctcgatacctcccaagcctaccatggcaaaagcaagcagttggagtgatcaatctccatcatttcttcttcagcctctgctccttgatcttgtctttatattcatagagcaagcaggacatggtcatatctgaaaattgagtgtttttttttcagttcagagagtttaatgcttaataacctactagtattactctcttacctaggcacccactaagagattattacattggagcctcatctccagccattcgatcacgatcaataggaccataagaaaggattagaggatggtggaaatactgcctctgctttctattagaaatgatagggatcaaaggacaacgctgtgaaagatgatatggatatgggccgcgtcaaatacgtgcatattgcgacattgaattgatcagatttgctcaaaatgcagaaacttgtatgtatgctaaacttgcatcaactggtttctaattgctagaaaagcatcagcagtagagaggcagaatggtatggcaacagctcaccaccggtttatctcacagctcctgacgcctcccaggcctatgatattagtaactgcagcaagccagtttcttggttgctgaactccatgagctccacttgttcatctctctgaacatcagtgaagaaaaacaagtttgctgctacttcatttcatctgcccttctatggatcaaaaaagaagacagcatagtatcatacacgaatttattgtctgataaacattcagtaatttaagagtagttagggattttgtctcatcttattattggttgtgtgccttatggcagaggcgggtggagtgattggtctcccatactacttctctctctctctcatttcttacttgttggtgtctcaattgagagccccattggttgccctaataagctaaagcaaaagttaaattttaaattttcaaacttaattttgaagttgatttaaaatattttcaacgtgattctttttaagcgttggcttttaaatcgctaagaacacatacataaaagttttacttataaattaatttttattctctaataagccaaatccaatgggagcctgattatttaatcgtctgatctgatgccatcatttcaaagcagaacttagctcgggaaaaactgacgacatgtaattaatgttattgctttaatttcatgggagtggattatataacactgtgatagatcaatgtccccatacatatatattggtagtgatcaatgatattatgacaaaccaatgaatcattgaattgttcttcctctcctgctttgaatagcgaatgttcaacaatgtcacttcacaaaacatagaaaattaattttatgatccttaagaaggtatcggaaggtaccacactttctaatatataaaatttaatacttcttagtatctcaca

SEQ ID NO: 40289 - DNA, 1080 bp, Oryza sativa
tggttgggcgaggaggatggtgatgtcgtccccctccatccctcccctataaaaatgttgcggcgctggaatctagtgtagcgcttcagtcttatggtgttgctagattgggttccgggtttcgacgcctgtgggaggctgcgatgatgaggaggtgcgtcgtggtggcccaacagaaattataaaaattgtagatacactcatagcatgacacatcaatgatagtaaaaatgtagtaaaagaaaagttagtacatatagccttttccctttcattttttgttaacacgtttcacacacggttaaacagtgtgttaaacaaaaaaaaaagccaagcctctctggtgagagttgacgagtttctgcctcatgcagctagggccgaagaccggggaatctgaggtcaaaacttttcatatagaagtttcttaaaaaaacaaataaacctattttttaacattgtaataattattacttaattaatcatgcgctaatggttcatttcgttttgggtgttgctaaaaatcccaccacgtactacttccctctcgagcatgaatgtattgccgtttgtatgtcatcgtcctatgggctgtcatcttatctgaattcctaatggcttgttttgaaacgcgaagttgtaaaagcatatgaatagaaaaaaaaaacaagaatatcgtataatagcatgtataaaacaaaggatttgagaaaatatagaaatttcgtaggaatggatgttgtgatgaaccatgaaaaaacacaggaaacgacagtacgtgcaaagttaattagagagttagccatgctcttatccctaaagaacagtataaacaaagggaaggtccgatgatgatatgatgcttaagccttgcattagtggcatcagagcgcgatttgccttgatcctacacgatgggaacaaaaacaaggtcatactggatgttttttcccactattttcctgcgaaattagcaccatagaaaagatttctccatttttcctatgttccgaatggatgaatatggtaaccatttcccataggaattggaatcttccgtttttccttcaaggatccttc

SEQ ID NO: 40290 - DNA, 2366 bp, Oryza sativa
atcaggagctgtgtttgaaatggacctaacagggagatgaattttgcatgagatgggtctagatggaaagaatgcggcaaccaaacacacccattcctgcacacaacatagcatctgagccaggctcatgcagacatcgatccaaacaggctctactgcgaggagagtgtccagtgacatgaaatttcctcatgtctctcaggcctacccacaaaattgtaacaagcttgcactggagtgatcaatctctttcttagaagcttgttgtgctccttggtcttattttctagagtgattttatagtccttgagaaggtactatattttctaatgtaaaatttaggaaaaatttcacaattcttgagagataccgagaggtactaaatttggtacctcctagtaccaaaggtaccaagagatactaaattttacactagaaaatatagtagcctccagtaccgactcaaaaactgtaaaatcactcaaagtttagtacctttcggtactccaggtactaggaggtaacagtttgcactaaaaactttgttaccacttggtatctctcaagaactgtaaaatttctttattttctatgtgtggagcaaatagaggatattaccctatatatgaaaattcactatatgctaactatgttttcacatttaatgtaccatatctatatatttataccagtgcaatctttttttattagctagtagtatacctcatatagatcgatggtgttggtacttgtgatattctattaccaggagagacaagtgtaaaagtaattaacgagtctagaagacatcaatgagggtgagacgacacaataatttcattaattgtctcacatacattcaagcggttcagattgagttctcatccatgtaacttgccgtccggaggaggacgggaagaagagatcaaattaacaacgtgatcgctcttagcgttcaaaataagagattgtttaggcagcaaattaaatcgtcgttagctctcaaggtgtcacagcataaaaattttcagtggaagaggcaaaattttcagcacaatgtgcacctgacagtacactactgtaatgccattcagatcatcgtttcaggtcaggttgatcaatttggcataaaccacaggcttaacatgtacatcaccataaacagtaatggaagtttacggatttgttatcagcagcattccttgaaagttaagaaactgtcatctctgctgtacatggcattcaggtgatcacatccactcaatgaagagtttgatatcaaacgttcaaaccgcccatgagattcagaaattggttccaagaatcaaaccaagagttgcattgcaaggatatctgctgatgcaccaggcagaatgaatataaattactgtatctaaaaacagtgtccagtgaagtccggatgtctgaaacttgcattggaggaagtatggtcagcaaccagcttaccagttgcatatgtttcagctcttggtgcctcccaggcctaccatatcgtagcaaagctatggactgtctaaaatctccatggttcttcttgtttatctcaattaacatcaagctagaaaaacaagattggctacctttcatgcttcttttatatatggagcaaaaaaagatagcatggcatcatatagtatcatgcatgattttaatagctttcgcgaaaaaaatacacgattttaatggaagtgcatctacattattgactgagcaatcaacaaaaatggtggtttatgatctttaacgatccatctcaaaatcattcacccagtcatacaactctacacaatcaagtaaccggatggagtcatgaacttaattcttcatcaattgcatttgtggcgtcaacgagaaactgacacaattccattgccttgtcacacttgcaggacccaccacatggccctcacaagaatgattacaatgccaccaaagacatcatgatgcaatagttcgcaaaacttcatggtcttagcggaaggtgaaaaatgtctgaatctgctataattgtttggacgatgagagttatgctgagatgcagttattctgaacttgtgaacatatttccacagacaaaatggcaaacaaagtgggtcaatcatgttttacaattccgcatagcatatttcaactacagtccaattcatgaagtgtacgaatagggaacttagtttttttttaaacgaaaagcggcaaaagacttaccgaatatattagaaggaataaaagtcacagtacagacagggaaacaaagaaagcaactagcacgttaaaagagtcatgctatgaattcagaaggtcgaacattgactcttaaaactctttgggccatcagataggccttt

SEQ ID NO: 40291 - DNA, 7251 bp, Oryza sativa
aattcctgcagcccagaactgaggaagaatgaagatgtgaatggaatgttatgcagacacatgtgaatggcatcttaaaagttgctgctgagtttttagcactaagttgtatggtcgaagaccttagactgttgggctgttgtcggtcggcaaacagttgttttctgttttcttttctcctctgttggttgtgagcacctgggggagttctcctccctgcaggtagtaagactttttttttttgtagtagtagtgccacatttctttaatagaaatggagggtagatgcaactcttgatttgatgctatagcaaccagtttctgcattttgcatggcttcttcagggtagccactagccagagattgcagttgtgagtagatatgatgatccgctggacgcgggatggcggtgatcgaacttcaagtgccaattccattgacgtgaaaatgtgatgcaatagctttcatcatatttgataaacttgttcagacccccaaggtcctaataaataacaaaattaacgaagttaagctacatttgagattaattacatctagatcatcttctcgttataggcttacagcatacaaagagatgagatagtgcatgtgcataaacagcacaaacatatgctgctgagaaaaagaggatgatctaatattaaccatatggtagttaggcatgggaggcattgggagatctctcctgtcaatgggtcacttgctgctgtgtttcttttgcagagcgtattcagaattttcaccacatacaatgaaccaaatgtttcagatgcaccagggagtactcagattacattctgcatgtaactagtctcaatgtatgtgatctatctttctctcattgtcacctcgtgcaagttcttaacctaaccattttgtacttctggattttcatctagttttctcctagaaacattgatacaaatttgttgatgcatcagtctggcctgctatgtccatcgactagaagcccatcgaggaacaaaacacgcgaatgtctaaacatcatgaatattggactgtagttggaatatgcacttagctgaacttctgaaaagacataattattcaatccatctgttcgtttattttttcgaaatgtccttacaagttcagagtagactgtaggagcatgcttctgttcatccaaataattgtcaatttcacgtaaaaagaaaattactaatttcatgcattgtttgcctttctccatgacagccaaaccaaacatctttaattttttttgagaagatccaaatgtcttggtttagagcttttatttcttaattgagaaactttatagtctttaagagttaccgagagggaaagatttttggtgcaaaaattttgtactcataaatcctagtacgtgagatacaaaaaggtattaaattttaaagtaaaaagtgtggtacctcccggtagccttcttaagaaccataaaattaattttcttagtttggtgaagtggcattggtgaacattcattatactattgaaagcaggagatgaaggagaacaattcaatgattcattggtctgtcataatctcatcgatcactaccactttatatatatggagatattgatctatcacaatgttagatagtccactctcaagaaagaattagcattaattacacgtctctagtttttccagagctaagttctgcatttaaatgatggcattagatcatatgatatatagatcaatggacacaaatgctagagagagagagagagagagagagagagagagagagagagagagagagagagagagaggaacattgttcatggaactagaaactaaattttcatgttcgttggcctaggaggtatcaggagttcacatgtcaccttgatacactgccgaacaactgaatgtagcaaacccatataggtggtggctgagatttttactcctcttctgaatccttgccctactattttctccatctcatttaaaaatagtacaaggaagggaataattatccaaagaatcaaggatatgagagggtaaagttgcaaattacactatttgaaggtggcttgttggtggtgaggatgggcagcttggggcggcagctggccggctacgttagtcattgggggtaatgtcgtcgctggcaatgtgtggtgcacatctctctttgttgtttgctaatccactacacggtaaatattgtacagccagacagaattcgactatctctagatgagaaatatgttgtaaatatactttataaaatacttagtcacacccaagaagaatttcctggagatgccactgatttaattcggtggtgtacatgtgatacagttcttttggatgcaggtcgtctgcagtactgcactgcaggggatctcagttgagttctttttgctcgtggtgtgttcgaaattcagctgataatcgtgcttatctgtatggatcggtgtgccatcttacacaatcttgtccatattagagaaaaaaaacagacacagagacttcccatcaatccatcatcctttgatctcttgttaaatgcagagggcaaacattgttataatctgatctcgtcttctgaaatttcggacccccctgcactaatcgatttcgcccgaaaacttcagttttttttttaacttttttagatttggttggcgacgatttgaatcaccagggagcaatagtgaaaatttaatttagaactttttaaagttgattttgcccttttttttcagcttgggttttgaactgctaagaatagtcttagcagtataaaagtcttactagaaaattatttattttcattttttggctttatttttcttggtttataagccagtagctcaaatgctcaatcaatgagacagcttggatcgatgatagcgttccaattctcaggtgagttaaaggatatttcgacttttttaaaagacatatttcgacttcaaagaggggtttcctacgcaaaacaccacttcctgacattattggtgtttatctgataaattagtagtcacaaaataaatttggcaccaattagaactgtcacctcgttaatttggtctcagtttttttttctgtttgcatcagtactgcctagctaatacagagtaataatactagtggtttattatgcattgagctcagctgtactgaacaaaacaatcaattttcagatacggccatgtcctgactcctgtttgctctacatataaaggagtacatgtagatggagattgttcattccaatggctagttggttatcgatatgggagctagctagtaggcttgggagacaccaggagctgctctattacagcgaatttgctgaattctgcatttgatggtaggagctcttgatcatttgatgctagcaaacctgctgctgcatcttgctggcttcttcaggccgcacagctggaagaagacgacgtcaactggacagatgaatccggtgcactgataccatgttaactctagtgaataatagaaatagggaatagatttgttgtgtatatattgagttagcgccaatgacatatattgagtacaatagagatgagaaatacctctaatacccccgacacatctctactccctccatcctatattgatcatctcgtaagatttttgaggtcttcccaaattcatgatcatctaactgtgcctattcgtttatttgtgcaaaattaaatagcattgtagcatgtctggttgtttatatgagcaggagtcaatgtcatcgctgcatgtcaattcatttatctgtacaggagtaaatagcatcgttacatgctcaccttaatcgataagatttaatttaaggaaggatgttttcttgccttggtcttgatgcccatttataaatgagatttgctccagtccagcaaaaagtacctcgagataccggtatctcacggtatcaaatcgtttccgatcgttggatcaagctggacattgttagatctaacgatcgaaaatgatttggtaccgtgaggtattgataccttgagatactttttgttagactggagtaaatctctttataaagacgatgatcaaattgggatggtgggaatatttttttaactggtagtatgacgttgttaatcttgatatcatcttctcgtcgccctccagcgagttacatcggtgctttgtgatcagtagcacgagtgctgttgaagcttgcagcttggctgctgtgctcgtgcagccttcgatcgatcaaaccagtgctatgtatagatgtgatgtgtggtaatgagattatctgataaattgatgccaaatttcttggcagaaaataaaccttggatttaaccatggtaattcggcatgggaggcaccgggagatgtcctgtgaataggtcgcttacctgcagtgctttttggctgagcgttcagtatacccaatgaaccaaatgagagagatgccccaggaatcaatttatatctttctctcacagcattttacatccagattttctttcattgtccctataaaatttgatacaattattaggttgatgcatcattcaggcctgctaggcccatcattaactggaagctcatctgaggaacaacacgcgcgcgaacgtctaaatgccatgaattggactgtagttggaatatgcacttagctgaacttcagaaaagacataattcaatccatctgttcgtttatatttttccaaaatgtccttacaaggtcagagtaaactttaggagcatatgcttctgttcatccaaataattatcaatttcacgaacaaaaaacaattaccaatttcatgcattgttcacctttctccatgacagccaaaccaaacatctttaatttttttgagaacatccaaacgtctttattcagtgcttcatttcttaattgagaaattttatagtccttaagaggtactgagagggaccaagatttttaattagaaaaattggtacatcctaatgcgtgagatactaataggtatcaaattttatatgaaaaagtgttgtacctcctagtaccctccttaagaaccataaaattatttttcttagtttggtgaagtagcattggtgaaaattcattatactattgaaagcaggagatgaagagtacaattcaatgattcattattggtctgccataatctcattgatcactaccaatatatatgtattgggatattgatctatcacaatgttagataatccagtctcagttacgtggacatacatttatgtgctacattgaagtactaaaaaatgagggtgttgagcagctacatcagaccaaatattacttagtattgacacaaaattggtaaattttacagaggtctctactgctagtagaagtgatccatgcccatcatcatcttaaatccaaggggctagacttacttatactgccaaccatggtttgcaagttcgtttcaaaatttccgagacccactggcacgaaaatatttggcccaaaatttcaatttgtttcaatcttttttttttgttgtactctttgttcttgttagtccttcttacttctgtaacatgtactccaagattaaagtctcaacttagtggggatatagtacaaatggtcaggacttttggttttattttccttatttttcccttccctttggatttgttcagaaaactatcagaatcaaagcaggggcatagctgcacattgatctcggctgcatgtcttgagtgattgcatggaatcagacaattaattcctgtatgatagcattctatctcctctgctccataaaacagcagacgaaatgaagtagcagcagcttgtttttcttgattgattatttggtttttatcagagatcgatgatcaagaagagttcatggggttcaggcagcccaggtaggcctggaagacatcaggagccgtcaaatgcgccgatggtaagcaatcttctgctgcttgtctgaccattttgcttctcactcaagtagtcaagtttctgattttagtagttcactgcaattctttcatttgatattagcaacaacccaactgaccagtttctgcatctcgtaggcttattccaagtcgcaagaccaagaggtcatgatcacctcaacatcaaggacacagcacgagtcttctcctccgtccggtttcccgagtaaccgttgagatgcttccaatgatgtacatgtgatgcagtttatttagctggtgatttataacttgctgaactcctcaaattgttcgtgctagcttcctgctttcacctttcacgttgttgttttgtgaaaaagagacatcctctgcttgcgaatgattaatctggtccgcttgatcgtgattggaatggattagagatgttgtagagttgtatgatcgggtaatgattttctgatggattgctaaagaataaataataccaaccatctcatttgttgattgctgtgtcaatgatcaaaatcatcaccttgttaatttggtctcagctttctgtttgtttcagtactgcctagctaatatagtgtacctatttctagtttatatattgagcattgtagtcagctgtacttgttataaaagttagtcgatatagcggaacgacaactaaccttctcgatcgtttcaatcattgaccacccaagacatgccagatgatgacacatgaacacacgatattttttaacgaggttcagccgaagcctacatccccggggctctgattatgggcgctcctccccaaccaacatagcacctagccgctatgagtccatggccacgccgccatcatctccctgcgtgtactacgttgtagtcgcatggttacattgtggtgccccttctctatttaagagaaatgccgggttacagagtccgactctaactctaccccctaacacctattacaactccaagtctaactgtaatcaaataggactagtatattcgacacttattctaatagtactgaaccccccccccctcaattttcatatatgatcatgtcctatttgctcacatataaaagacaagacaaggagcacgggttgaggaagatatgagagaaaagtagtatggagatcgatcactccgagtggcttgtttttttgcggcggtaggcttaggaggaatcaagagctgtcctgttacgatggtgatctgtgaaagaagccacacatttctttggtttaggatcacctgtaggtccatgaaataagccatgcaacttctaaacttcatgagttat

SEQ ID NO: 40292 - DNA, 4216 bp, Oryza sativa
ttaactcatggtaacggatttcctattcccctctgctcatgctttgctccaatattgcatttcattatagaatttgtttatcacctgctcccctcgtagcttctacacctttaaagatttgattgtttcatcacatgatgacatgacgatgtagagttgtatcactgagtgaattatttaatttgttgattgctcagtcagttatgtggatgagatccatttcaatacattgattgattcatcacaatgctgtgtaactacaccctttcccccctgcttttgatgagcaaacatcagaatcaaaccaactgcgcattgaagaaagctgcaggtcctggaacgactaattcctgtatgatgctatgttatctccattgctcaattaaagcgcaaatgaaatgaagtagcagcaacatgaatgtttttgtagcttgatatttagagactatgaacaaggggagctcatggagttgagcctgtccagtggtaggcctgggaggcattggtggtttttttattcactttaggtccttcaatttaacgtcgagtatgaaattcatctttgaaccgaaataccagacacagttcattccccaactcccaatatcgtgtcaactttggtctcaatgcagtacgacttccggtttcgtccaacgtggcacatcaatcaagcatatgatttgaaggatatatgattaagaagatgatcagctcatgtatttgttttgtgttctccacaacttaaagtaggcaggcagcagggccgtcttcaggattttggggcccggaacaaaatgtaaattggggccctaaattttctaaagctaattaatatgtcactttcagtcaactatacaactttaatttgtgttatttcatacaatatttacaaatacattttcaaatattaattctaaaagagtaaaggtagtattgaataaaaccaagagccatactgtcttaagatcaaagttgatactcaatgtcaattttgaggaacctaaagtgaacttattcctttttattatatatatgggctgctccttcaccgcgtgggccagttaaatcggcccatcactttaagtgggcccacaaaactgacggcaaagtatgggccaaaacatatcgcccggtgaaatatgggcttcttgttgggcggactcaatcatcacttattatgtaaaaaaaaaaaacaagtacagaaaaaatgctttgttttgctcttctgttctgccctcatgttttcatcttgctctgctctttgctcaattgctcttgagtagaaaaaaacaagatggatgaaagtgagatcaccatgtcacacacagatgcaggattccttgcgcaataatggtcgatgtgcgggttatattgaatttagcaccagcaattagtggcatgtggactgaaaaacaaagggaaccctctcccatttttttgtgcgagtacaaaaggaaggaaaattgtgacaaacagggccagataggacttaagatagcgttgtgatgatctcaacagtaaaacacggcaatggtagagtattatacaacaaccctgaatactgatatatggcatcccgactgttgcaaccgtcgtggagcactctcctattcctgacacttataatccatggattttggaagatgggtctttaccaagcagattttgttgagcactgggtttatgacttaatcaggccctgatcgttgtgttcctcgggtgaattgtccatgattcttcttttgagaggacattgtctgcttctctgataaaccaatgtgctcaaatatttcagtcatcgccgcgctatgcagatactgcatgttagcacatagtagccattagttcgataatcttcatagcatgttcgatctctaaatttagtttaagcacgcagagcaaaattttgactggaactgaagccaaatggtgataattaaggcaattttgtaacttactctccccaaagcatgtagcatggtaagtcctgatgcctcctgtgccgaacaatatgcaagaaatgcgatctctctcatcttgagagtttttcttctcgttcgtgtgttcgtgtgtcctcgtaataggacagcatacaactcacgcctcctggtgccgaacaaaagtttatgcatgtctcagatggtgatgcgataattgaacactgtaattccacttcaatatctacagcacctactactgtacagagaactgatggtgctcagctcagttgaagaattggaaggtgatgtcccttactcgtatagtagtagttctctgcttgggagtagttctcctactgctctcatgtcgttctacgaaaatgtcttctgggattctattgacgctttttcatggccaatatgagatcacctaacgatttatggtgtaatcaacagagccgccaaaatcgatagatcaaaaccggctagcggaaccgatttcaagattaatttactttcgtggaatcaaacgactaatttacgagcagattagtaaagaagataaatatcgtacttacatgacgacgaacgactagtttctgagtaaactagcaaatgataaccttctcgcttttgtagagaagcacaaccgttttttagcgcaaaacgataaagattaactaaattctagggtcgctataactcagccataaaaataaaatagaaaagaacgttagattgatatatatatatatatatatatatatatatctccatgtgaacagctaataacaaccaataaactcccatcaggccatgcactatgtgacccccatcactgcttctccatcttggctacatgcccatcaatcacctgcacctaatctctatagaccatagtgtatatacctgcttcgtctagatatttaattggttcccaaatctataactcaacaaatacgatagctattctaaataatttggcatggccaaataaactaactacaagccaaattatgattcaaacagattcaccaataatgttaagtatatatgtgtgagttagtatgctaagggcagtttagtatttaatttcctcctcctattgtacacaatttatatgtgctctttgagcttatccaaggtaacaattcaatcccccattttttttcttctctgaaattaacaaccaaaactgtccgtcagatacaaaatggatgatggatgagtggacacggcaaaatgattagcaaataagacatctatatgagttcatggacatagatcatgccagtgacttgtattgcgaggatatctctacgcttgggaggcaccaggacgcgtgagttgtatgctgtcctatacgaggcatccagtgcatgcatcgtctcatagaaggtcggacctattgtacccatatcgacaaaagggaacggttgtcggcggcattgacagagggtcgttgtaactttgaaacgttgtaatatgctggatcagaaatgagtatccgtaatcagtgtcataggcatgtagacttttgctaaacctcattaacaaatattgtgtctcggtgtcgtcatcttgattggttctcctatgatgttacttttgcgtttggtttctaatggtgattttggactgattttataacagttaaatcaatagtgctgtaatatactacttaaatatgtagttttgtgatagtatgatcaaaatatttatagttttacaaaatttactcaaatatttaatcatgcttttccctattttcttgatggtttagcctggcccatcgcgagaaagatccattttcttagctaggtagttgtgatatcacagggatttggctatggatgttgcagcataaaggtaggtgcgacagtagcaccagctacgggaggtgttcataagtatacgccaaagttaatgtaaatatataaaataattttttgtgatattgtaaggtagacacgcaagagtgcacaagtcaatataggcagaagtacctataagctagtgtgtccctttaacacaagcacaaattaaagcacacaaagagagacattagctgttaatccctaacctcactagctaatttctaaaaaaaaaaacacccggcccgtattgtgagcactaaagatttaaatttattgatatatatatatatattgaaaattatatgctactaccgggagtagctactccctctctatgtgccctcaattcgatcgctactaatgccaatgactgttaccgggtctaatgaatcgaatact

SEQ ID NO: 40293 - DNA, 982 bp, Oryza sativa
tagtctttcattttagtatctacgaggacatcctgcatgcgcttaccggagcgtgtcgtattgctgttgtaggttatcgaattccctcttcttttcttcaatgtacctctccaggattcttatcctttcgttaagggcatcgatttgctgccggaacgattggttttcgtccatgtttcgccacactgtagctggtccgggctggggctgtcgacgtccatcctgcatatatatgccaaattaattaataataatacacacatatataaaagttttacatgctaaatatacttgttactgcacaaaagtgaaagtgttactacatgatagacacacgttaccatatatttatgcagtaacactatataaaaaatacagtaacactacccaagaattacagtaagatgcattgttactataaaatttataatctgtattgcacttttacagtaacgtcgtgatgcgattgtaataacgtaaaacagaaaatagtaacaagaatgctatagtattactacctgtggagagtcaaattccaaaaaatcaatgtttaaagaacaatatctctcacgtgatgtatatttttttaaaaccgtttgcaccatgatgctaaaaaaagtacttatcaagagtagatccgtcatgactatatttcaactatattcgaacttcgttactacacgtaagacatagtgatcgtcgtgttactgcaccgttctgcgagacgagagctgagaagaggtggttggtgggaggagttagtaggcggcttgaccgggatttgatcaatgtgagaatgctttgaccgacttttaactgaggtgggaggtgggttttgaacccttgaaagagaggggaggtgggttgagccgcccttaggagagagggggggtatataatagctatacgccggatgtagaatagttttcacacacacacacacacacacatatatatatatatatatagggctgcaggaatt

SEQ ID NO: 40294 - DNA, 5951 bp, Oryza sativa
tgctgccgttgccagttcttcaattcagccggagaagcgctagatgtttgtggttcagatgatcgaggacgttattgactgctccaggaagggacttggtcagtagggtgatcgacaatcgattgcttgcgatcgaacgaatcaatgttttgaggtgatgcgagaactcctgatacttcccaggccaatagctagccatacatgccaacacacactgcctgaacttctctttggtttgccgttcttagtaaatattttcatacaaaagaacattaatctggttctatgaaacgctggagctgttgatgtctccatctcttagcttctgtgttggcatttcttaccctaggtatgttattgggcctttatagaatctgatttgatgtgatcatttaatacaagttccagttatttcatttgagagggtaaattccaattcatcagcacttacctctaaaaagaatcgggagatatgccatgttcatcctaacattctgatagatcaatgtcgtctcagaatcagcatgtggacaattttttttagataaaggatttatataaaacttggtctctacatcccaaacatatacgtacacaaccaaccaagtccatacatataagcactaagcccctcccattacatgggtcacaaaatacacttaaaagaccaaacaaagtaccaagttcaaccaacaagacctaagaaacacttatttccccaattcttgccccggccactggcacctgttcaatggatgccatcgagtatggatggatctatcgtgtcctctcaacttgtcaaaatttcttgtttattttgtcgtatattaattttgacacaattctccaggataaatggcagcgaggacatcacgataaaattaaatatcaacttttaatcccttaattcgatgcgaatatataattattgatccttttgatggtattcatccagtgtggcattttccattgcacagatgtgtatcaagccgcacacactctaatttgcatcagccatgcgtttgccatcctttaatccttacgacgtgaacaaaaggatgcttaagatctgtaccgtgcagggtggatggcggcgaggcatgtctccgtacctgcgatgcttgatctgtatctgcatcagagcattgctgcatcctgcacgatgaatggcggcaaaggcttctcgcacctctcaggtcgtcttggcgagcatcatacctctaaaaggattaatgatgtatatacatcattaactaaggaacaaatgtagttgtagatagtatatggagatataccccattttctaatttaaatatttttattttttttcatgcttgaagaggtatatatgtccttatacttgagatataccttagaggtaaaaaaaattaaatgggttgaactgactataatcattggcagtgataagacttctctaatccttgagagctatacaaggtacattcagataattttattatccttgagaagatacctagaggtatcatattttctagtgtaaaatttggtatctttaggtactaagtatctcaagataccaaaaaatttagtgtaaaatttagatacctcaaggtactttctcaagtactgtaaaattcctcagtacatatacctccacctagaggtatgcacctccagattaatacaaatatctatagctcttaaaaatgggggggaaattcaagaatgtcgtataccccaaaaacctaccgagagggctaaaaggtagtggaagtcagcggaagctaaaaattcaaactttgcagtatcaaagttctagggcatttgacttcaccaaaaaaacatagcaatcacctcaactgtccagctttcatttgtatagcaagctaggatcgtccgggaattcatctcttctgtcatgatagagcatccgcatcaccatgaagacagcttgtcgtcgctgctggatgctaattgggtcgacttattggcagggttgctggagacaacgcagcaggacaatgtcatccatcccaatggcaatttgatcagctccatggctgaagtgacctctagctctcggcaacaaccaagttacaatagagattccgatggttcccaggcctagctgccatggcaagtcactggtatccatatctccatggctccatgggctcttcttcatcccatcctcagcttgtcactccatcacatgtgtgcggtggtaggagcaatacattgtggggcacccctaatgggcaggtgatcgctcctagtgatcaacccgcccctccccatatactcctctcccttctctcctttcatcataaatttaaaaaaaagttagtaaaaaaaattagaaaaaaatctaatactctcattaatgtgcatagactttataccgtaaactttacacgtataaactttatgtatagaaatattctatatataaaatatttgaatctaaatttgaatttgaattgggtatttaaacttttgacttataaacattcactctacaaactttaggtggataaactttagatgtgtaaactttacgtgtataaacttactaaaagaggaaaataatgcacgcataaactttatgtacataaatattctatatataaaatatttgaatccgaattcgaatttgaatcgggtatataaacttttgacctataatttttaggtgtgtaaactttagatatataaactttaggtatataaacttatccgaaaagaaaaactatatggtgaaaaaaaaaagaaagtggtgaaaaaaattgatcgtctcaggcgatcgatcactaattagcgatctcatacattgtgaagagagcaatttctttgtgaaaggtttctccaactttattctcaggcattgtacacactctaagtccatcatcaccaatcagtattgcagaggctgagtcttcttaggctggttctatcaagttgatgtaatcatctgaaattaatagaagcttcctttatcaaaaaatcaccaatcagtataggttcgaagttacaatgaataatcaatcaaagcatgtagtactagaggtaaatttaaatgagagatgaaactctcatttatttaaatatcatttccaatataatttcccaaaatctctcaagtttcagtttggcaaaaggagaaagaaccaacagtcaccatgactaagatagcttacctcgatcatcttccatgccatacaagagagctagaggataccgttgctgcatcagcaagtgagcaagatgattctgaagcctacatggctgcaatttgctgtgaggcagccgccgatggctacagcggagaccggcggctgtggagggaaccggcgatgtgatggcccacatatcagtgagaagaaatgtggcaactagtctcagcggtcaggattggtttgtaaggaaagtgatatgcatcagagctcctgatgcctcccaagccaaccaccattcatgaacagcaacacgccgtctagagtttcctcttggcttcataaaactctgttcattactatctcagaatgttgcattgggtctctacaactatatgtagcattcgatttgatgcgatcattttgttagtatggtagttagagatgtattaggataggattgatttgtagggtagttttcgttatctctgatcctttcttatctctaaccatgtacatattctcctacatatactgacccctaaggcccaatacaacatgtccaatattcgcattatatctttcttcctctactatttaacacatttaatacagtaagctattctatagttcaatgaagtgaactgccgatcgatcaacgatcatggtcaatccatgtaatgtaattaactcaccagtgatcggtgatgaaccagggaaggcgtgacgaaattaacaacgtcatagtcgaggcagcaggttgctagctagttcttgttctgtcggcatcagattttttcaatggtaaactgaattcctaaaatgttgttccgttcaacatttcaggtcagattttgtggacaatagaccattcctcccagcatctttggatccatcagatcgagcaataaacagatgggaggaaactaggtgacatctctgaaaatctcaagagagaaattttcatgcgagatgtttaagtcctaagtcgatcaaatgcagaatggtggataccttatatactctgttattcggcatgctagaaagtcttacattgtgaaacggaggaagtacacattaattcgcatgataattaccatcaaaactgtactttttaccccggcgcatgatgcgtccaacatgccatccgctggtgaaggtaacgcaagtgtatctgccttgccgtgccaggaaatggacatatatctcttcaacgccatggaaggcatcacgatgcaaatcaattagatatgcaacagctactaatttagtatattcggtttgatgcgatcatttcacccatcctgcattcactgtcatacttcccgttgcaccaaaaaaatcgagccgccattgtcctaggtgctacatgagaagtcctgatgcctcctaggccaacagcacgccacattgaaattcttgaaaaaccacatgtcctctagaattatgttgaaattttcagctaagaaatgtcaggaaagcgcagccttttgaatcgaacttagcccctcaaacaacctaatctgaaattcactcttatggagatttgaactcaggaccgtggggtgctattcagatcactgcaaccactaaattgcatgccctttcacaatggatattttttcatatattaatttcagaactgtgcatgcagtttaatcgctaccatcaatcattgcattcatatctgtgatctccatcgactcgttcatttctttctcaatttgggtcccttcatctattttttatggagcaaaaagtgtactgataatgaatgcactttctggtggtagcaaacagagtattcaactctgaaaacgtatgataaattttcatggcagttttttttttttgacaatggaaatataacttcccgtctctataccaactaaaaataacatggtcatatttgtgggctttagggttgaaacttagtgggtgtagtcatgcacccacgactccaccaccacaccaccacccaagtggtgcttcccccttgacttgattgagaaattaatcatcaatgaggtagttgatattctttaacgcactgaactttgtgtttgcagtggtgcctcccccttgatgcatgagaacaatgagtttcaactagctaggtgccatgggatcagtttgttactcatttcttgcattcaaagcagcaagtcaatagcaaggcctacttttgtgttggaggcatcccaatgataaaatgcagaatttctaaccagttagcttggtaaagaataattaaaacaatactgagtacttcagcttcaagcataaggaggaataactcatatcacaagttcataattattgacgggttttgtctggggagaaaaataacggcaaacagaaatttctgcaggacacagtagcagaaaggaattgaatcaagccaacaatttttcgatgtgtattcatggttgtggcatgaaggatatcccgttgctttcttgcattggcaggaccagagtaccccccagaacgtagaccagagagccctcctcgactatcctgtcatattgtcgtgacagacaaccgctggatggtgggcagcagctatggattcagtggctatggcgatgagccccccagcaacattagaacgctggatgcatgagagtattcacaatcggagtggcctttgttcagtcttccatgaaatgttgatcatctccgataggtttcaacgaaaatttgcaggaacacagtgtccatagactaccttggaataatcttgtaataggaaacctcccaatgcctgccagggctacagtggcaacaggccat

SEQ ID NO: 40295 - DNA, 7160 bp, Oryza sativa
catcgtgtccactcaagatgtcaaatttgcttcattgttttctcatggatgaatttcgacacaactctctctcagatgaatggcatcgagggaatcatgataaaaatatacatgtaacagttaatccattaatttgatggcaataatatatattattaaaacttttgatggtatatatttatctacatatctgcatcatactacagaaactctgtcatgcatcagcgatgtgtgccatccctatgacgtgtacaacagaattcttgaaccgtcactcctgtgcccaatgtacaagcttgatctctacatggtggatggcagcgatggcccctgacatccttctggtcatcttggcaaggttctttgtgataccagctactccatttcatcaggtggcatgagagctcctgatgcctcccaggccaacatccatggtgcgtcatctgctccatgaaatgttgctcatatcgaaacattatatactgaaacttgcccaccgtcatgccagttgtaaatcgtcagcaaaaagaataatttctcggaagatagaagtgatcgtcaccaacttagcgatttctttatgggagcaaatgctgtagtacctctaattaatgcactttctgctggtataggctgatagcgaacattaaagagtagccatgttctagaaatgtgtgaaaaatttccaaggcaaatattaatacctgatgtgtattagcaaattaggtgtttgatgttctctaacaattcttcccacaagtaactgaacttttagtgagtttgggatgatgtttctatcagatggaatttaacatagttctgatgggatatccaacaaaatgggaattccatcatagtcgaaatgcctcaaccacgatgaagtaaagatgcaacaatcactcgtttattcgatgtgaacatttcacactttcttgttgccttaggagctgcagtttcccttcatgcacgcgtgatcagatgctccatcaatcttaatccggtgccctcaatgatacaactgacatttcttaactgccataaagaacaaaagaactatcttctaatatcccactagagaaaatgtggctgaaaggtggatggcagcaatggcgccatcacatgcttctggtcgccacaacggggctctcggtgacggtggattgactttttcttgctgtggcataacaactcctgatgtctttcactcccatgcaaacaggcatagcaaaccgactccatgaatgacatctctctctctctctctctcaactagaaaggtagcccgcgcgaatgcgcaggcattcaggaatcattgcttaaatattttttctaagatatttgttagttttataatatgtaatatttaattcatctacataagcacttatctataatcttaatcttcttcatcatttaagaagacataggtctttaaagtctaaattaaaagtaaggtgttgtttttctttcttaattgattgttttaggtcttatttttaacaaaactcaaaaaaggttattgctaataaatgtgttttatttcttcttttaattggttcacatttgacacaatttgttatatgtacttacatatgaatcaataaaaatagagtagatatacatattctagacctcgcttccctataatatatgtgatctatatctttttttaaatatatgtagtcaacctgagtgttaaaacataaatttaatagtaagaaatataatatttaaaactatctactgctaacttagtgtagcttatatataagcaataatatgtacataaactcataatgctatggcatagaatagggggaagtctattaatctgtagtcacttaaaaatgatgcggtggttatgtatagttgtccaattcaaagggaaaattaagaaccacaatggttctaagaaattataagattttctacaattggttcaatttacagcctgttatattttttctattttttattttatacaaatattatttttagttcaaatttacgatatgataaatagtgacaacattacaccctatttgtcaaaaattttatctataagcaagtaagattggtacagattctcattgtttattaatgaatggattgtatgggacatgaggctacgataaattcatgggcttgtatacaccaatatgtttgcattatgtgatagataattcatttgggaacatttcatatgtagtgtgtgaggctctacacaaccattgtggatacgatttgatatggctaataagatataactgtacatgcaacattattttcggaatgtaatgtattatgaatgctcccatcatttacatatttttctataaaatttcctattaaatgttaggaattgcgtgatcgaaaccaatcattatgtattagtttagctagccttcacttggcatgaattaattagatttaaattacataatcctttatgtgaatcccacaatgcatatccgatccaattgccacaaaatattgaaaagagaccctagaaagtctttgcattccaaagtccaaataaattctttcaatttttttcgcattgtagtatagatatggtttggtggctatatggtccatttgttgctcctatttattatgccctatggctaaaaaggtaaggcaaagctaagcttgttgtgctttctcacaccctttgtatatgcattattctccttgagactggtctacgtgctgtttttctgcttcgatttctctcctcacttgtatttgcgcaaaaaattatttgggttccaaagtataaatgaattaattataatttgtgttagaaaaatctaatggttgaaaataattggtcaaatgttttacttttttttcattgagtttgtaaggtgtttttttttattttttttagacgtggtaacttaagactgctctaggacatgtttgttttgtctaaatattattattttggttgacatgtaactatgttcaagtgatgtattttaatttttttaaataaaattatggttaatatggatcttaaattatttatttaattataaataaaacaacagttaaaaaattttaaaaacatatatcaaattattgattgttttgatattatgttgtattttaaaaattgaaaaattagagaggagtaaattggacagaagagaagatacgtgcatgtaagtgcatgcacctacagcaaggggagaggatgagagttttttttttcttgagatagatcccattaatgggttcaccagtacgagttaactatatttaaacacaaatataatcttagtgaacaaagtattgtattttttactacttattattttaatcttattaattaattttgtgtgtttcatattattctaatataagcttaatcaagtgtttaaaaatctctatgatattcccataaaaatgtgtctcgagtgaccaatagctagttaaaagttatatttttttacttgttaaatatagttaatttaggccttaaattaaacgacaaaatctaatatatgtggataaaaaatagctttaagattcagatcagatagttgttaaaatttgttatcatataatatgttttctatctaatactacatcataaaaacaggagagaaaagggacagaaggagtggagggatcggtatatacatgtacgtacgtacgtataggatggaaggggtgggacgtggcccacgtatgtgggcctttcaattttttaataacaaaaataaatttaatgggtccaccatgtttaatgaaaaatgatggttgtgccacgtggcagttcagaagtgtttgtagaaatgccatgtggcggtttaagagtgtttatagaatgtttaatggacttttagtatatgatagatagaagatagatttgtgcaaaattgcgatggctccaagacgaactacaattaatcttagcgacactggctcagtttcaagggaaaatgccaaagagaactctgaatcctgatgccacccaagagccaacaattatgcatgcctataacatataagtagcaaacacgctagctggagagatttggagtttcctctgtctccatgagaccatgacacacatacagtctgtttctctatctcattgtgtgcatgtaacatttccaactcctttatgttctatttgacctacatatatatgacatcacatttggtttgacacgatgattaatttaataccctttggctcatattttttatgagccaaaccaggagagtttgcataattgattttattgattagttcggcacatgcatctggagcactggtgcatcggagccgtataggcatgattattcagtttgtcacttagattctttttggatcgagggctcatcgccctgctttttgtgggttgcaatctttacaaagtacaaatccagacctgcctctaaaataccaccatacacaccgcttcgattgttcatcaattcgcacatctcagtcacccttgtctctgcaccggttcaatgtatgcacatcgtcataattaatatcatctaattaatagatttatccatgatcctctaaacttgtcccaattccttgtttgttttcactagggttgaaaccgatcaaacacaattgtgatggatccaacacgtactagtggaaatcccaatgtggtcgaatattgcttcaatggtaatcgaaggcatcacgatagagtaaacacgcaataatcactatgtgatttgatgtgattatttcacacctattgacttcagagcaagctgcattacccaacaatcatgcacatgcaaccatattctccgacaatcctaacctagtcgcctcaaggatgcatttgaaatttctatgacagagataagaacaaaatcgatcagtgatttctctgctcgagcggccatggccagacagtgtgcagcggctatggcgccgatgcatgcttccagtctccatcgcattgctcttggtgatgccagcatttccgtatcttattgtggcatgagaactcctgatgcatcctatgccaacagccatatcaaccgaaccggaccattgttggatcttgtggcctctgcccatgtccattaggagagaaaaacattaaagcaagagaagtgttccagcccttaataaagtactttggaggtaccaagattttataaaattttgatacctactacctagagatactaaattttacactaaaaaatgttatgcctcccggtgccgccttctcaaagatggtaaaattatgcttaaagcaaggcactcatcattactatttgctaacgtttctattatttgtccttttgtggccaaagggtagtaattcggagtctcagaccaactaaaattaaaagaagagaaagaccaaaggactggctgttaaaccctagaccgctgctgaggtgaaggcgccattaaatcattgggctacctctcaacttgttgcatggtatagcccacccaatttgagttcagcatggtggttacctactgctgtcgtggagttgtagccaccatggcgaaatacatagcaccaaataaaatggcgttgagattttggacctcagcagtcagcatctttggctatggcgctaaggtcagggtcaaattttttgttacggtttatttctaaaataagttttttaaaagggctaaagtaaggaaatttcagttactcatagatggtggttggtcccccgagaattgaaacatgattatcttacaatgcctgtgttgctgagcacattcatcttgtcatgcttgctatgccctaccgctccctgactatcactgccaagttgcctcctcgtcagaatatcacttcatcagacgatgtccagcaaaatcccaccctcatcattcgccattattcgtccgctgtcttgctaaaatcccaccatcctcagtcatcagactcggattacacttttccgatggctgtagttgctaatgattgccgatggagagcccaaaaattgttgcttcttggcaaagttgaagtggaaccaagccaaacaactctgcacgacaaaaccaattagagggaagaagtggcgatggccttggcgacacgagcaagcagtggcgaaggtcttgatgacaccagctcagttttgtggaagagtgaaataagaggtcctgatgcctccgaggccaacagctagaaatttgcaaaatgccgagtagaaattaacctggagtttcctctgcctctaggaaatgggtctcagtgtgtagcattccttacttgatccttagtatatactattgggttgaatatatagtgtttgatgtcatgtgatcatttaatacaagtaacttccagttcaatcgatgacatttgttttttacatatagttcaatgcagcacttgctacctctgaaataacagccatatatatgtgatcacgttcatccttccatgatagtggactccctcaatgtgtactaaggtgtggaagtgatttctatgcacgatttaagcagcataacgattattgaattgttctctattccacatttgctgtcaggaatgcttgttcacctgtacaacttcacaaacttagaaaaaaaaaagaaacacaacaactagaatggccagttttgtggttttatcatatggcgaaaaatggttgaatttgttaatcatttggacgaacagaagaacgctcatgccgcttactctaaatttgtgactgaattttgttactctctgaactggccaatgcattgtcgattggttgttagcagcaaccaatagacagtgcattaaagaagtttctatcccaaatttaagaataaagtcatatggaagttgaatgttctacccatttccaagatctaaataatgtcttaccgaacaaaaatacagtttcatcgaaaggaaaatataaacagagttcgaataaagtactttcctatcaaataacacaaacatcaagaaacaagaaactttttaccttcgtacaagccacaaaaacatgctcaattttttatctctcactaattttacacatttcaggtatcaattttttttgtcgggacatgtcagctaccaattttcagtcacagacaagatcagagagattgaggaaataaagaggaagctcgatccgccagcttcaagcacgagcagacataaaagagaagaggaaaatga

SEQ ID NO: 40296 - DNA, 540 bp, Oryza sativa
cctggcggcggcgacaccagcaaagtaaacggagcaacctctccaaaaggaagcctcgtagagtagccaacgaagcctcctcgccgcgtcctcctgcgacgtcgacgatggccgcggccctgcacctgctgcttcctctatcgtcactaccacgtccggatgtcgccgcgccgccgccgccgccggcgtcacgttcttaccaccagctgcagcgacgcggcgtggtggtaaccgcgagccgtagccgccgtctgattcctggcacgctgggtgaccgcgtgtgccgcttgacgcgccaaccgctgcatcatcatcacggatccactcatctctcgaccgatcaatctctctcgctcgctgtattgtagtgccgatcgatcaatcgattctatgtgtacgggataaactaacccaaaatatatatacaggcgatcgatcgattaaactactggttgtccaatccgaatcagattctgagaccgtctcgatgatctcgggttgcttagctgctgcccagcagcccagcttgtcgcagcgaat

SEQ ID NO: 40297 - DNA, 715 bp, Oryza sativa
agcaaaacatccccataggattcgtcattgaatctgaggaattctaacaaccctgacaatcgaaattgcacagggggtccgagctcaacccgaatgacaaaccatgtgcggcttctgctactaggaatcaaaagagagggccaaaacgtagaccagccaaccaacaacaatggggcttttgagaggctgccaatagacttctgtcttgctttgaggcctgagatggctaaggagagggcgacctgcaacatggaaccataagattttgagcagaacaaacacccaatcacaaggcttccaaaggcttcggcttgaaggaggatgtagatgacgacgagccaaccgctgccgccaacagaggaagaagctgcaccaacagtggcaccggctagcacacagcaagcgactggagttcagggggcgacaactgccacaccgccgatcatagcacacatgccgacgcctgccggcgccacagctagcataggtgcgacagagggaaacaacgccaccgctagctcgggcacggcgaagggggacgacagacgtcgtaacgccgaggacagcgcagagaccgtcgccacctcaacgacgaccaccgaagtgccaggcgcgacgcagactccgtctccaccaccaacacaaacccgcacacgagcagggtgtcggcaaccactgccagaagctccttctgcaccaccaccaaggccatcca

SEQ ID NO: 40298 - DNA, 590 bp, Oryza sativa
tttttttctctccaatttttttttattgttaagctcggctgtgtcacctgtgtgagaggggaagtgagaagatgaggatggacggctgggatgagtcgatccgccgccatcggacggcgcggggagggatgggtcacgcggatcggtgacgtggcaggggtaggggtaggggaggggagaacgcgcgcgctcgagagctttatgttttgtttgcttttgcctcccgtcccgacccgacccgcgggtgccttttttgggggagctgtggaatgacggtattgccctccgtggtggcctcttttttttggttttttctgtggaggtgggcggtggtcaggcctgtgatttggctgcatggacaaagcggaaatgccctccctcccctgagttgtgtgtgtttatatcgttattattgctaatattgttacatgcacagctgaggatgtacaacggtatagtgtggctggaaatacacctgttttggttgtaatgtggtatgcatgtaattggtttaagatgatttaggttttgtctgatctgtttgttattgaagtttaaattacaggtaaatcgtaatgtagaaatagtag

SEQ ID NO: 40299 - DNA, 587 bp, Oryza sativa
tccctcccacccatcgactggtgtgcaccgccaaccctttcccgccggcagccgcgcgccgctccccctcgccagaccccgcgcgccgccgctcctctctcgccctaccattggccgccgacccaagcgcaccgccgttcctctccctccctcccgtcggccgacgcgcgtcgccgctcctctcgcgttggaggtgcgcccggcatccttggcgaggttgccgccgccgctccgccgcaaggacgagggagagccgagaggaagaaaaggaagagccaagaatggagagggataggggaggggagctggcgatctcaccttgggggacggcgggtgtcacaccccgaagttctcctcccaagcctaaaatttaatttataaatgaccctaagaaaatgccggtgcaaatcaagagaaaaccctaaggaagtaatacaaataataatcgaatttgacatgtggaatttttcttgagttctacatgtcgaaattcactaacaggatttttagtggaattttcagagccctagaaataattttgaccaattaaaattgagcacaagcaatatttaaatccctggaaattc

SEQ ID NO: 40300 - DNA, 579 bp, Oryza sativa
tgcacagcaggtgttgtgactcggggtatattcatgtcggcgaggaccttgttaaccctttcttccacccttgcattcatgctagcttctagttcttgaatgacctcaaccttaagttcgtccttcaaacgagcgtccctctctttcttggagactttccgtttcctgtattgggatctgtactgagggagtccatgcttccagggcacatcgctaccaattccccaagttcggccaggatgttctttggttccgagcgcctttgtgaggatgtcatctttgcgcctcttcggcgcggactcaacctcgctttgtgaagcttgttcagtaaccaagcccaactagaaaagaagatagtcgtttatacgaacttgtactttatacgaacgaaaattagttaggttaagtagtgaactcaccagttcctgatagacgacggcatcacttttgttctcaaatgtgacagagccgtccgggttgaccttaccccttgcccgcgcccagttgcgagctctttgttcagggatgtctgaaaacggggtagggacattcgctgctgcagcggctgcatcttcttgg

SEQ ID NO: 40301 - DNA, 606 bp, Oryza sativa
tcctcgccgctcccaactctctccagcaagctgcacccaccacatgtgtacatagtagcattcatcaccattcccctgataataacaagtctacgtgtcgcgtttttatgctgattcatccatgctgtgctttgggtacaactttggatataaactctccttattttctcctaggggcggagttgaatgaaatgaaggaggatgtcactggcttactttactttactttggattaagtttagactaatacaaggatctgaatttggactgaagggatgcacatatggtgaaaattgatgaactatatagttaaatagtttttggaccggatttatgaaccccccctccctctatgtagctctgcccttgctccctccggctgggaaagagaaaaacagaactctcttatacttgatctcacgtgaggtaaggagctccgtaaagggtagtgagtgccggttgatggtttctcggtgcgttggagcagaaggctggagagtggttgtgtcggcggtgatgacagcctcagtatggtctctgcgcaacaaggctcagcaagcaataatcgattctaacatcaaggtgggtaccgagctcgaattcgcc

SEQ ID NO: 40302 - DNA, 1253 bp, Oryza sativa
ctgccatcgcttgctgcaatggcgaacaccaaccctaatcctcaccgtttcctatgtgctgatcacgtggttcatcaaggaggagtcatgaggattccccgcgttgatctcatagctgctacaaagctcccaaaacaccataaacagtatgctttggccttgctggaacggttgattcctgagaacctctggaatgaccattaggtaactagtacgtaccccgctgcgttgctgcgggtttaatagatgacttaatacataaatttttttgactcaaacaatgatgaaatgggaaattaagtgccttctcaaaatcataattttagttacatctatattcagatctgagatacgtacgattatcctttacagtgtttatattgaaaccgtacatgcaagcttcggtataaatgtagctgtagtaagtagcaaaaaaggggttgcaagtagcaatatgtatactgcatacctgtacgctgctaacctggtcaattgatctattccattgtactgtatcatatcatgattcatagaaaaccaagcacacagataatacaaacttatggtcacgtagaattacttggagattatactcgcgcctttgatcaaactgagaacacaaaatgttttgacagtacatctctctagtaaaatccaaacatgatttcttggttggtggaagaggatcaatagtcatccacatatcgatgtgttcgagagggataggaaagcatgtggaagaattgggaatggaacagtaattaggatccgtggagggttgggatggaatgcaatgatggtgattaaagccatgaagcctccgtcagtcactcaaaaacatacgccagacaatggtttcattgtgcaggaagatggtcagatggggagatttacgtggagatagcaagacggcaggaggtgtttctaggtctttgctgtggaaacagattggctttctttacacctgctggcttctatcgaaggaagacaggcgtcgctgacaggcaacgcggttttggacgcaagggggcatgcgaccgtgaggattattggatgggggggggcccccccccccccatacatgcacctaactagaaaaaatgccgcgcgttgcaacgggtaaaatattttttattgctatacactttttagtcccaacccaccccggtatctttctatacttgcctatctttgatgtagcccacaagtggagctgtatgctcacctcgcatgggcggctgtcgtatccaacc

SEQ ID NO: 40303 - DNA, 678 bp, Oryza sativa
cccacggattgccaactcagtgtgttgttgaccaagaccgcagaaatccaacgaacaaccctacgattgtctcatcagctagtcagctccaacagcaacatcgacgatatcatccacagcaccaatgctcctcctgctgcacctgactctgcaataaatcataacaataataccttcagcaccaaccattctctgcacctacggcctcagcaaagaattgtcgtcgatggaagaagttgtttctctccccgacctactccaggccaagcaaagggcaatcaacctcaggagggcgataccaagcagaagaccgtcatccgcttcaaacagcaatcagaaggaagcttctcctgtgaatgatagcaatatgcagtcctatcacatcatcacagaaccaatcaaggatgatgcagtcactagaacaatgccagctatatctctccagaatcaaaatgagcagccacgcttgtggttttcagttcactacttatcattgtgtaatcgaaagtttgcagcaatcatgtagtaaataaatatattcatgtctataaacagtgagcttgctatgtttatggatgattcctgttgaggatacaatgtaccgatgttaagcaccttccctttttgtttaaggcagggctttgtattcatgtaataagggagacatgtgtaataaaa

SEQ ID NO: 40304 - DNA, 757 bp, Oryza sativa
ccgtataaaatggctacatatataggttggaggatttgagtaaaaaaaattactacgttaaagggtatgggattgtgtttaaggggtgctgctagcgtgagatgagagtaaaataattactaatagggaagaatggtgggtgcagatagtatggggttgttgtgaggagtgccacgaagctacgtagcacccttaaggtgtcatatagtagttacggtgacgctacctagcatgttacacgcgctaccgaatcagtagcgcgactcacaacagcagcgaggtccgcttttttttttttgggcgccccaccgcttcctgattttcgttcgattgctcctccccgtgcgtcccaacgtccgtgaaaaaattactcaccctgaatttctccctttttactgtttcggttggatatgtatgccacacctcatccgatatccacgaggaggagcgagtaaaaaaattactttgattcccatgtcccagacgcatgtatatatccaacagccacgagttaaaaaatcactgtccacatgtttccgtaaaaaaattactcgtggggtctcccaccatctaaagtccacactccagttaaaaaattactattggactcatattttcttcttataagcccaccctccagttaaaaaattactatcggactcatgaggcaaatattgcacttgtagactggcataaatgtatcggtaaattattgtgccgtcagtcggttttgttgaggttggtttatattagtaat

SEQ ID NO: 40305 - DNA, 683 bp, Oryza sativa
aattcctgcagcccatctgccggtgtggcttgctgagtactgtggttgtactcattcttgctctatctttctccccccccgttcagtaagagaagctttggagaagatgtcttaggaggagtcttggcttataccccagttgagcgcctgtgaagatggagccgtaggcccgctagtccgctgctgtttatttttgattgtcaggcctgaagcgcctttgtaataatgtaaatattatcgatataataaagatgtgtcttttatatcatgtttgtgtggtgtaccccggcttttcctgggacggggattaatacactagcgttcgggaaaaggcaattttcccggtcgcgacaagctggtatcagagccatctcgactgtaggataagccaagtggataaaacctaaggacatattttataaataaaactatttgcgaaagttccttttttctccttcccctaatgctatttgcaaaaggtttactccttttcttccttcttcaaatttcaactagtactagatggtcaggtcagtgaagaagaagacatcgtcagttgtttgccgaagctccggaagactgcaggatccgctagcgaagcaaaggaagcagtgaagccagctgtgaagcaggagtgaagatcttggagaacccgtcgcagaacctaagccaccctatagggt

SEQ ID NO: 40306 - DNA, 561 bp, Oryza sativa
gctccccctcgccagaccccgcgcgccgccgctcctctctcgccctaccattggccgccgacccaagcgcaccgccgttcctctccctccctcccgtcggccgacgcgcgtcgccgctcctctcgcgttggaggtgcgcccggcatccttggcgaggttgccgccgccgctccgccgcaaggacgagggagagccgagaggaagaaaaggaagagccaagaatggagagggataggggaggggagctggcgatctcaccttgggggacggcgggtgtcacaccccgaagttctcctcccaagcctaaaatttaatttataaatgaccctaagaaaatgccggtgcaaatcaagagaaaaccctaaggaagtaatacaaataataatcgaatttgacatgtggaatttttcttgagttctacatgtcgaaattcactaacaggatttttagtggaattttcagagccctagaaataattttgaccaattaaaattgagcacaagcaatatttaaatccctggaaattcctttcttcctttttcttttttttctttttccttt

SEQ ID NO: 40307 - DNA, 850 bp, Oryza sativa
atagatgtttcgtaattaaaaaaatcaacgtaaaatggtgagggaagaacctacacgaggtgaccatcgtacaaagatccaatgttgaacggtgaccagttacatgtactctctcccaaaaatctcatatatcattctttggtttttccaaaaatctaagtcctatttgtagtcactttgtgctaaataaaattgttaatcggaaaccaagaagtcattctaatacttattggttgcatgttcattggtttgccatatggtgagtgagttaattgcttcttggtattgatgcaaaaataaataggtctcaaatttttggaaggagggagtataatgtaatatgattcctggagagatctgaataacttggttaatcatgtctactagcttgagaaatggtgagcaaagaacttagcagattgagactattttgtaattgaaaaattcccggtgcttcctaggccaaactattatggcgataagccacttgaaaaatcttatctccatcaattctccttctctttctcagcctgagatccttattcatattgccttttataggtcaggaaaagggatatggtgatgtaataagtgagctttagtgcaccgtcagatgtggagaatgggatgtttccattgtcttataacgaaatcgttaaattatatatggcagttatataaatattaaggataagatatgtttagagtccttcattattagcgaacagttgactatgcattgaaatcagctttcttgtctctatcgttgtactcctatatatacaattcacgaggctccaaaacaaatcaaccaataatcgcagtatatttctcttcatggactatttaa

SEQ ID NO: 40308 - DNA, 640 bp, Oryza sativa
agtcgagggaggcaaggtagacttattccttactactactatagtacaatacaactatagggccatcaggttaagtcttttccaaagaaaaaggcccatcaccatcaggtaacttactcctcgtccgtccgtgtggggactcttcttcgtcctcaccaaacaaaccctagcctcttcataatcggagaaaaagaaagagaaaaccctaaggctctctcccctccggcggcgacaggacgggttctcgatcagggttgccagcgaacacgtctacggtacactcttcgatcgcctcgattctttcttccgattcttcgacgaaatcgcattgtatggccacctaatcttacctgtgtccctttctttctgtgttcttcttcttcatgggcgtcaagatggcggatgaaagcgagcggagcggtatggtaatcgacgacgtcggcggcggactgaatcttccaataattgttgcaggcaagcgtaagcgggagctcacatgggaagagaaggcgttgacagttcttgatattgtcgggtcccaacagcaccccgcatgccaacctgccgagcgtgattgcagcctcatagactcggagaaagattactcatgtgagtgtatatataatccacaactaatcgg

SEQ ID NO: 40309 - DNA, 1695 bp, Oryza sativa
caccttctatctttataaccattatcttcgtggatgtgtcagtgataacgatgataccattgtctttgcctgtatatatgaaaatttgcaagacatatataaagatggagccgatgtgagctcttagttaatactcccttcgtcccaaaatatagcaacttttattttaatgggatgtatatatatatatattctagtaatacgaatctggacatgcctagatacgtctcatctaaccaaattttgctatgttttaatatagaggaagaacatactacttcctacaatagtaaaggcaataataactctcaaacttaatgtaccaaaatattttttttattaccatttttttcttttgtccacaccttgcaacaaaatttcctttaatagtaaatgctaagaatctactttgagttgttatcatgagtatccatcatgtttcccttttctttcatcttcttcttccacgacaccaaatttgtttgcatgacaacgaagatagtctgttattaaataccgttgtacatgctctgatctatgcgcgttataaatgtccgcgtttgttttgtgtttctaaaaaaaagtctattatagtttatgacgaatgtaatatgtaatgctggtatcttttgctatgacctttgtgaaaagtaaattaatgggaaaaaaagttgggtaaaaacatgatctagaatttccacgagaatattcactttttatcctctcccactctcttttgtgtcgttcacaccacagttacgatgcaccccaaatcaacggaggttttaattagtggaaggtagaaagtaaaaaaaaattgggaggtcaaggtgagtgagacgtgacgtcgtgctcacgtcgtcttacgaacacgacctcttgggcttttcctttttgtgtctgtcatgggctaggcccggcaattagtgcggtccatgggctacaattcctcgcgtagcatgtagttgggctgggcctagggtaaatctgaatgctgcagaatgaaattatagattttcttttcctcttttttttggcaatacatcttcctgatttttgtctctaaaaacaaatatgccttcttatattgttccatctggttggtatcaaagtgtattgagcctttgattataccaaaatatgtcttaccaattaatagtagtatttggcaactaaactagtattagtgtgactggtttggattggagccaagtcatttgtaatgccacagtgctcaatttcgcaacacactgtaactttcttcaccatatcaagcatactggtagagaaccaaacatagagagtatttcatatgagctgtatcttactaaaaagaaaaagtaataatatcaaaatttatctagattttgacaccactataaaaatgacccaatatcacatcacacattacacagtccatgaaattcacaaaggattgtctttgcctctttgaggtggcatgttcttccacgaggtatctgcacatgaacagaacagtgccaacacagttcctgcttgtgctctggttgatcagacaatgagcatactgtgtactccatgtcatacatcggattaatcaagacagtttatagctcttccagccgctataaattatactagtgatggagaaaatagcaccaacactactgtttagatgtgttttcatttttaatgcatggaactcagaacgcaaca

SEQ ID NO: 40310 - DNA, 683 bp, Oryza sativa
ccaatactttaattatttctcagacagcatccaacttagtaatttcgaggggtcaaccttactgcattaaaaaaacaattaattagccgatcgaaatttagagatcgtgcacagtgatgcttgtctcttttcagtcgtgcgaattgaagtccaccccaaattaaatttaattaactttccccccaaaaaatatgcctacatcctgctgctaatatataacataatcaattctacgtacctatatgatcttatgtctagtaagctactaacagattaaactagctagctagctagagatccaaaaaattaactgaccagcttgtgcatgctctgcttaattatcatgtgaccctactaacacactctcttatgatcatgcccttgagcgtgcattgatgatcaattagcatcaccaaccaaaccaagtactactaattattaatcaacctagcttgcacgcacgccaagtccccctccttgatggagatagtttcattggctaagtaatgactcatgaaataattaaccaccaaacaatagctaaatacataattaaccccacgctagacaccacgagtagcatcaaatatactaaatctacacaatattttcgcgctagagggtacggacaaaatccgtcaaaattattagagttcagctggttggtgagttcatcagtttag

SEQ ID NO: 40311 - DNA, 813 bp, Oryza sativa
caagtccaaagaggcggcctccaaggatgcgaacgtgttgtcaacgacgcacttggtatccaagctccacagcaaaggaaccatcaaaagagaatgaacgggaaatagctgaggaaatagggaataagggagaagagatgaagggcaaatgagtccaatgacatttttctccactcagatctaacaccgttacctcaggatgcgacggaagtgctatggtacgaaggaaaaacggtggcctgtgcttctcgtcgaaagcgaaaaaattgtgtgctattttttggtaccgctttttttcttgtgctatggatcgaattttctcttttttttctatgagagccaaacatttggttactaacttgccatagatctgacaagggcatgcatatgaaagtgcagatgatctgattcactgatgcacgcctcagttcatctcaactgaccacaactaatcactctaccaaagcttccaacacaaatcttcactggggtgagccctacaaaacaaaagatgaaattctccacttctttagttcttacaagctgattgctgatccaagtaccagattggaactcccctggtgtctccttcctaggcaaatctctaaaaccatccatttccccttccaaatcagcaatcaaatctcaatctaaaccctcccttctaaaatcgtttcttactttctttggaacctcacccaaatcgccagcacttggccacaacgccacaaaaccatgaaccacaccatgattctcactagctactcctaagctgaaatccaataaacactggagacgaaatcctcctccgaa

SEQ ID NO: 40312 - DNA, 743 bp, Oryza sativa
  unsure (1)..(743): unsure at all n locations
ggatggaatttgtagactactggtacagnagntcatcaatatgttcgcaatgatcaatagtatattgcttatgaaatagtcaaataaaataattaagtgaagcacccactagaagtgaaataaaataattaagcaagtataagcattggaaataatataattaaagtagtataataatgaagtgcaattactactgttagtgaaataaaataattaagtataaaaaaatatgtagtgtatgtgaaaatatgttaaggaaaataaaagaactaagtgaaataaaataaaataaaattgctctaggcaaactcacctgtgacgggctctatctgtagggccgnnacangtgacctcacctgtgacggcccanagtgttgggcccgtcacaggtggtcttacctgtgacggctccacggttggcgcccgtcacaggtgaggccacctgtgacggccacatatttggagcccgtcacaggtgattttgactaggggtgacctaaggttggacattcttttagatcgatccataatcggcgcccacttttactcactaacttttcttgaccggcgtcttgcctttctttacctctttgacagcctttaatcccttctttccaccgacgattgtacctcttcaaccgcctcctttatggcgccaaattctcgccctctccggccccctttaacacttcttttcactgttttgaattttaactttccggcaacatttttgctggcggcct

SEQ ID NO: 40313 - DNA, 680 bp, Oryza sativa
cttggaattcgcaccgtcggaagtgcgtctatttaagggagttttggggattcatttgaagtccgcctgtagtggaaaaattctccagcccccaagcgcctctcgtcttctccactcccgcaaaaaccctagttcagcaacttaggtcctttcaccggcgatcttcgatcagcgatggacctcggcaagtcatcttccaccagcgcatcgctgaaggagcttcaggaagacggcgcccttcctggtcgtggagccatggagagggaagcaggaggtactaatccccagcccgtcttaggtcgcatggttgcgatcgaagactatgttctctgcggttttctccctccgccttccgaatttctcctcctgattttgaacttctatggtctttctcttcttcatttgaaccccaattctattgcctttcttagcatctttgctcatctttgcgaggcttacattggggtagagtcttttcttgatctttttcgcttctactacgaactgcgttggatggagtccaacagggtatctggctccgttgggttccgacttcgagatggcctgaagtcgcgttatatcccgttctagtgcccttcttctcgcaacaaatggccgaatagatgggtttatcttgaggtcaaagattcgaacccttgtttctcggtcccacagaacaa

SEQ ID NO: 40314 - DNA, 1251 bp, Oryza sativa
taacccttaaaaactcatcaaatttaccctcaaaagttgcatctaattgatctttaaaaacaagcatagatgaatctattgtagatgcaatttgttgttggatagattgtgatacctcatcattgcttaccgagtcgggagtgagcttaggacgtggcccgggcttgatgatcacgccttgacgagtcctagtgcttgccctcatcaacgcctcctgcgtgaactcgttgatgtactcctccatagctttacgatcttctccttcgaagtcatccaatgtgaccaggatcatattggatggctccacctccgtcttggatggcggcttcatcatggcgaagtcgaagttgagttgacgatgaacggatctcttccccaacggagtcgccaaaaatcgtgttggcaactttttgtgacaagtcgacaagcacgatcgcaacacctaaacgccttgcggtgatatggagtcgccaaccacctcgatctaaccaaagggccaaatcaagatgggttttgcaaaaagaaaagctaaaccggctagcggagccgatttagagatcaaaatcagcctctaggctgatttagatcgatatgaggataactacccgtctcgtgggcaaaacggaaggttttcaggacaaacctacaaagaggtgtcgcactctcgcagcggcggcggacggtttacggcgcaaaccgacaaagatggactaaaactagggtaaaatagaaaacatagtaaaagaatgattcaagtagattgtatttgggggttttacaatgaaccggccttgtcccttaaataggggttggtcttaccctctataggcccttctctacgtccaactcgggatagaaaccaaaggaaacacgaaacatgccttcccgagcaaggaaacccgagacccgacgaaaacagactcggactcggaccctgccggtctgaccgcccacatacctgtggtcagaccggccctactagccggtcagaccgcccatatacctacggtctgaccggggttgtgaaggaaactcggcactctccaaactttggcaattttcctctatttcgtccataggtgccaaattttggtgtaaacacatgcccccctgcctttttgatgaatatcgtgaatctaaaagcatagaacatattgttttagggcgataatccaattaccggccataggactttctaagcatcttaccaaatgctcgggaagtatttctttaagtatttcccattaattg

SEQ ID NO: 40315 - DNA, 507 bp, Oryza sativa
ggccccccccacagtacaaaatcgccctagcggagggcggcaagggtgccgcctgcaaaattccatgccccctcgccgcccatttgcaggcggcgccctagcggagggcggcaagggggccgcctgcaaatttcgttgacggccgtcgcccgagagcgaacggccggctgccacgtcattttcgccgccctctgggagggcgatttttaaaaatcgccctcccagagggcggtaggcgactacttccgtcaattttcaaaatggaaaattatttttgtaaaacttttaataaaaaaaattcgtgaaaagggtagcttaggtagctgtgctttttgtaaggcccaaagtacagtgtgagtttcctggcccatgtaggataggcctttgcactttggaagcccaatgttgcacttcttgcttcaagactggcccaatattactgccctctttgctagtccattactctacacactctctctctctctctctctctctctctctctgtgt

SEQ ID NO: 40316 - DNA, 723 bp, Oryza sativa
aagatgaacaaacacaagcctgacattctttttttctgaagtaaacttttcaaaaccaaatttctgaagaaaccacatcttcactgtcttcccagtgatgatgtcatgggcattgggccgtaggccaatgcctatagatagcccataccaattaagttagagataatattgttagttagttagagataatataagattaagtccttacttaaagatcaagttggtaccatctatataagaatgggattgtgtctattatgaattaagcaatgaatatcaattagtctaatctctccctcccaaacaatgttcttctccctagcctaaatctacatcccttctctaggagctgatgctgcccggctattctcccgacgatgtttatctcgtcatggcctcgggtcatgacagatgattccttcagtggactctgaacactgaaacagtacagcactacactacagctcatcagaaaaaacattggaccggataggaatgtcataggatccagttcccaaacatttgttcaagatggcctccagctatcactcatatcagtggatgcatggcgtcatctgcaagaacagtaggtagagccatccttttccatggtagagtgtagactactatagtagtagcacttgctacattggatactgctacaactctagtgctatccagttgcacaagaatctgttcttcctcctactaccaccaaattcc

SEQ ID NO: 40317 - DNA, 2241 bp, Oryza sativa
attcctgcagcccttgcagtcaacctcgatttcatcgatcatcggatcgggagaaaggaaagaagtcaagactgctccttttattttcgttaggagtcattctttccaatttctaggacctctgtgtaatttgaccattttaagggtctttctataaatgtatcgatgctattaatctcatcgctctttctatgagaaatgtgattctcgctgatgtatgttatacgagtactatgtaatcttttatattggataaatgcatgagtctaaaaggaaccataaacgagcaaaaagaatgctgccgtacagtacaggtgccactgccacatgtgtcgatgatccggacaaaatcagttgcaacaaaatgccacgtgtacaacgatgcgtggcacgtgtcactgaccagtgggcccaaccgcggtgatagcgtgaccctagtccatcaacgccttttttttattagtgcctggctcaccgattagggccattctgacacttgtttaaaatgtgctaatcaactcctcgctaatgacgtttttggtagtaaatcacgtcaaattcttggacggttagcgtacttcgcattcacgcgcctctcgtgttgaattttttttcttttacaaccgaaactgatgcagtgacagtaaactgtggaagaaacggagtgtcagtttcacatcacatgtggagtgcttaattagttgttttatactatgtactactccctccgttttataatataaaacttcttaacattacccatacatacatatatatatatatatatatatatatatatatatatatatatatatatatatatatatatatgttaataaatatagacacacttatatatttagagtaattaatatatatattaatgcgggtaatgctaaaagtttatatattatgaaacagaggaagtactcaaattatgccatgttgctgtaatctcacttgatagttactcgaagtttggccatatgcttagctactttgagctgatctttataatactcaatgtacatttggcaacatttaatttggtcttccagagttggttctggattaatgaccttgcaggtcaccaaaaggcgcactaatttccatcatgtctaaagtgatcaacttggagatatggccatcatcaagcccccacatatgatccacgcagaataaaattgttctacataccaataattttcattcagatttagttccattttgattctgatttagtgcgcctaagtttgtttacacagctaaatacggagacatgtcgacactatatctcaaataaccgtttcttcatcactgaagtagtgtgaaaagattgcgtttttaaagattgcaatttttttcctctcctgttttgtgcccttgatattatgtcgttttcatcagtagtttagagcaagtttaatagtatatccaactattggcttcaattcatctatagccaacctaatagctcattcatacaatatttacatactacactattaatacctggtcctacttgttatacacaccctgcgtcttgaagtccgtattacagctggctataaatttatagcccgctgctattctctcttcttatttatcttattaaaatatgtttgcagttggcttatagccaggtattgtacctgcttttagagcacccataatggtaaaataagatgctctctataaaacatgtacatctcagcaatagattagattaatagtaaaccacctcaatagtatgtctacatgtgtatctatagctctctaatccattgcctcgtttttatctatagactatctctaggttagtatatagctttgttctctctcttcatttagtctcttccaagtaggataatatgctgacatggatatcttatggatatcttatagagagcctataaataaccattgcgggcgcccttatcacgcttctagcttcatttaagccgtccaaaacccttaactgcgatggcgcacaacacaacaaatcatcttttcgaggattttgcgaagaatcgatacaaaaaagcaacgttgacgtgagcgagaaaattcagaaactttcagaggaaaaaagaagaagaaaggtttcaactttcaagaggtagtagtagtagtagtgcagagatatctgaagaaaagtgcagagaaaaaagaagcagccgaggtaatataaaagttggagagaaacaggtgaagctgcaatattccgccacatcttcttct

SEQ ID NO: 40318 - DNA, 1257 bp, Oryza sativa
  unsure (1)..(1257): unsure at all n locations
ctttcaatcaaggttgtcgaatctgacgtgggttaccctatcagcatcttcggcaccgtgttagcgagagatcagtatgactataggtgtgtgtatttgttcaggcgtagcagggacgatccccagatcatcacctcaccggtttgtattcgattcgtcctccctcttactacactgccattcactactcaatagcatatttccttatttttatgagattagactgtttctgtcaatatgttctggttttaagttttaccgggatggaataatggaaaccatctacgtggtcaaaacaaccgtataaaagttcagggaggtgatgttatagaaccatgtaaaatttaggatcaaactcaatccgttttgtgagatatgaaattgagaaaccaggaaaaaataagtccttttcttgctgtttgcctgtttcatatctcacaaactagattgggtttttttcttgaacttttacatagttgcataatatcacctcacccacacatgagataattttcagtattattggaaatatcaaatgtttatcaagtggtttgcacgtctgcacatattttctcttgctttaacctgttataaacactgtaagaacaaatcggcttggctacataccaccaaaagattcatcaattcatctcagaaaatgcatttcactctgttatattctttttttcttgcacattagggtaccgtgtaaatgaacagttggtcctcaatgtactagtgagcaagtttgattcacacatacacttaatgttttatctcattttgtgaaaatagaaatgaggcatataatgtgattaacagggcatgatggaagttgacagtgctaaattatcaagtcttggatcttctaatgacattaactgaattctcataagttgcttatgattaaattgcatgatctagagaagtatatctttgtcatttaatcggtccatactgcccataaaatgcatgagttggctttcatttttgtttgatcttttagttagactatgtcttattttagtctaacaagcacacatacatgagagaccgaccaatttatagaaattgggttggtgtcagactcaccaccaccgaaggttttggtgagcaactgttttggttgtaaacacttaaatatcaaattgttggtatcttctcaagtttctgttgaacctgctcttgacatcatttgaatcacgctcgattantgagcttggttccttttatgtaattttgttatgttatttccgt

SEQ ID NO: 40319 - DNA, 885 bp, Oryza sativa
ctaggctccgtcgcagtacagcatctccaccaccgccaatcaccgaagcgcgccaccgctcatccgtgtccaccatcgatctttgccgccgctgcaagatgagatgatataagactgagggtaatctaaaaattctgaacgttcacaattgcattgggaattgcatccgaatatagaggattgattggcgtgagagagcgtacataccgtagcgggaacaccgatcctctccaactccggctgctcttcggggacgagccgccgccgccgccgccgagccagaggcggttagggtttggcaaagatgtcagatgggctattccgtctctctcggacaggccagattctctaaaggcataccctccttcctttcctgggcccgtttggcacgttacggctttctagttttggaggccgaataagttcacaataggtccctccatttatcgcattttcgtcctcaatccggaaaaccggatacaacacaattacaaaatcatgcaaacaatccagaaaaccagatacaacacatccttaacttacaaagccatgcaaatgagatccctcagtagtattgacccgggcttggctaatatggaacctacatagatcttttaacaaggttttcatcctatatagcattgacgtgacacttacgtgacaatttgatccagaaaaataaaaaaatcatgggcccacatattagttacacacacaaaacaataaaaacaatggtgaggcccatgtggcctcacatgtcatcctcgctactctctgcttctctctatcctctcttttccttgcaaggagaaggccagagcaagccaccagcggggtgggcgatgggcgggagcacagggcaacggcgagcgagctccttcgtcc

SEQ ID NO: 40320 - DNA, 641 bp, Oryza sativa
  unsure (1)..(641): unsure at all n locations
aggcaaacagcaagaaaaggacttattttttcctggtttctcaatttcatatctcacaaaacggattgagtttgatcctaaattttacatggttctataacatcacctccctgaacttttatacggttgttttgaccacgtagatggtttccattattccatcccggtaaaacttaaaaccagaacatattgacagaaacagtctaatctcataaaaataaggaaatatgctattgagtagtgaatggcagtgtagtaagagggaggacgaatcgaatacaaaccggtgaggtgatgatctggggatcgtccctgctacgcctgaacaaatacacacacctatagtcatactgatctctcgctaacacggtgccgaagatgctgatagggtaacccacgtcagattcgacaaccttgattgaaatgatattcatggaggtctccaaatggcgataatcagaggaagtgagcgagtgaatcggtggcccaagcccagccttagcttgtaaatcagagacatgagacttcaatcagacaaaagaatatgtatgggttttacacacttnaaataatccaatcaccaatgtgatgaatggatagagaggccgcatacgaatggttagtgnattagatcatattca

SEQ ID NO: 40321 - DNA, 519 bp, Oryza sativa
aattcatcctcgaaattgtgcaaagaataattaaaattcatgtgaaagcctccaacaattaaaatgtgcaaatctaaaagtcaaataaggcttggaggatttttgtatatttcctaaaagcctaaaatgcgtaaataaattttagtggaattttcagagcacaaataataattgaaaagaaatatacaaagtggaaaaggtttataaaaagaaaaaaaccctaaaagaagtcttctttccccccttcccttcttgggcgggttgggcccaatcctctctttccctttttctttttcttttcccccggggccaatgggttcttcccgggcgcgcgccgttaacaggggggcccgcccgccaccctcgttgacgggtggggcccacctgtaatcccccacctggggccgggcccgcggttggccgtgccctagcgcggccgccgtcgcgaatttcgccgccccccccggtccccgggcgcattaaagaggggggaattattccccacgattccctctcttt

SEQ ID NO: 40322 - DNA, 1153 bp, Oryza sativa
tgagatattttacaatgaccccgggtgtacatatttatacccatggggagatactagtcattgtaggacaagaaagaaacttttttaaagataaaaggaaaatataaagtccttataggacactaaacacactttcctaaagataaaaggaaactaacaaattattcctaattaatagataacttgctatgccgcatcattcttgaactcggtcacttttagataaatagatcaatttccttaaccgaatatagcaggaatccgactattggcgatgcgataattctcctaggggcttaccaaatttcaccgttaatagccgcaaccgccgcatgctggagctatgcgtggagcgccaccacggtggactggtcggcaagcgccttcgcctgccacgccaccgccttcgcccttagctgcacgacacactccaactcggtgccgtgccgcgtgacattcaaggcctccggctccttctccctcattcggcgtgcctccgctcctctcctgcgcgccacccatctccttgccggcctctccaccccgcctctttcgagaaccctcccccacctttgactcctacgacgaggatgcgcggtatggagtagaaggtggaggggacgaggagctcgctcgccgctgcccctctgctccgcccatcgcccaccccgctcgtcgcttgctctggccttctccttgcaaggaaaagagaggatagagagaagcagagagtagcgaggatgacatgtgaggccacatgggcctcaccattgtttttattgttttgtgtgtgtaactaatatgtgggcccatgatttttttatttttctggatcaaattgtcacgtaagtgtcacgtcaatgctatataggatgaaaaccttgttaaaagatctatgtaggttccatattagccaagcccgggtcaatactactgagggatctcatttgcatggctttgtaagttaaggatgtgttgtatctggttttctggattgtttgcatgattttgtaattgtgttgtatccggttttccggattgaggacgaaaatgcgataaatggagggacctattgtgaacttattcggcctccaaaactagaaacccgtaacgtgccaaacgggcccaggaaaggaaggagggtatgccttta

SEQ ID NO: 40323 - DNA, 1601 bp, Oryza sativa
ataccccttctcgtcaaatttcaaaaccatttattttattccctcaattaaatcctgatgtttcttttgagaggcactcaagtcgggttccactgagcgatttattttttcttaaaaagaatgtgtgcctcacatggacagaaaccggctagcgcctagcctctctttctctccgacctgtatgtaccattgaaaaagttcactttgactctcttttaacttgatcaaatctgattcatatccattaaccataaaactggatatgacgacttctctaactattgaaaccgtcaaaaacgatgggaggccacttcgctgttggcgctggtgcggaaagggctgggatgggagagagagagaggagaaccacttcaccgctccccgtcatcatcctgacaccctgttgcgcttacgccgagaagaagaaagagggagagagggggagagagagaagagggagagaggttactagagagaagggatgacaggtacaagaaaacaccatatttatatggacttagtgcttctttaatcatttgtatttagaattttttgttagttagtgtttattattatgtttatatatggtaaaatggtaaatttgaaattataaaggtgaaataaacatgttaaggagtcagctcgtgagccaagcctagttaggcttttagctcattaaggttaatgaggtgaggttgttactgttatagataagacatacctaatatttttatgttagacttagcaggacccaccgtatattaagtcttgtacagaatcaagcctcacacatgtaagatgttttaaataaggaaagagaagcagagtcctacttaggcatgtcaaggactactcggatcgtacttggcaccctagttatgattggacaaggggactcctaatgatataaatacaaaacgccacaggtgaagaggagagatgtgaagacatgccaatacagatttagacaattcaaggaaagcttagacaaacctaatatggagtcatagaggtccacgagagggatctaggcgacctccaatctcaccaagttcatattcgaggaagcgtactatactagctgtcgaccacatgtgagagctctatgccgctaagctgaccaagactagattagattatcccaaatttagtactcgtgtgatactgatatatataaaggcaacactgacttcagccaataggaatagggctattaggggacccgaacctatataaaaacttgtccatatcggacacgacttaaactttacaaaaataaacacaccagcccattacgaactctaacatagatttctaaaactcataaaagaaaactgactcttatcctaattaatagatacgattgtctaaaacaaactccttgtttggcaatatctttaaatccttgatccgagctcgacttatagtcggaaactgtctgtatctgctatcttttccatatcggctaaccgagtctaattttgtatcgatcgatacggctctcagccgatgcgctgcattggccttggaaaccaaattaactccttcaaatccgctgttaacaggaggctgcgcgaggagatgggaggtgcgcagagagg

SEQ ID NO: 40324 - DNA, 712 bp, Oryza sativa
  unsure (1)..(712): unsure at all n locations
aatggttaggatgaagcctggtatatatctgaccgggaccaacgtgccatctccaggagctaacacgccggctccggctagggacgagtgcttggaggctctcatcctgatgggatggggcgggctgtgcgtcaaaccgcctgtcgccacctaacccacgatctgatcggtctgtgactggtcacagaccggataaacgagcgcgctgcattgcgttacatgcggcgtgacgcgctcgtccaaaccgcaataaatgtggttaggtgagccctgctatgctcacctaccccgtatacgcggcgcaaaacccacaaggggtcggggcgcctcggccctcggggccgagacgggagcggtccgacccctcggggagacaaagagaagggcggccgtatcaccctcgggtccgacccccccccccgagggggttaggccacgtgggtgatcgtgtctgcctcaagtctctaagtcatgatactcccggtcccatgtcaccgacagaatatatatcaaatcagtaattaaatatattttcataataaatttgtcttgggttgaaaatattattacttttttttataaatttggtcaaataaacttaaaacagtttgactttaacctaagtcaaaacatcctataacttgaaacggagggagtagggtaccgagctcgaattcgccctatagtagtagtagatctacccngaccatct

SEQ ID NO: 40325 - DNA, 881 bp, Oryza sativa
agaaaaaaaataaagatcatgaagctttttttaaaaaaattatcattctacctccttaatcttttcctttcccttgtccttcttcggtggaggcatttttgcgtaccagcaagtaggactgaaaacggggcgggtattttccgaccgcccgcccggccacattatttcgggtcaaattcgggtcgggaatttgggtacccggacccttacacggatacagggttcgaatacgggtaattttttgcggatatgagatcgggttcgggagagcggtatccgacggatacggattatccgggaaattatgcgggtattacccgataatctatccgtatattactcggatagatggacaacagcccaacaagcaagcgcccaacaggccaacacaacaggcaacagccagcccacatccaaaaggcccaccaaacaaagtgccaagcacaaaccctagccttcacttcacagttcagatcagtacagcattgagtctgaagctatcaagcaatgaatgtctacttttgctactactttggtacagttttgctgataggcattatgatgccataagcccctaatatattcataatagacatataggaaatggctgaatggctattgtctatgtggtatatttggttgttgctttgacttgatatttgaataaatattcgtaaccgatagagttcgtatccgtcttggtacgtattcgttccgtatttatgcccgatattatccgtgcttctattcgtatccgataatatcggtgcccgacccgattccgattataaaatgtgggttaggatatgggaaggatgagctccccccgaacccgacccgatttcacccctaccagcaagggatcgatcggaaggggtttg

SEQ ID NO: 40326 - DNA, 1504 bp, Oryza sativa
  unsure (1)..(1504): unsure at all n locations
tccttatgctgtgcaagctacccttgctgtcaatttcttggaggggctgtcaaatttcaccggtacagtaagtgcttggactactgggaatgttgaaaatgagatcatcttatatgacagtagagtggaagggacagagacaactgttaggaatgatggacgtgttacattaactcgtaatatagtagctgtcgtgtgtaaacacaagctggtgctcaaagtttgtgtgtttgagggtggcagtgaagttgcatgttttaagtttgttctagggcatcgtaatgaagaatgtactcggaagaaaggcccttatgtgctgcaagtgaaggttaggtggattggaatcatagaacactacaatcggaaaatgtgggagcgtattgggagatttggaaatattttatggtgatagtatgtgaaactctgggtgaattatatgtggcgcatacatctctagcgaagtatctttgttataggctgtaaaatggggcatgttttcccgaatttccacgaaacttgtttgtttattgcttaatgtgttggcagtcctgtgtgtaatgaacatggatcgatctagtgttcgtacactgaaatatatattattggtgttaacttttgtgccgttgaaattgtactccacttggtaatttctgtttgcctgtaagctcatatctggctattctttttcctgccattgcaatatgcaacacaagggtgtaaggctgtgttgtaatgtagaagattaaaagtttagaggctgttgtaacaagtattgcatcactgtattaattgtttgtaagagaaacattcaaacccaacacatgtacctactacatcaaatacattgataactggcattaccacatcagcatgtttgcttttgcgattaccctgtgcagagatggttgtatgttgcttggcaacattatcgaccacaacgtgttttttcggcaattgtttgcttggaaggacgcatccaatttagacaaaaaaccaggaataagcgggtgttcctcatcatcgtcttcggtttaannnnnnnnnnnnnnnnnnnncngcgccgggggtttcttntttgttgtttcctccttcttccgttttctgccgtgtggnnnttctatnttggnggtgtcccgnttggggcnncccccttgcttttgctcttgcttgcttttgccgcccgnggtgcattnccnttccggccttttgtcttgnnnccggttgggtcgccccggttttttcccttcccccgtcctcttttnccctctcggggttctttccggtcccggnnnttgccgccttcggtggggctcctctggngtcgccctgccggcctccnngcttgngtttnntntngtgtcncntggntggtcgcagtgcaacacaaancccctggggggggggggngnngaaatctttcttttgtagacgaccccgcgcagcagccgagngctctcgtggttagatctcatatgtcgcttctcgacatatccgcggtcatcct

SEQ ID NO: 40327 - DNA, 1856 bp, Oryza sativa
  unsure (1)..(1856): unsure at all n locations
gtgtcccgttgagtaattgatactctagtcgaanncgagctcggtaccctctcctcctcctccttcagagcagccatatcactttgattggcatcatccttagcacacggttcatcagaatcatccccattcttgtcaatgccaaatatactagcgtgttctccggcctggcagccagccatagctgcaaaacaagcaaagttttggttttgatgtttcccatccaacaaacaaaaaaaaaatactgcctccgtctcatattataagactttctagcattacccatattcatatagatattaatgaatctaaacacatacatatatttagattcattaacatatatatgaatgaatgaatacaatgctagaaagtcttataatataaaacggaggaagtaccaattaagagggatatactgactgatgcaaacgagtgaacaaagcagaacagatgtacatgaatgatgaatgatcgatcgattagttgtggattatatatacactcacatgagtaatctttctccgagtctatgaggctgcaatcacgctcggcaggaatatcaagaactgtcaacgccgccttctcttcccatgtgatctcccgcttacgcttgcctgcaacaattgcaagattcagtccgccgccgccgacgtcgtcgattaccataccgcccctctcgctttcgtccgccatcttgacgctcatgcagaagaagaacacggaaagaaagggacacaggtgagattaggtgcccatacaatgcgatttcgtcgaatcggaagagagaatcgaggcgatcgaggagtgtaccgtagacgtgttcgctggcagccctgatcgccccgtcgccgccggaggggagagagccttagggttttctctttctgtttccccgattatgaagaggctagggtttgtttggtgaggacgaacggcttgtttggcaacttgagggaagggaattgggagtttacaccaaggaattaatggtgagattaagatgggaatttgatttttcatcccagtctcttgtttggtagaggtggtggaaattgatagggagtttagttggtgattagatcattaatgaaaatggatggctgagatttgtttagacgaagtaaaggaggaattccctcctaattacctgcccctacccaggtattgaaaaggagggaattcattcctcaattccccatccccatccccatcccaccaaaattcccatgtcccccaaccaaacaaaacagttaatagactcatccctctaaactcctaatccctcctaaaaactctctccaaccaaacagaccggaagagtaggttacctgatgggcctttttctttggaaaagacttaacctgatgggcctatataaagaaaacccctttcaccgcagcggcggcgatcgatcgacttctcggttgcggcgtgctagggttcgaggagatcgcactcgcaccacgtacggtacgctcgcctcctcgatcgatcccctcttcctcttggtatgcgatgcataaaagaacaaatctaaatattgcaatttttgcttctcttctgaatttatagctgtggcgatgacagcattggcaagatgggtgaactaaccaagaaggtcaccatggagaagaaggaggagcatggaggtggtatggctgctgggaaggaggagaagcagcagccaactctgaaaaagcagcagcaggtgggaaaggtgaagaagaagttcctggattttgcacaggagttgacatgggaggagaaggtggtgagcgttcttgacatcgttcgccgctatcagttagctgaatacgaccccaagttaaaagaatttacccctacccgggtca

SEQ ID NO: 40328 - DNA, 761 bp, Oryza sativa
gtgcgcccatgtgtgactatcgtctagggcgaattcgaactcggtaccctgattttccttcgtccattcttgttgctggagttggtggagcggacggaaatggagataatgggactggaaagttgcttgcaatcatatgattgatctacttatttcttatcagagctaaaattgaaccgcttgactaggtcttgctcactgccttagatgttacaacaaatactgataaccttatatttcccagattggaaagattgaggagggaatgactaccaatatgcgagtcatgaacagtgtatgatttttcttatttgcacagtagtatttcatcagtatatcatgttccatgacccatcgcagcatgaataaagcatttgcaagtctgtctctcctcatctgaacaaatcaggaatatagtttatttttttctagggaatgggttggagctctgccatttcactgatagaagaaagcaggaatgtagtttatgcatttatatgtatatgttgaagacgtattattatatccttgctgacattgttggattttgtcaaaatagatacatgcatctcatgttagagaaggaaaaaaaaaaggacaacagttagacagctgtttcttgaaacctcctcttaggacaagaaaaaaaaatgttatgctgtttgttgttaatgaaaaaaaaaactttatgcttaagatttcaactaattgagcgggtttcacattttttttgtaaagattctgactgaggcagcaactgg

SEQ ID NO: 40329 - DNA, 650 bp, Oryza sativa
ccgtattaattaagctcacatatatcacactaaaaaattgtcaaaaaataaatcagtatatcttgtaaaaattgtaaagctatagatcaatatatgatatatatctttttcacaaatatacaagttaaaattcaatctatataagtagaaacaaaaatatcacatttgtgaactacacattctatttatagttaaatttgtcaattttttctacttgtataagttgaatttgaacatgtatgtttgtgaagtaacatatcacatattaatctatcttactccctccgtcctataatataaaaaggtttagggttgtacacggttattaagaaagtaggtagaagaaagtggtggaggattgtgactggataagtagtggagatatgtggaaaaagcgaatggtggagggttgtgattgattgggaataaaagttgttatattttgggacaaatcctgagggctaaaagttgttatatttttggacggagggagtactatattttataaaatatttttgatgacttttaagtgatataaaaaatagtaaatttcacaaaactagagttattttgatcaaactatcgcaaaactacagttttaagacgtatcacaaaacaacagatttagcaccatatttgtcacaaaacaa

SEQ ID NO: 40330 - DNA, 817 bp, Oryza sativa
catgatccgattgcaccattaaattcgttgtaattaaatctttaaagcaagaccacacatggatatattccgacggaattttttttagcttattattgaattatttttaaatgttgcacgatgttccactaattatatcggaattgtttcactatttagatcgaaaatatttcaatcgtttgaatcggacattgtttcaccttatataaaaacaatgtttcagcaagtagcgaaagaatgtttcagttcactgcaacatttgatactataagtacactaggtgaaacatttttcgtggaacaaaaaatgaaacgaattcccttaatagaaggtttccaaaatattgttgatgtgaaaacacgaggcctggaagatctgcttaacttcagtgcaggtccaaaaatcttgcgtttaggtttgtgagcgtgccagttgatttgatcctgcagtcaacaagaaataaagacaaagaaactacggttaaattcataaatgatagccgatcgaccagtcgccgatgacgtatgatttatctttgagccgatatcgtatttgattcgatcggcaatcataaataggcaagaaagaactaaatctattcgatcggctgtaggtatcaacggaatataatccctacgtcgatatatacttaaatcaagcgattgggatagatcggtcatcacgccgagacagtataaatcacttagatcgaaatatatactaaggaaaggactataagcattcataacatagctgatcagatagatctagcatgaatcggctaatactccgataccactatattaagatattaaag

SEQ ID NO: 40331 - DNA, 708 bp, Oryza sativa
cgcagagatagtgcctaaaacccatcgctgcaagagcggaaagcgaatggattctgagatggtcacgaccggcagactcaatgggcctgacccaagttcttccttcaggcgcttctgtctgaccaactcttctgccatgagtagggattggtgacaattcttgaatgcccttctgcctacttcaatgttatggccacctacatcattataacttgtgctaatattgttcatattaaataccccttccttctccttcttggagtagtgcagttgagaacgcggaggcagactctcttcagcgtcgctcatcctataccattttcctgtcacagtaagaagacaacatagtacattataattggggaacacatgcatgctggtatctactagtagaagctaagataataaccaccgacttgtgagctagttaaactggtggtacaggatgcagaggaatattcacagtacacattgggcaggtatgtgcaccctcattgggcaggtatgtgcacccttctaactgatgctaatatgctaccaccaaccaattaaaagcaagtctggattttggaaaagaaaatacatgcatgtcagactgtttttatcctaatgcaataaaacaacagcagaaaaaggcaactactagaagtgcatgttttgtagtctagttaagcagttgttgataatataatcatcggtaatattgtg

SEQ ID NO: 40332 - DNA, 631 bp, Oryza sativa
tgcttcgatatatatttttctagaaaatcatgtaagttagcatgcgagtttttttaagatatttcttatactgactccttctatattttcaaaagcggacgaacttaaaacccgactcaaatactgatctgtatttccaaaagtaaacgaactgtattttccaatatggttaaaaacctattcatacacggataacgtaccaaaatatcggtaaaaacatctttaatttttataatagtagagactagattcatagaaaggaaggctacatacagtggcggagggcagctaggtagcgtctgtaccccaaaagtggtttttacacaataccaaacatataattttaatactacaaaaataaaaacaattcaaacacaaacaagaaagctgttcaagaaagttagaaactcatttgtattattagattttaacttccacaaatctataccatacaaattaaactagtttgataatttattgataaatatcattatttttctaatcatcccatctaattcagagtctgaaccacatgacgaaaattaatcctggctccgctaccagctacgtagccacttatgtcttttcctcacagagatcaagtccttgaaaccaatatatcaagtagtaa

SEQ ID NO: 40333 - DNA, 1210 bp, Oryza sativa
cctaggtggaaatggtggtggatgaccaggagaagatgaatgagaagaatgaggttgcccttcgtcttaaagggaaaggtggtcccatagaggatgttgaaaaggtcagttctcatgggcctgttatcggtgcctagtatcgtggttatatcaaatctgctttgtagttaagtcctttcaacttgtctcaagggtgtaaatgtctaggattcctgtatggtgcaaatactctataggcgcacgcttagagcccatcaagcccatcatcctgggaggtagaggagtctgatttctcttctcgttccttggttcactcgtcccatcatcttttgtttgttctagatcaacaggattggcagagcctcttgccttcacccatcgatctgtgcatgtgtccgaccataacccttgtccccatcaccgtctccattcctagctgccctccatctcctatctccctctccatccctagctgaactcctctggctatgttgcatccccatgtcctagcttctcaaacctagccaccaggggtagtgatatgcccgcaagccacccccactgccacatgccgcataggagcagtagctggcaccaacgatgtggtcgtagctgcggccgtgatcgagaagacgttgacctttaggaagaaaatgagggattttgagtatgacatgaaagtttttggatttttcatttgaaaactttgtggtttttgaatggaagtttttatttgaattgaaagtttttgcaatttttccgatgaaagattcatatacgaatgaaagttttatgatttttagataaatgttttcatatgtttcaaatgaaagttttgtgatttttgagatggaagtttgaggcaaatcgaaagttttgaatacatggcgatccttgagtcaaaggctggctccttggtgctagcacaagatgcctcatgaaagaaaaatcaaaaccatcactgtgagcacgaccttgtgcgacttgcatcgttagcacaaatgcgctatctagaaacccccgtatatgtcttctacaaggtgattgaaaataatacttgactttgatagtgtcagggtaatgtataaggtataccttcataaacgaaggtttatggtaatatacagataccatataagggaaggtgactttgtaataaaggaaattatctccccgaatagaaagtgtcagagtccaacttagaggggca

SEQ ID NO: 40334 - DNA, 524 bp, Oryza sativa
ctgcgtggattttttgagcgctcgtaccttttcgcatgctaacatctttacatctcacctatgataattcgttcatcttttttcgtaagcgaacctcttatggctccgactgtaaaattcgaccaagcgggactaaatcatgggggcctttggctatttttgtaagcagtaaccagagggtatttttttactccatatagaaataaaagcctggtattggtaataaccatttttctagtagtggaagctgttgctcactgttgctgtctaggcccgccgatgctgctgaatcagtgtggcactctggctgggtagtggagggaaagtatgcagctttctagctgtggttgacaatgatggtgccatgacgcctgggagtgggagggagcggacgaggagagtccaagggactggatttaaccatagctggttgggctggccgtttttttagtgtctcctgaattgtatagccgtctttggtaaaagaactgcgtgtgaaaatacggttattttctttggtaaaa

SEQ ID NO: 40335 - DNA, 637 bp, Oryza sativa
cccctcaaatatgagtcaaaagtgtatctctatctccattgctctcccatatggtgtcttcccctgctttgttttcttgggagtataagatcgataagatatagaaggatgagatatatggcacaaaattaaaatgatatctgaagcatgcagagaaatatggagcctttaaaaaaagtattatctttcttcagatttagggagttaaaaatagggagatcgatgaagataccttataggataacaaaaagcccgtcaacgccggacatacaggagagaagagtcttgaagtcttaacaaggtgatagtgatttgcgcacaacttgcttgagagagtaggtaaacaacctagtcagtcaatgcccccctcatcaaggcccaattgtcagcagtacggtctccactatacatcagtacgaaaatgagtaaacctcgccaaaaactatcaaaactaggtaaaagaataatctctctttcacctatttaatagcgattttgacccatatctatgataattacactttttctagagagtaaggaacagaggagaaaaaatggacccacatagccaatggcagattggagagctatggctcagataggaaagattgatccttgttgtcgaaaggggtaccga

SEQ ID NO: 40336 - DNA, 650 bp, Oryza sativa
tggtgccttaagttgattggcttttgatttcttggagtttttgttaaagcattaattctccggactttggcagacttgactctttctttctacttcctccgttcccaatgtaagaattcctagcattattcaaattcatagagatactaatgaatctagacacatataaaaaagatatacatcaatcaaaaaacatatacatcaatcaacacataaatctaggtaagacaaaaggtcttacaatatgaaacggagggagtactgcatatggcaaatggtgttactctatgtcacaaagtcgagcaatgcatgtgagacaataattttttttaggtttttacacaggagggatgagattgttcgcgtggtcctaggataggaacgatgttaccaggacaagtaacgtggtatatgtcacaaagccaagtccaaccgaatcgcgacccagttatgcacccaatgtctctttgacactacttagcaagaatccgccctagactgctaccgcctactcgagaccgttgtcgtgcagatctcctctatcttctgcttggatctatgaaaggagaagtatagagtggagagagataagaaaaaggtgagaaaaatcatgggacttatgttgcccccggtttcatggttgacgaatc

SEQ ID NO: 40337 - DNA, 512 bp, Oryza sativa
accagaaagagaataggactcggctcgtcatacaaaacgaaatcgtggcgcaaagaggtcggcggatacaatgaaccgcagacagggagagtgaactgggaatgattcacaaccaaaggaggaaaaagaaagaattattaattacttttccaattaaattaatcactgaatgatctttcatttattaaaaatgcttccaatgctcaaataattctgggaaaaatctagaaaatacttggacattaaaaatatttaatacaattttatctatatcaacttaatgttcaaaattttcatagattttattcacacacttgctttaatcattaaataatttctaaaaattcctttttcacaacgatttataatttagcgatttttatggtgtgacaatctcacatagagagttaggagttccaatggacaaagatgaagtagaagacgagagcattccagactgggctcaatatggtggatttgatgaaaatacaaaaggaaggtggacagggctg

SEQ ID NO: 40338 - DNA, 870 bp, Oryza sativa
cctgactagcagataagggagctcttccttcctcaccagagcaatagtggcagggacatagagtatgctctaggccttattccaaatggaggtggtccatctcctcctgtcatcggctataatgcccccgagacttcaactcttcttcaagggctcatcagagaaccagccgatgctagtaaaaagagaagaaccagattatcggctgttgatacatcggctcctgctccaaagaaggccaaattaaagaagcctaaaccaaccgatgatctgcctgccctagatccatccatttaacaagctctggatgaagaagaaatcggcgaggatgttgatcaagccacagatgaaataagcaatactgaaataactccatcgacttcacctaagctaactcctccgaccccctctgctccagcttacttctctaggttaaatatctttccttgattctctttttataactattcgtcctcacccgatttctcactaatcttttccttgcaaaaaaagagaattgctgtgaagaagaaatcggcatcaacaactctaaaaccggctccaccaataagatatctttaatgctttcactagttgatctcaggagaatttgtctaacacttgtctcttttacagcctcctcttcttcgttcttgtcctgtacaacaatcatcgagtgaccaaactccatcgcccgtagagagccatcatattgaagaagaagaacaaccaactgcttctgctatcacagtaagtttccttttgacacaagaatttagatcggccatgtctatttagctctaactccctttaaataattattgcaggtcttagccaatcttttctcttttgacataagggactatcttg

SEQ ID NO: 40339 - DNA, 678 bp, Oryza sativa
  unsure (1)..(678): unsure at all n locations
catctttccaaccgcgagctctcaaacctctgcgatcaaactgttgaactacgaaactaattttgatttttgacaaaatttgagcaaattttgtcaaaataaaaaaaaatgcacacttgagaacaaagagagcacttaaaacacttgagagcacaagatgaggagtgtgggatgaggagaaatggctggggttcatgccctatttatagggcgaaatttgagattttttggaattttttcgaaatttttatgaattttttagcctcccaacggttattttcaaatttgaacggtcaaatagccgttagtgccacgtggcgccttcccattcgaccgcncgccgccctgtccgcgcctgacgggccgccggcgtgccgtgccgtgccgtgccgcgggccgtgccgtgccggcccgctacagtagccgtgccgtgccgtgccggcccgcgggctcggccaccggcccaagcacggcacggctactcgtgccgtgccggcacggcccgttactgtagcaggccgtgccgggccgtgcctgctacaggttcgcccgtgctccgggccgcccgtttggcccggcccattttgccacctctatgcatgggtcactatcgctgaaccattgcatgcgctggtcggtatcaccgtcaccaccttcttttgcttctaatcccgccat

SEQ ID NO: 40340 - DNA, 590 bp, Oryza sativa
aattctagctcggtaccccacctacggtgcatgtctcgtggcattactccacatattttttttcgtggcaccccaaacgctcccacatatttggtccgcagtcgcagcggtgggagcagaatcttggactgccgtgagacggcgatgaggcgtaggccagaagaagcaagactccggtgggctcgtccaacatcagcaggagcttgccgttgttgatgcagtccaagcaatgcttcccctgcatctccctgaaatgcttttccatctaagcttcggtcggacatgtggacaaaagtttgtgcttgactatggtgtccatggcctgcatcagccaaagcctagtgccaaaagccgcggcagcgatcactcttcacctggggcttcctagtgggcgcgcaagcgccagctgctcaactcgcgctgcgcaatccccacccccgtaatcagcattaattaccataatcagtactattatttaaaaaatacataatgagtatgtaaaaatcaacacagaaaaggatatgataacgaaacatgtaaacattttcgatatctatgaaacatattatttgagcaatgataccctatag

SEQ ID NO: 40341 - DNA, 4085 bp, Oryza sativa
tgtaaaagcattaatcatgaaacaatcacggatatccaaacaaacaacccgaaaccgaaaccgacacagagtcggccggtcagaccgcgggctgcgccggtctaaccgcgcgatacacgccggtctgaccggacccaaatccagcactacctgtagattcacctgtgaaatccaattatctccaaaaccacttcgtaaataaattccaaatatcaaaaccaataatctctaatgccaattgtttatcacagaataataatcaaaaacacctttgattttacagttgtttcttgaatagtagtggcaggctatcagcgaccatggggcaaattttctgccaagatcagtgatataagccgtcgcaacatcaatgcattgctccatatggatgaaaagctaatgaactcattgatgcttgcttctcggtcacatggtgcagtgccaacaaaaactggatgattgtacgcgagaatgattggagttttggatgcatctttcttttttatgtttgtttgtaaaactgaagtgctcaatacggccatgtttttgtagcgcgaaccaaatgccatggccaggtgccaggcgttcatcattgtgatggcgacgagcagcaacacttgccggtgctttggtgtttgatccggactgataggatcagagattaactccctcatcgatgaaattaattaccctttataaatgatggttaggctcttaactaacactttatctgggtctctcattttctttaaaatctgtgcagtgttttttctttgaagagcagcgcaaccattctaacatatactccctccgtcccacaatataagagattttgagtttttgcttgcaattcgtcttattcaaatcctttttgcaaatataaaaaacgaaaagttgtgcttaaagtactgtagataataatgtaagtcacaaataaaataaataataattttaaaaatttttgaataagacgagtagtcaaactttacaagcaaaaactcaaaatcccttatattatgggatggagggagtatattaataacatgcatcatgcaaggtttcggatcagtcatcacattgggcaacaatttaccaccttgaaattaatttcacacttagaacgtcctatctgataggcaactatatatgtgtcttatcctacaaggctatcgtttactacaccaaatactgcatcatggccttctgcatcagcatgcaaaatgcacagcaaacaaactcaagcattattacgtacctagaacctcaagatggtagaatagaagatcgatctaatctgtttttctgttttgagagataatgtttgcaacccactacagaaaactatacattgatttaactctaattataaccaacagcagaagaaatgcgtcaaaaagcatatattgactctacaggtgctgccactcccttataaatcgagtatagcaagcttgtaatgaatcaataaaatttcgctccaagtatttacagtgccggtaagaatttgcttacagtatctatgcttgctccttagtccttagcaatgttatctcacaagtagtataccttggctagtacatatatcttaatgtttcctcaaagataattgatatacctttttatatatatgttaaacttatccgttgtccatgaaagatctatatagcacaagtagtcgatattctgaagacgcataaactttgtgattgcacgaattaattaatctcactgtgaatgcgtaggttgaaaaaaaaagatctccaagatatcaagcaatgaagcttgtggtgtgtgcaatgctcatgctcgtgatcatcagctcttgcactgctgcaacgtccaaggagaagaaaggtgcagaaatgaatcaactgaaggacgccgtcgatcaggcactggccaaagctggtcaggtgaactatgcacactcaacaaatactgataataatggaaaaagaactccctgcccactcccttgctaagctgtatactgcaccgccatgaaagaatgccttggctatacaaaatccggatatagatatgtatcgtaatactgatcgacgtaatggtatcatgcatcagccctgatcatgatgtttatgtatgtgatggaagatataactaaataaaaaaggatgtaaaacaaggtcctgtctttctataccgagaagcatttctaagtgtgttcagcaattaatggggtcaagttaattatctgagcaatgatcttgggatgtaatatttaatttcgtggtgcttggatttcatatcagcgagatcctcctgtatattatttacattgaaggtgtcatgttctatgtggacaccatgttgtcagggtgattagcaggcagaaacttttgtaaattcgtaattatttattcaaattttgcaatgaaaataaatattatggatgcttgaacctacaacaatgaaataaattgttaccagcaaagccatgcatacacccttgcatcctttcaagttttaatatgtttaattaatttcagcatgcaatatatgttggtctctgccatctctacacgtccgtgagaaaattgcaatatttggactgcaaacattggtcagacaatagattcacatagacatgactatatatgtacaaacaacaccacatacacccgtgaatgcgcttagtatatatgttcaaacaaacagaatccagcagcaatctctaacctcaataaaaccctgttaaaaatgcacctgcatttgcgtagtattcatgagtagatttaaaccctaattgattgaatcatacaatcacgactctattaatattccagtagaggagcgttaccaattgttctaggattccactacatttacaaaggcactataataatttcattttacttgtatctttaaaatctgttggttcactttttcctcgttcaatgagcgttgccttgtaagaggggcaactttttaaatctcccatttcctttctcctctacctccatctcctccatgatctatgtgccttaattcttagagctagaaattcaggtcttattgcacctgcaataagggtgctgctattctctagtttgggcataggcacatttgcaatgggtcgaatgattggctgtctggtcctggggatcaggtgtttcggcttttcggtcttgcgcagccgcactgaacagtgagggaggggcagggtggaaacggtagaggtaattaccggccgaccgggctaccgctaccgaatttgactgatcggacgctccggaaacagtaaatgtcagaaacagaaacggtaaaaaaatacggaaatgatatcggaaatggtttggtaatttacggaccgttttgtgaggttacactacaccagatcctcacatctctgacgggatacctgtgacgggcaaacgaaatggtcactgatgaccgtcacctctgacgggtcatacgggatgccgtcatcggtgaggcatccggctacgacccgtcataggtaactagtcacctgtgacgggttgaaaatagaacccgtcacaggtaaggttacctcacctcaaacgggtttaagtcctaatccgtcacaggtgattagtacctgtgacgggtcacaaccggatagcccgttagaggtgaggtttactcacctcaaacggctttaagtccggcccgtttgagatgacttctgccactgtatatatatgtctcctctcccagcggggcccacatgaggagataaggccggccggctccctcttctccacttctcctctatctcttccacttcttctctatctctcctctctttctctgtgccgtggcgaggggaggcgcggcggcgccgggccggctggggcggcggcggcccggccgccggatccggcaggggcaggaggggaggcgcggcggtggcccagccggcagatctggcaggggcgggaggggaggtgcgtcgccgagccggcgggggcagcggcggtggcccggccgccagatccggcaggggcgggaggggaggcgcggtggtggtctggctaccagatccggcaagggcgaggggaggggcagtggcggacgacggatctggagccgtggcgcgg

SEQ ID NO: 40342 - DNA, 3878 bp, Oryza sativa
tccctcccgcccctgcaggatgcgggagatctccagcggatcttcttcgtccctgaggatcggtggtggttgccggtggtcgcctcgaggtggtgggtgccagatctggtctgcaggtggttcgggatcaccggatctggaacccccgggctcctaccactgcctccttcaccgtccgagctccttcaccggtcgcctccccccgtaaccttcttgacgccagatgcgccgcctccatccacgtacgagctcagatccattgccagcaagtcctctttcacccatgtattttgtcttgtgttgtttatattgttccaattgttgctactgtgattgatgattctgagtcctatggtgattgagattcttgtgattttgttttttgattgggacaactgcgatggaacaaagaagaattgtgatgaattttttgatttgtgaatgccaaatgcaatcggacgaaatgaatgtgatggtaacctaggaggatggtgtttctcttcttttttccccctttttttcacaccagtgacggtcccaattagttgggccgtttgaagtgactctcacctgtgacgggttttggttgggaccagtcagaggtgactctcacctgtgacgggttttagttgggggccgtttgaggtggctcttacttctgataggtcttcactcgtcacaggtgactcaagtcatcagtgatcactaatctctgaccgggagctaaacccgtcaaagttgagggtttgagcccgtcagtgctgacctgatccagtgtagtgttaccgtattatcccggtaattaccgtttatatattccggtaaattaccgtttttacaaacatcactggccggctggcccaagttatttttctttggcccattttctcggcccaacaaaaaccgtaaatccctaaccctagagctgcttggctgctctacccaatcccccagtcaacctgtcctaagtcgcaaccagcgtcgtcgtactcttacgcggtggcacggcggcgccagcacagtgacagctctggtccgttccccagcgatgattgcgctagccggctaagcttcctcacgacgtcgcctcctattgcggccgcccccaccacctcacggcagcaatgccctctagcatgccgtccgggagcttgccggccggctcagcaaatattgtagccggtgatgatacagttgtcgaagaaaatgatgaccatgatgagttgcatccggtccaacaatgttgctgttgctctgtggagtataagagaacttgctatgtgcctgtgtttatgtatctcgtattattatgctttatctttatgaacttggggaataattaccgtcagatttatagttatcgtcgaatacgatacatttataattatcgtcaaatatttataaccattctagattgctagctaaatatgtgttgttaattatcgacttccgatcgataccgatatatttccgattgaataattctattttagatttactgatatttccgatatcgtttccgttaccgggttatcgttatcgattccgtttccgaaaaataatatggttgcggtaatggtttagggtgtttcctgatcgtttccaacctttttcatccctagcgtttccaacctttttcacccctagggaggggtacaaggatttctctgcttttacaattatagatacatggattattctatgcacagtttactctaacataataaacggtatgtttttttcccaaaaacattcatattgatattttctagagaaatccattcgacttcatattatttagatctcgttcgtttgtgcccttaaacgttacttgataacatccgaagaccctactagttatcgatcgttgtctttaatttgcacacatgtaccatcctcaacctcgtgctggacaacagcagcatcccatccagcatgcagtctaagatagggttcaatattttagttttaaatttcggaaacttttcccagcagaaaactgatttcagggtccggacataaaattatttcttccgactatttcgtttcttttatgaatttaacaaaatttattcaaatggcacaatgccatcttgaccttgtctggacaggttgtggccttttaatttccagctcttctcgaaagctatacctgggtagcttccaaccttcatcacagcagacatcatatcttcatgggaggtcaatttttatcaagaaaattgtccattttactccgaaatttttcacaggagtacttaaccccctaaataatttctcagcttattttacacccgaatttttataaatggtttactttactccctaacgatatttttttccttttcatttctctctatattgatcatgttttcaaatttgggagattagtgtatgcattataattatctcttcattatttttttggaattttttaaacgttgtttacattgtttggaagcactgagatcaatttaaacatcaaggttttaaattttaagcaaatagtcatgaaaaattttgaaaagattttagaactttgataattctgtcactatggctcttcaaaatttaagattaaaatacgactcatataaagagaacaattttaatagtttacaaggtaaaaggagtcgaaaaaatagtttaagagttaagtgatccaatgaaatagtttaggagagtacattggattttcttaattccttttatcattgaacgatagaaatctggcctttatgtctgcatgtggatatatataaaaccaaaaccaaaacctgcagtgagcttactactccctaatctcgtcaatcaaatttaatttccatgacctgcattcacaattttttgttaggatttaatctttctattctccattttgttatcactgcaatactcaaaacttaatggttgagaaaatatctcaaataccaacacttagtcatttttgggcatccaaattaatcacttcacatggttgtagttcaacggtcttacaaattctatgataccacttattataacggatacagaaggtttgatggttttgataacctttttataatcatctgtgacgaagtagtatttacttaaaaggttcaaattggaaccatgaagaactgatgaatgactggatagaacctagaaggaacgcagagggagtaatttagtacaccatattacttctcagttttttcaaaaagatgataatccctccttttttaagtatatggtattgctaacttttatacataagtttggccatttgtcttacaaagaaaatttacataattattatttgttttgtcattacaggtagtctatctataagcatcacttatattttttcatatttgcacaaaacctttgaataacataaataataaaaacgtatgtccaaaatttagcggcgacaaatatgttaaaaatggagggagtattacctcccaagtcacaacttatgcaattacttttttaattaaactgatagcatactgatcaatccaatgtcctaaaacgtatactgcaaaacgtaataatttgatgaggtgttgcttcttcatcatcttgcacatgcacagtaccctatcacctaatttgctctttagcccatcaaatgtaggtagagaaatactccatccactaattttccgtcatttctgcagtttgtccacttgatattgtcgatcgtgcatgatcttttttccaatgagtagtgattacaatgccatgaacagcatcgcatactccaggcattgcctagaatacagcattgttaacctcctataaatatcataaaaatatcctgagtaatatacaaattaagacttggcgatatatatgcacttcaaattcgtaggtgtgtgattcttacatag

SEQ ID NO: 40343 - DNA, 582 bp, Oryza sativa
attccatggcatggcagaaggccctcctgggctcctgttgatggtcgttaagtaccgattttgaccgtcaactaccaaaataaataatatttcttacacgtatattagtaataaataatgttgttccacttgtattagagaaatattatgcatgtagagattatacactaaagtgaagggaaaatgagccggcatgcaacaaaagcacaccaccgacgaatcacatgcgagcacacgaattgatcggcccacaagtcagctcgaaccgactaaaaatgaggccaatgaatcctcaaatgccttaggggcccacatggtagtccctggtgatggtcggtggcgagaaatggggcctaggggtcagccgaacccttggttcggccaaaccaagcatggcccctctcatcgccaccttacacatggacgctcctaatggactccaaatgacgactaccagcgcattgactttagtaaccaccatataactgtcactacaagtctataaatagatgatgccttctcacttcacaacacaaacctcaaggagcaattctcttattccatatattgtattctctctag

SEQ ID NO: 40344 - DNA, 549 bp, Oryza sativa
agctcggtacccgttctgtacctgaggctcttgttgagtctcctgtactggcacattatctgtctaaggctgttgcagctcctcctctggtgtggcaataatttatgttgaatcctgtagaacaggttcctcactttcattcattgttgccacaggaggggtaacaacaggtgctggtaccgcaacgtcatgcattgtaggcacaacatcaacaggtagagagaagaaaggctcctgagtcgacagagcgggtacagacccccgccactcctcaagatcaatttctcgaaataccgagctccccctaatcatttcgtcttccaggaagacggcgtgtctcgtttctacaaactttgtataactgtttggacagtagaaacgataaccatttgatctttcaggatagccaataaaatggcagctgattgtcttggggtctgttatcgaaaggacaacggcataagtcgaaagacgtggtcactcaacagtagttggaaaaaaagtaaagtgtataaaattgagaatttttcttcggatcccccattacat

SEQ ID NO: 40345 - DNA, 632 bp, Oryza sativa
atcaaccccgggggcgatctgggccgtcggtcccgtggaccggcggtggaccacccgcgtggtcccggtccacagtgaaccgttccccccttgagtcgctgccgagtgggcccgctcgccggcgcccctttcctccctctcccgagccgctgaccggtgggccccgcatgtcggcgccgcgcctcctccccctcccgtgctgacgccagccctgggatttattgcacaataaatgatttaaggactttttgttatagtaataaacacagtgaatcttctaaaattcatatctaattcatccgagctccgtttaagcccattcaggtctcagtaaatcaagaaaaatgtgtagaatccattaaaaatggttttgttctctgtttcagtagtcttatagcctgtttgcaatgtttgccttgtatgtcgctagattccggttcttccgacgctccggtgtagttcgaaatagtcgccgaggttcctctagcagcagagcaaggcaagtcatgcttgtcacttgaacatgttgatcctatattgcaaatgctctattgttttccttcaaatattgcattgttttataatgttactatggggtgtttacctattgtcatagccatgctattgttgta

SEQ ID NO: 40346 - DNA, 633 bp, Oryza sativa
gcctgcctcgccccaccgcgcctccgaggtcgccgtgccattcccggcgaagtcaatgggaaggggaaaagaaataaagagaaggagaaaaagaagcaaagagaagggacaatccggacatttagaaaaatatctcaccttttttatccggaaataataaaataatacaattggtgtccctatggccaattatacgttttttagagtcccatcagtcgtgttacgtttttgcggtgtctcccagccaattacatattttttgcgtgtcctgtggcaaagtttgcattataactatttttattatgtggcatattagatactcactccgtctcataatataatcatttttttatttcaacacaatttttgatatgatactttacctaacaatatctataaacttaatatgctttaaataaaaatatatgcatatcatgatagtttgtttcatgataaatatagtaacataattgatcttttctattttttttgttatcagtagtaacattaataaaaagatatgcgctattttataaatgcttatattttgatcagagtgagtattaatgttgcttggtttctagaactatgatacccataggaccccgggtcattaacgtgtataggcctcat

SEQ ID NO: 40347 - DNA, 613 bp, Oryza sativa
agaccgtgcaaacaatgtggtatggtatgtggcgccccctttcgaccgatgctcatgccgaaatttacattgttcctgcaaataaagtttattgtctatgtgacaggtattgttttcccgctcttcgcctcctgcggacgcgcgggcaggtgaagcttgcccctaggaagcgaagggttcttgcttcctccgattccgatgacgtgaacgacgtcgaagagtgtgatggcgaggaggaaggggagtaagaagaggaggcgaagcccatggctgaaaagcccgcggacgaggcggtcgaaaaccgcgtcgacacccctagctacactcctactccaagtccgggacataacgagactggggtggaatcgaacagctccccccttcaccgaaaggatttggagggggcgaaggcgctagttgccttctcggcaggcaaggcggtgttaatgaccaaatttggtaatatcatcatcggaagtgaagatgagatcgaagcgcaatcagagataaggattgctgtgggaacagagtaagaatcggctggagtccagatcggctacgaccagaatcggctaaatccgaatcagactgggttaggtgatgcagccgattc

SEQ ID NO: 40348 - DNA, 709 bp, Oryza sativa
cattggaagtatttttaacaattcaaagatcatttcagtgattaatttaattgggaaagtaattaaaattcaccttttccttttcgggccgaattaggaaaagtcctctcattctcggcccagtctcctctcagcctgcagcccttttcctctctttcccgaagtctgctttgtgtccctctttcaatcgggccaagaagtagaagcccagccaaaagtctagtttgcatccctgctacagtggcatcttcaatctccagccggctggagacagagcccgagccagccgcacagtacctgtatagccgcggttttcccctccaaatccggccttttatctcgtgtatttccaaaattagttgaggggaaatactcctcttatcctcctctatctttacccccaaaaatcggagctaatcgttgagtatcttgcccgaatcgaactcgttttcgagtttatctccaaaacggagtttttgatttcccggatcgatttcttgcgggaggagtccgatctcttcaatccaaggaccccctagtcctcctctttcgtttgccccctctcccgagctctctcgtcaaccgtagagccgccgccacgacgtcttagccgccgccgtcgccggccgacgaacagccgcctcgcgccgtcgttttggccgtcgccgccgcctcctctcgccgccgtcgggtgcgcgtggaagagggg

SEQ ID NO: 40349 - DNA, 919 bp, Oryza sativa
ttgtattgaatatttataggcttacaaataatgaaaaacatttgttggacacttggacttcactagaattttctcttttttgtactacttttatcttttgttttgagcgtgtttcatcggaggaaatctgaaatacatagagcgtaacctttgccccctcctctatccccattcttctcttatgtttcatgaaactcttacggttgtttgaaataaacctctgaactacaaaaccgggtataatacacccccaactatcaatactgaacatctagagcttgtttggttgctgccctgacagcaagttgctggaagttcccagcaagttctctggccggagacatgcctggcagcaagttgctggaagttcccagcaagttccctggccggagacatgcctgagattaatttgtgagtgtttggttgctaacctgaggctccttccacctcgcctggcctgatgtaactcaggcgcggaattagcctgagccaggcgaccgatgggctccaggcgcagcagcgtgctacacattagcaccataatcccctcatccccgccgtgataactccacacgaagccgccgaggccgccgccgttgccgtcgcgcgaagccatcgcagccacacgaagacccctccggagtgctgcgtcatgcttcacatgcagatgctcttctatgatggatgcatggattttgcaattctattctgatggatgcgacatggatctggggatctctttgctcctgttcttctctcttttttctcttcttgatgatttccttgttgatcctggtgtctacgcaaagcagcgccgccgccgtgcggaggcatcgtgtcgccaggcaaggatttcttccgcccgtggttgagtaagcagatcgactttgcaatctgggtgcaatcgggctgcaggaat

SEQ ID NO: 40350 - DNA, 684 bp, Oryza sativa
ctgaaaatgacaccctgttctgagagtttacaagggaagaacaattacttggtttagctttaaggctgagtttaaaatagataattaagtgggttgttgttacaaattttttacttaattatatggataaatttaatattttaaaaataatcttaacaaatacaagtagctcaaaacataaagggtataaccgtacaatacaaccaaataaagttttcttgaatttttctttaaatgtgaagcaaataatctgcttcaataattaaaaaaaaacaacaaaagctctttaacccttccaaattgggaccctactatactgaacagcagagccatctgtcaaaggtgggccccacctgatagtgagagatgttaagctgcagtagtagcttgcagttagccaaaggggacagtgtccttttcagaaagcaatggcgtaacgcccccaccggccgcagcctaagcctaagattaggcttaagctaagctaagcttagttgcttcacatgctggctttccgcatctttatcatggctgtcgccaagattggcgcccccaacttgctcttgttttacaactcgccttcaaagttcaaatttgttttcctttttttgtcggtgttggaaataattcccaagtcttatgtatgggcatttttttccttcaaagttcaaaaggtgtatgttg

SEQ ID NO: 40351 - DNA, 624 bp, Oryza sativa
accacaaagtaatgttacactttgcctttttctcaaaatggcaggagcactgccaataaaataagcagaaacagccacaaagtaaggtacaaagtttattattcccatctcccaagcatacccaagcacctaatagctataatgcaggtgcaaagagcacatcaataaaggaagaagaatgccaaaaagctagtcatcaacaaagcaaacaccatgtttgagatatctggcagaataaaatgtttatctcaaacaagtcttcgtttcttttctatttatattttatcagatttggagaaaaaatgatattagtatctcactcacatattttttcgtaatgcctgctcatgccatctggtcttagtcagatgtcagacagtggcctaaatttcacgattatcaccagccacaagaactattactattcttatatggggaaaaaaatctgagccacaaataacaaatattaatagtatgataaaatgaaaatattgtgcacaaatatataggagcatacctctatctatgtttactgcaaaagtgcttgcgacatcttttgattcactgatcccaccatctttacttttccggacattgtgaaggcacagtaccaacgcgaaaagt

SEQ ID NO: 40352 - DNA, 2408 bp, Oryza sativa
gacctaaatcattctgtagttagtatgagctgtgtccttcataagaagcaaacttagtaaaaaagaagtactgtacagaacagttgacagattagaaatgggacctcactgaacagactagtatcagtgcactgaatgtggtaataggcagtttctgcttaattggacatgcagatgcagatgattcaaccgaatgatacactcatctgcattcagcaagacaataatcaattataagtttgtttagttctttgggtgtaaagtttttgaagtatatggacgaacatttgaagtattaaacatagactaataacaaaacaaattacagattccgcctgtaaactgcttgacgaattcattaagcctaattaatccgtcattagcaaatgtttactgtagcatcacattgtcaaatcatggcgtaattaggctcaaaagatccgtctcgcaatttacatgcaaactgtgcaattggtttttttcctcacatttaatgctccataaatgtgtccaaacatttgatgtgatgtttttggctaatttttttttatctaaacaaacaaggcttgtttaccgggacaagatttttgcccatgtatcctttcgtttcatggattaagacacaattattgcctcttgagaaagtgggtcactgcttagcagtgttgctgccagttgaggtgtactacttcagttaagaagtaacttagttccccaaatttttttcttaaaaacattatatcgaatctttggatatatgcataaagcattaaatatagataaatgaaaaaactaattgcacagttaggaaggaaatcacgagacgaatcttttgagtctaattagtccatgattagccataagtgctacagtaacccacatgtgctaatgacgggttaattaggctcaaaagattcgtctcgctgtttccaggtgatttatgaaattagtttttttattcgtgtccaaaaaacccttccgacatccggtcaaacattcgatgtgacatccaaaaattttcttttcgtgaactaaacaaccccttacattcactttggagaaacaagtgacatctccaacttgtctgtactactgttaccttgactgatagggaatttctgtctagtagtaccagatgtaaactgatcctaattactctatacatttatgtgttgacaagaaccatcattgtacttccataaatttacatcaatagatcaactggaattggactgtactactcccttcgtacttaaaaaaaataaacctagaacaggattgtatttttttataaaacaaagaaccttatcttttttcttatgcttatcaaccaaaatttaaattttcaactctaaatttggagttgattttaggggtttttcattgtaatttatttttcagcctttgtttttagatcatttagaatatgtttataaatattttattcacaaattattttttatttgcaaatatgttgtttggcttattccaccaaacaaccaaacgatggggttgaaagggagtacacattttcaagtgcaatcatccctcgtttgcgctgtcactaacatgtgaatttgaagtctcattccaaggaacagaagttgaagtctaaggggatgtttggttgatgcctaaccttgccatacctaagtttagactagttgtagcatggtggtacaaatgtgacttagaaatagttggtcacaagtgtggcatgcttagctctaaatttgagagcatgacatgtgggtcccaaagttaagaaagtatggcataacacaattgcggcagcgaaccaaacacatgcctaaaaaaactgtggcatgactaaagtgtggcgtggcaaagtgtggcaaccaactaaacagcccctaaattctttttagattatttactggatggttgaaacgggatatttgttttatgcttagttatttaccggtttctttagcttcacacattaggccaggtttcactgctctaatcaaggcttccgattgaagtttagtaggagtatagtgtagtgttagtgtacactgtctttaagatcacattaagaactaatagacctgtaaaccctttcatctagcaggatgatgctttgggtgatgagctggttgttgagatgtgaagttgtttgccattaaaaatgctcctgaatatatctccaacgagagacgcgtggcagtaacatgcatccccgtggcttatgcttcacattacacatttgtttatacctaaacctaaagcttaattactgcattagcttccagatcgacgctttcagttccaggatgagatgcctacgtaacatgcgaatctcgttaccggatctcgttgccagttaaagcgtaaacaagtctccttaaaacctgactgtttcttaactgaattctttatatggg

SEQ ID NO: 40353 - DNA, 3008 bp, Oryza sativa
aatggttctaagaattgggccaatttggttaaaaagccccagggggccttcgcttccaaataagtgatattactggttcatacatgtattgccttctaaagctgagaacttggtggcaataacactcctctcttgatctcataggacaaaggtatatgcttacatttaccatggtacattgtttattcgtgttgcatatgtatacaactgacatgtttgaggattcagtcattaatgtgatctctacgttaaccatggtctgttgttcctgttatctgagcttacaacatcttgataggtctgcattattctcgttccccagtacttaccatgtgacactacactctaatcaatgttttttttaatgtaaatgtgatggcaccagcaatgcacgatttccattttatatcatctagttgtgcaataccaggtatgcgtaaatggaaattatctcagcttcacaatatttcactttaaagaaacaaaatcccatgagcataaacagtaggtgataaaataataaagcccatgtcattatgtttttgtatctactacttttccctgaatttatataggatcgatcatagctaatgaaatccatctgctttagatgggctgttataatgcaattatgcaaagtggtgctacatcaactcattggttatatgttaatttcactactcatatacgtgggagggaaaaattgaattcctaactggaaatagacagttttgattatgtatgtcaacatgtaggtggagagctggtcttatccaccaagagaatttcatacaaggacagaacagcgttctcatgttcacatgaggcaatagcaggcaactcatggactttggcaaggtttggttttctacggtaaaccattgttttcagcttgcatattctctatttggttgtcacgtaaaccagcgatggccttctgtttaaactcatgtcacatttgatctcttgatggggctgactgttccacttcctctctgatgcctatgattcaaaatttgaactgctttaaataatctgtgaggcatcaagttaagtggcccaattgttttattccttatgatacattacaaagcaaaacatcatacagttatagtgagacaccaccagacattagtttgggccataatacatgactcaggcttgagtgccttgccctttcttagttatgaactggtggcctcctatgggggttggcatggtaatccttgttaagcaatctgagaacttcatctctggactccagcattttctccttccagtcttcattagttctatatgagttgcagcaaatactcgaacctttttgttcttttttggagcccaaactcagatgcctgtaataaggcttgaatggcagtattatgatatgttggggatttggtatgttcagtgtctgctcagatgtgcttccttctagttttatgttgtccacggatggtcttgccttcatcgtcgagctgctactatcctgagagattttgctaggaaatcagtagcggcatatattcctatagtccattagttactcaataagggtaagaaacatagggaatccgcaatatggttgggcatgactttcttaggcatgttttctattggaaagcattaaacatagtcatagagtgggtttgcacgtgtgtgtgactgttttcttgaatttataaggttgacagtaggctttagcaccaagtacattttgcactgtgttgtttgacaatattgcataaagttttgacctacctaacacctagacattttttttgtcttacatgtgcatgtccatatattgctggcaaataacattctcataccagcaaatgtagatgtaggaattttcagttctgtctctagtctatgtcactatgataaaatgtaaaatatgccaacctttgacaaagataaaacatggagtgtgtccatgaaggaagaaaagatcacctttaagcttgaaggtacacgtgagttggatgagtagttgctaatctctcctgcatcaagaccaagaatatattcaattcgaacataatttgttagtgtactaaacagtaagtttcctttaggacttccttttctttatggatatttctttcccttttggtgaactcaagcttgtaagaactaaagaagtatgattgaattagtatatactgaatgcacttggagcataagaaatagtctttttgaaggagcattaacagtactattatgacacagtgaaaacagaacagattactattatatcatgattattaaacacctatatctaacaagagggaaggccataaattgacaaatacaatggccaatcaaaacagaaaacagaaagggtaagcgaaacatgctagttctagatacttggatgtaccctatatacttctagttgttcttgggcgggtggtgccggggtgtacggtaatcagctgtgaagggtatgtggccatcaaagttaacccctggaggaaattttctacttctaaaataacagttcatactcaaatcctttcttcctccatgcccacattttccaacagaatgttttgcacctgagcttggtttgcttctagcatcctttgggtggttctccatgactgcaactccaaaagccatcttccgtcctgcaaatattttgcttttgatctcctcatatgttctggtttcatctacaccatgatcctacaatcagagtatctgtagttagaaatgagtttggatattaaatttcattgagtaaaaaaagtagaatttacataagcaatgctttgagtaattctagtcctaccagcttgttttctgggcctttctcactgtaagttgccatcatcagttctgaaaacaggtaatatgtaacgtcagttctcacacatgctatttacacggaggaggaaataaacttgaaaagaaaaggaaatgaatcagcttgtacctctatgtgcaatggtgacaaagggtccaaatgttaccgataggatggccagcccaagcaggaa

SEQ ID NO: 40354 - DNA, 647 bp, Oryza sativa
tattatcataagataaatttcatgaaaacaaaaacaccatgcttcttccataatgtaggaattataactgagagtatactggtactacaagagaactaatcaatttatcatcaaaccctctcatattgtgtgtgaccatgtgtgctttgaaatcataggaaaaatgcctttcctgatcagattactagtaggttatccagatattattcactactagaacctaataataaaaaaaataagattatgccgaaacatttttttatttcataattacttgaattgactatatatgtcaatatgtgaaaaatatgtgaggatatgtaggtatatgtatactagtattggaacagattctgatacaaaggggcctctactacgttacgtcgttgtccagtaactttcgacctttcaaggtatggaatgactttctgccaatgaattatagggcttacatcgaactattttttatgccaaataaaattaacactcagattttgtcacaaagggtctctagtatgtattgtccactttccacgtgtgcaacaattttgccaatgaattgtaggccttatgtcaaactaattttggcgtcgaatgaaattaaacaatgacattttggcattaattctgtagcattatgccaagta

SEQ ID NO: 40355 - DNA, 668 bp, Oryza sativa
aagctctgttcacacacgttcccttggattcgataccctggaatactccgtaggggaagtgctacatcggtatatccgtgcgctgcggattttatctgtgatcgtaagaaataccaacaagcatttctggcgccgttgccggggaacggttgctgatcatttccgaacccagttcatcctcgtatcctttttcacttttttattctaccttcacccctgctatcctagagaagtattcctgtcaaactcttctcaccatggagcaatctctttttgagctgtctgctcctcagggcgaattctatgagccaactccttcatcggagcccatttatacaactggctatgaaattcgtcccgagctaatcagtatgttcagggaaaatcctttttttggctttgatctagaaaatccctaccatcatctatgagactttgaacaagtctgctcatgccttaagattcgtgtcatgagacaagaaactgtgccgtggaaattgttcccgttctctcttcaagagagagcaaagcaatggtacacctctaccgttggatgtgtaagcggtagccgggaaaagttgacagattctgccttgccttctctccagttactcgtattactgcccttcgagtagaaattctcagttttaagcagatcgaaaatgaat

SEQ ID NO: 40356 - DNA, 761 bp, Oryza sativa
tcctgcagcccagaaatgacaggaaccagccaattgagtcaaagaagaataggtctctcctaagatgtttactgaaaacgttaccacttaattatttttctatcaatattattcggcctaaaaaaatgtttttggattcattgaaatcagggtttaaaaaatatatttctataattatatcacatccggtcctggtggtacccaaaccacctttaaagttaacccaaacctaattaaaccttattccctttggccaaaggactctagtgataatggctgagtgccaggtaaaataaaaaatagtggaagaaattagtgcaaactctcgttaaccatattgtgaaaataatgaatgttggaaatgcacttctaatagcatagactgaaacaaacattctgaggggagtgactgtcatagtacctgccatggctttccaaactcatttaacgcttctgtcagctgttgctctgctttgttccaggtttcaatatcacctaagtacttttctggtctctgcaaaaaaaaaaaaaagagaaagatatgcaacattacaaccatgctgaggatcaagccataaccatcagttattcacatattgttccgtaggatgctgagaatttcccaacattaccagttcacaatagtgataggaaaatgggaaaacaactacctctgtccacaaatataagcatttctaggttgttcagcagatattaaggttgaggagaaagactctggtgcccctcattaaaggaggaat

SEQ ID NO: 40357 - DNA, 1120 bp, Oryza sativa
ttgccttagccgattgcttctattaaatgatcagcttgaaatttctgcaacattgctgcacccaggacagtcctcgatagatggcaacctcataccctcattccagcaaaatctaaagaactcgcagccccaatgaggatcaaaaccgtcatcaccttcttcataacgcctctcctgttgtttgtcatacctcttctgatacttattgataattttagccgaatttacctgaaaacctcttgcatgaccccccatcggctgtccggctagctgtgtgcaccatattgactggaaaaggattgccatcaaccttcattggcctcttagagtcttcaaatttgattttgcctccctcaatggctgcttggatctgcagcctgaaaaccttgaaatcattggtagaatgagacccagaattatgccactagcaataccttctcttgcccaattcttcagccgatggaattgtatgaccaacaggaagttgaatctacttctctcagagtagcaaatcaaaaatcttgtcagccttggtaatatcaaagtcatacctctcctattttccagaattctttacccattggcatggtataacctttttgcttctcacccattcggctgctgctatctcagagtcatcatcattatcatcatcatcatccgatccatatatgtaaggacatacatgattaacctttttgaagttcttcctggcttctgcaaacctctgttcatgcaaggttaccttctgtgcaaaatgtgacaaactatcaaagtcttgagacgagaacttctccctgatcggagcaatcataccctaaaagccaaatcggctaactgggcatcagttaaactcaaattgtagcacttattccttatctctctaaatctctgaatatactcatacacaggctcatcatgtctctgcttgatcgctgttaaatcgaacagtttcatctcgtgaatcccactgtagagatagctatgagagtgcttctccaaatcggcccaactattgattgatccacatggcaaagaagaaaaccaagtgaaagctgatccagacagagacaatgggaacaacctaaacctcaaggcatccacagccgatgcttcacca

SEQ ID NO: 40358 - DNA, 759 bp, Oryza sativa
tcgtatctccggcacaaacagttttcaaatctgagaagtgagcttgacttacaaattcatatatactataagggaagcgagatgagaattaagctagtaattaaccacatacaagattgactatgggtgaacatgaaccacattcatttaataaaacacatgcagcatgctgcgaatttttgtcttaatggacttggggtagaccatgacttgtattataacatcccgatggccaaatgaaacattgcaaaaagggggaaaatattctgagaatcactcggctgacaccttatctcgagatggaacaagtggactggcactcattcatgttcacccatgaggagggtgtgctaaaccagatgacagctcatcatctcgcagacatggaggtgatgaggcgatcgtacaaaaatatctgcatgccatccgaattgaagcaagttgatgcaatacgctgcatgtgcactacggatcgcaaaatatgccatgccgcattcatcactggctgataatacttcgatcactgggaggcaatctttgttaatcggctatcttaattgatgtgagatggtgcactaccaccatcgcgcatcttgtttctgcaaagcttgtttaacgcacttatgaatcgcgcatacagccttcccttctgaactgtaatatcatcaagctccttcacgctagacaacagcctactcgaagtgtactcggagcatggttctggagcctccatatcttcctggtgagtcgacgtaccta

SEQ ID NO: 40359 - DNA, 904 bp, Oryza sativa
tgacttttctaagattctaaacatgaggaattttaacgttggactaaaaccatttgaaagtagacttcattaacttttccacaagtatgcatagctcaaaaaatccttctggaccaacggctaggtccattctatgttggtgctattaggagggctaaatccgaatctaaaacaaacataacattagttcttgtcttgtgtggcccaaaagtgatatggtgatattggagtggacttcggtgaggccatggtttggtccccaatcaactttatgcaaataaaagcacacaaaactcattgtgcaatgatgttttttcaaataaataatatgtaaatcttacatagaaaacatggttatatccaagctgatgatgtccttatcaatactatttaccttttttaaaaatctaggctttttaatttgtttgttagtatttaacacaaaattactaacaaaaaagtttgtccattatacaattattgtagaaatttatagtaagtacttgttcggctaatccctctgtcataggtactgaaggggatttgaagaggtgtgcaattaatcctcttcaattccctccaatatcttcctcatgggggcttaaccacacaagccttatatgacctagttattgcaaaagttctataaagtttcggtggtagtatacacatatataaactaacaagcacggcaactggctcgctgattttctagtttggtaaaattctattcggaatcggccatttgggctttgatgtcgaatggtgttccatttgaataaagctgcttttatttttattccaacatgcttgtaaggaaaaaatatttattaatgtacacaaagacatcattgataatattgttagttattaaacatttacattagtttatcctaacattttg

SEQ ID NO: 40360 - DNA, 664 bp, Oryza sativa
ggcgacactgaagcacgatatttgttaacgaggttcagccgaagcctacatccctggagcacttattacagacgctccttgatctagcatattacagcgtattagagttacagcgactcacggcaggacaccaccaaaccactggtggatgataaggcttgctagaggtgaggatgctagtcataatcatcccatcttgctccaccaccaccttagcccactcccaacgtaacggtaacctgaaggtcgccccaaaagaaaacatatagatatttatgatttttttgcttggtcaatattgttctccggataaaggattttgtcacccacataatgaagtgttaaccgaccatcaattaacaaggccaacatatcttctttctttaaaaatagggccaacacatgtaataaaaataacaatataaagtgatactgtcgttccacagatagagtaaaatattaaaaagatgcttcctatggttttaaaaaatataacatttagaataacatttggttaaacatttaaaactttgatcatcaatagtttttcaaattctaagtttaaaaagaaaaaaaaggaatgtgtaggtttccctaacaagtataatcataatgccataagcatattaaattttatgaacttattatcatacaaaattgatgg

SEQ ID NO: 40361 - DNA, 1583 bp, Oryza sativa
ttcacctttgatccaccagaccgattctttttgtgggaaacggtcttgtcttgaattagaatcaggggcgaagcccagtgaaggcccgtgggtgcagatgaaccccccccccccaaaaaaaatagttattacccccatatctcggccctatatgcacccccctcggcccaatatagtgcacccacagcccaaacaacagtccagttagcgttgtaagcccatgaggagagtagaagcgagatcaatcttttctgttctcgacttcttgtatgtcgcgtcacgtcgccgccaatcttgacgactccgcctcgcgtctgtttggcttccacgccgctgctctacaatcagccaatcccagtctccgagacagctcgccgtcggcgttgcccctgcttgcttagcacctgcattgctccagccgcagcccgcaggagccagaaaggcaggaagccggtcgccaggctaccagctaaccaggagcaagcgtcataccacactttctcaagccaacaacgacatcatccatctccatcatctgaccagcacacagccacattgtgcgttagtagagacaaggtaagaaagcatgcttcatctatttctttttcaatcaatttgatttattagatacaaaggcctaaaatttttattggttgtttttttttttacattgtaggattaggaggccagtaggcttcaatttggaatccttcataattggaataaaattgcagattgggggaaaatttgagaattgaaggtgctatttggatgtaagtcatgtcaattttcattctacttctgtacttgaatgaatgataaaatcagtatacatttacatcctcctaaatcatctaatgataggttacgtggagaaagaagaaatgaagaaagtcaccaatgaggcccttgttcgtcgcttcatgaaaatgcaaggacacagatttgatgatgattgaagataatgattgtatctaagtgcgttggattttttttatttgaaaaatgagaactgattttgatgttaacttgttttaggttatcaaatcatcgtcgaggatattgtttgcttatgcagatcatcttctgctcatgggttagtaaccaattatcaattatcaatgttattagtggttttcttaattttgaaaaacaatgtttttcactttttttattttattgatgcatgtgagtctctgtactgttgattaaaaaattatcgatcaacagttccattgaaaatgtagcttgaagttatgtatattgatatacttgtggcaaaatctcgaaccccctctattttgctctagcttcgccactggctgggcgcggccaccggcgacacgatgcagcacggcggcgggcacgggaggtggccggtgcaagggaaaaagggagaggagatgggggctcaccgggcggtacggcggaaggaggcggctggtggcgggctcctcggggtggcacggcaacggtggtccagcggtgttccacgagcgggaaccagcggacggcggtcggaaggacctagggaacaaggaggaaaggttagggtagggatgggagttgcggcgcggcgagaa

SEQ ID NO: 40362 - DNA, 1507 bp, Oryza sativa
tcattcatatttttattcccactagagccataggttgatcggttatgattagcttgctacatacgctgcttgtcattacatcaagcgttgtcaagttttgtgaccctagtgaaatgtgtttcatactttcatggtcaagatcacatacattccgcatgcatgcacatatgcttgacttctacactggaagttagcatttctcatttgtcattcatttcatctatcaaataaatactccatgttatttatgcctcttcctccaaagttctttcaaaaaaaaagaaagaaagagagaggcatggctatgcaaaaggaaaagaaaaaaaatgctcaaacaagtatggagcatgatggtgaaaaaaaaagaaaaaaaagataaacatgcactctcccaaatttcaaaagagaaaataaatgaaggaggaggtatacaaaaggagttatttttatttttcctttttccaccgacaaattcaccatacacatacacatgcacattcttgaccagaaagtatgtcttgtatttccgtggatccattatttgactttgcaatatatgtgatgcaagtaatgctctactcttttccataccctgagctccacataagccttattagatggtaggaaaagaaaaggcgcaatcatatgcctttgtgaggaatcatacaccatgagtgatcgagagaatcaattgagtagctaagcaaagttatagttttgtgttacttgaaaaaaaaatccaagttgttcttcatgaaaagttagggtgacttgagtcaagattgttccatttctcaattgctcaggatcgcatggtagacactacaaagacccacaagtacaggtatgactttgaataatttgtttgcatgattgttagtaaggaagtcataactcttttgtagagtccatagccttcactcgggacgagcaaaggttaagtgtgggggtgttgttgacggttcttaaattataatatctgactgacaatacctgcatataatgaaataaaacatggtattcaacttagtggtaggtgttattactaatcatttccattagtgttggtgaaatatgtgtatgcatgtaatttgaggagaaaacacaagggaaattgacgcagtcaaacccaatgaggggtcagtcgaaccaccaattcggctgaaccacctctaccatgaatcgtcctctgttttatacaaagcgcaggtttgcacaatttttcctttggacatccattttatcttgagatcaatttgattatcaattctaaaatgtcgaagataattgaacccaagctagggatggtacaattagagttcatggtctccctgaaaataacaaaatgaacctccgcgcattcaggacgcatttacacagattggagggcccatatgtcaaccaaaaccacttagaatcgggccaaaacattgtgcaagatgttggcggcccaataagctatctaccggccaaatgagaggccgggaggtcggatttttggttcggc

SEQ ID NO: 40363 - DNA, 1908 bp, Oryza sativa
ttgaccacctttgctgccattttctgttcctttcccaaagctgggctggtctctctctctcctctggttctctccctctccagttttgacatgggagagggtgtatgtagaatactatgtgtgtgcatcttgaccacgccataaatggtgtagggacttgccgttaccagttgtgggtggtggtggtcattggggtgcaaaagaaaagattgtgggtgggcttggttgtgatgtttctcaccattgtaccctagggcctttgcattttagatccacctgtgtgttctttgctccctcctttttcacaaaatgtatatcagcggtggagccaggaatttataaagatcagggctcaaccaatgcgattcgtcgaatcttcaaactttccatggatttttgaatggatttacaagggatggagacaagcctaggatgctcaagcagtcaagctagccgtctccgtccctgtgtatatgtctattgttctgaagaattcgtttccacatacatatttgtttgttaagaatgctaacagtatgtagttattacgatttttcattccttgtttctaattgaatgctccaaaagaggtaagatgttgtatcatgcatttatatgtagaggtatctatggtcctttctcattgatttttttcttaatttgagctttattgatctgttcttagttcgtacagtgagccatggacgaatattatgaagaggactgggtatggtttcttttaggacatttttcgtttactatatctccttgtgccagtgcagtgatagctgcaaatgcatgttattctgttgtcttggcaatcagtcaaggcatggtccagttctcagcgagtttcaaaatgtgaattataaatgagcgttgatttcagcagcgctgataataataatgcgtaaagccccagcattcatttgattttgatatcgttttccctctgttgcgtctactcagacgaatacaacgtagtagagtttgattgagtaggccggagtatattattgtaggaatggatactatggaactttttttttgcatgtactaaacacgtttcccatattttaaggagtgaagaagcaaatacatttttttttcttttgaaacagaagaagcaaataatagtactagaatggcaagacactgagaatggccaatgcacgtgacattatattatgtttcttgtgtctaatgtgccttgcaatgtgaaaaaagtagtggttgatcttgaataaatgatgcatacccatacaagcatgggcaggaccgtccttacagtacctacttgcactaaaggcttgtgatatggtgtactttttggtccctatgcaagaaatgcgggtacatgtcttctaggacttaaaatactgtctcatttaccccgtgtggccgatgtgtctaaacttagaagtgatttgaattattgattattagttatcccttaacagtagaaaagatattctaccactgataattgaggtggtagtataactagacacagtccattggattagaaaagatggacaatctacattgatttctaggaccatcgcaaaacatcttctgtaagtatcttgtatttgcacacttgaacaggaccaccagaacacaaatatgccaacagtggtccaagatactggttgtttcatcttctttttgtccacttatagtgcaggcctttgatcgtatcaagggtcatacgaccagaactacgatgcaatatagtctcggtcccatctatttttaagcaactaaggattcacccttttttaatttgccttggatagaaaacacaagaaagatatcattattgatttggtggtcctggtcagtttcttgattctttggtcatgtcctggctggtatgctggaccttgtaataataggtagcagcca

SEQ ID NO: 40364 - DNA, 513 bp, Oryza sativa
  unsure (1)..(513): unsure at all n locations
tgagtatgagaactcatactacaaaactatcttcttcctgatctttatgacttcaaaatttattcatcttttgcctcttgcaatcggttttcatgagttgataccttctacatcagatgagctaaactttcaaactcttgaatggaaaaatctttctttgataggtgttgacaatccttgaaataccaattctgctaattgtgcatcacttaagctcaaactatagcatcgaccgcgaacatcacaaaatctttgaatatattccaaaaccgattcatctacttgttgcttaagcaatgccaaatatgtgagtttcatctcattgattccagcaaagaaatacttatgaagctgcttttctagatcggcccatcttttgatagaatttgaaggtaatgatgaananaacccccaaattttaaaatttaaaaaaaaaaaaaaagggcccccccatccaaacaataacaatggaaagaatctaactttcaaagcttcaccagctgatgcttctcc

SEQ ID NO: 40365 - DNA, 1644 bp, Oryza sativa
ttacatacaaaccaaatacatcacatattatacatctcagatctatacaacaaataacaaaattatacatctcagtgaatcacaattgtaaaaaaaaaagaaaaaaagaatggatgccgtagcgccgcctgccgccgctcgctactcggcccgtgcgcggcctgcgtgcggccccgccggccgcctaccgcgtgcggccccgcctgacacgtgcgggaaggaggaggggaggaggcggccctcgctgggcatcggatgggaagggaggaggggaaggagagggctgggatgggagggatgggaagggaggaggggggaggagagggccgggatgggaggaggaaggggaggaggagagggagatggatctgaggagatgagaggccggttgttgaggagattgaggccggttgtgggggagaggatagggaatagggattatatactacgtgtgattttagtcccggttggtaataccaaccgggactaaagtggtgagctttagtctgggtttgtgacatcaactgagactaaagatccccgcccctctgacaagagactgacaggggatgaactgggactaaagattgtagaatggctatggggttttaaactgatctttagtcccagttatttttataaccgggactattgtgttttgggggtgaccgagcaaagatcagttttccagtagtggttggtagccaccatcacctcaccgactccttagggcattctcagtgtatacaacccaagttgcttataggttcccttaacttggggcccatggaaattttctacgagagctacaatgttttgttgatgagagatgtataagtatggacctcacatgctaaataaaatatgcaattcctagctacctttacatctaacctcatcatcgtccatatatatatctcgccctcagagagatggccaggcgtactttctcgcatcgagacgagaattgatgcgacttatttattcattaagggcatgttgtaagcttatagccgattgatagcataggatcgcctaagattttttccacaattaatgtatatatgtcagtcataagaagcttatgacatctccttatttccatattgcatatgtccttacctgctatctatcacgattatcaaccaccatcaccgcccccctcctttctgctttcccaccctaatcctgctcaaaaaattgtcattgggctcactgaaaatggagcgggaagctagctcgttggagcatgagtgatgcaacagacgagagtctggaattttcaagattttgctccaacattttacttgaatttacaagattttagccattaaatccgatattgcggtaacgtaggaaaaaaaaaagggattgctatatggcattcgaatgaaatttggggatgaaatcttacagattttggaccattggatccatgccaagattcgtgcattggcttatctcctccaactccagtgggctccccttcttctccagcgctggcgacacctcaactccggcgggttagggtttggggttggggtgagggtaggagggtggttgggggaggaggaagagggggtttcctcacggcttatagggatggccgtgggcggcggaggaccagctgagggtggtggactc

SEQ ID NO: 40366 - DNA, 520 bp, Oryza sativa
ttcgtaaaaaaacttaaatcttggctatgaacataaacacgtcatttgattacttttttatgatgggatacattataacttctttcatctggtactgacatagatccatatttaatacgtgtgtatgtgatctgcacactattgatgctctaacatgctaaacaagcaactcgaaagctagctcgttaagcttacaaactataagactaatttgacttggcttattaaaactagagtctattcgagccgagctcgctacacaagccaatttaaactactactccctccgtcccaaaatataaaaagttttgaatggatgagacgtattttaatactacgaatttagatagactatgtatttaattaaaactccttatattttttggattataggacgaagggggggttaacccgaaaaaagggccctttttttaagggggaaaaggggcccccttttctcgcccctggggaaaccgaccaccacgggatcgacgtctcgctacgctgtggcgctgcgtgc

SEQ ID NO: 40367 - DNA, 4379 bp, Oryza sativa
ttatagtaaaacgaatctgaataagtgacatcacatctaatattagtggaaggggtaagggtgtcgggccagtatcattgctactgagatattgaactttggctccaatgacctttgacctatgcaagacgtttattacaaggttcatttctaaaacatttttttagatgtttattataaaatactccctatgtcctaaaataagtgcagttttgtactattcacgttcaacgtttgatcgttcgtcttatttgaaaattttgtatgattagtattttcattgctattaaatgataaaacatgaatagtactttatgtgtgactaaatatttttaaatttttcataaattttttaaataagacggacggtcaaacgttgggcacggatatccactgctgcacttattttgagacggaggttgtaatcgtttaaaaaaaataaaatgtaaaaaatccagctcgtacaactcctatccaagagatcagaagaagggtacgggtacatgatgactcaggtctgaggagcacctgccacttggggacaggccttaacggtagtagccatctgcccactagcttaccgctcagaaacttgggtccctctgaattctgacacgcctgtcacttgggcccattctgacagaagcctcatcagccagcagtcatagaaacactagccccaacccaacggtccatcgccaccgcataatacgtacgcttctcacaatgacagatggaccccaccagtcagtgataagtacgctcctaaccttttgcctccacgaaactctcgtcctttctcaccgttttttccaagcgcgtgctgccgttccgttcccaccatacccctgtaggagtacatgccgaccaaaccccgcacaccacgcgtcgccgacgcgctggtcccacgcgtgtgggacccaccagcccgtgacgcgacagtattttctcacggtatcagtggggagcgtccgcctgcttatcctgccgccgcggggaccatggcggcacagtaaagtagcatgagggcccacatcacctggagcaagtacgcgacctcgtctagcccacgcgtggcatccccaccaaacagccactgacatgtgggccatggctcggtgtgcccccaccggatagtaaatgccggtctagatttttcgggggagtacctatacatctttcgaaagatttttataatcgtatcacatagatttttaatctttagattaaaatccgatagatataataaaaggcaaaaggcaattaagaaacaccataatggacactaaattaccatatcctcaagaaaaagatcaaatccaatacaaaatttaaaatttatatacgaagattcaaaaattacagtgtaactaacaaaagttatagtgtaagtttcataaattacactgtaacttataaaaaaatgcactgtaaatttgagtgagaaaatcgagtgagacataagaaaaaatctttcgagcgagatatagcaaaatcgatttttcggtctccgttgccgtgcgaggtcttcttcctttttccgacgtggggcacgcggaagtggggccgggcccacctgaaagccacgccgtactttgtttaatcactgacgcgtgggcccgggtcactgtgggtcccagatatcagtgagtggccttgaggagagttggtgccgcccgcgtccacttgtccgtcggctgcaggccgcgactggcctacgcatccggctcccattggctgctgctgcccacggcccacggcctcgttctccacaccgtggggcccacggagatgtggtccaggtgcagagcgggcgacacgtgtcgcgtcgggaccggacgccgggatcacgcctcctcttcgcgccattgtcactcgcgcctaattctacccgccctttaatctctctctctctctctctctctgtgtctggcttgaacggaggcctcttttcttttcaaaaaattacaaacaagtccttgttatcttaaccttttttgttcaatgaaaagagtgtcaataactaaatatgcaacagtttcacaatgtacgtatgcatatattaccctttcaaggagggggttttggtctttttacatatgatactataacagctactactactaaataatatcgttgatttgtcggtatatgtttgcaaatgtatcaaaaacatatgtaaatacatcacacaattgctctttttttatccgttcttatattatctaaccaagagctcaacgtcacggattagctagactagtagtttagtttggacatttcttggtagttacatataataatcctataatgaccacattcgaccaaattcttgtatgcagaatctgttgccttgcaatccacgaccaatgctttattattcgttgataatgagtgtataatagcttgtcaatggtatagatcaataacttgatcttgcttctgcggtaagctagctattgtgatttgatttgaaatgtgtcaaatcttttttaaaaagaacaaataatatgtgttatctggccaatagtcaaatgaaatttaaagagcttgttttatgtttattgaaccatggatgtggttattaatttagttttaaatatggagttcttatccacaaacttgtggttattaatttagttttaaatatggagttcaaagattgggattgatcaagatccaaggatctgtttagtgtactactagtctccagaatcaaagtttgaacatcatttttttaaaatacattatatgaacaactacaagagttacataatacgggagtactttccaatatgaatccaatgtaaccaatttatgcctctaagcatacattttgttaggccaattattagtcaaaagtttaaaaattaaatattttgaatttatgagcatttattaatcagtacagagattatatatcggcctttctaccaagtatggatatctgtatatcctgtatagtttttatttgacaagtatatagacattgcatggtaaaagaattgcaaatctaaaatacaaggggtaattataaagggaaattattttagagctttacatggaaaacagaaagaaaagtattcattatatgattaaataaaatccatgtgagattttgtcaattaactattagatgtgacaattattagttgtttgtcaactgcacaattaaataaagaagacactttttcaaatggaaagctttagctatatagatgtactttaaaagttataaatacaaccttgccataatttagttgttacatttttcattcactgcgtttaaatcttcactttagccttcttacagccaagtaggtttgcaaaaaatgacattgtgcataatacatacatcaaatagttaatgggatttaatttatctttgtataatttctttgttgcaactatattcttgtttgcattaccacattattttaaagtaaatttcaataagtaattcagcaacaaaactatcaaaaggacaacacaattccctttgaattcttgatatgtacaaaaatgaagacagaaaaatccttaaaacagacaagctgaaatgattgagttggatatatattttgttaaacagtaccttttgatttccacaatcatttcacttgacatattttcaggcttatgtgagttgtgacacatattttttttgcaaaaaaaacatgaaaattttgtgagaaattttatacgatgtaagactaccgacatcgcaatcggtttttgttgtttgttgattccaagggaaccaaacaccatggtgattgtttcatctcttatttgttgtctctaggctctctctgatgaacagaattataggtatatttatccttggaaaaacaaaatataggtttatgcttttatcctgaatttttatacattcttatatcattgtgttgttacgttctttctaattctgttaaatatatttgtagttttacataatttactccatattttttagaagcacgtcgtacacaagtttgaacgatatatatgattgaacgtacatatagacttttaaaatgacaaatatttggtgaatattaacggtaaaaatccaagaaaggttgtagagctagcaactttgtccaaattattgcattgctttgtactgtcttacatgtacattaatatactgaagaactaagatgcaatattgaggggcctaatcatggaattatgtgcaaattgtaccctctcatttcctagcaggcatatatactactacttcctccatcctgtcacatccacccaatatcctttagtatattatgggatggaggaagtactgtataaaattaccgttgcaaacactaaaaccccatggagcacacaatgcaaagtttggcacggagaacgttaac

SEQ ID NO: 40368 - DNA, 1444 bp, Oryza sativa
atataaccatgttttctatgtaagatttacatattatttatttgaaaaaacatcattgcacaatgagttttgtgtgcttttatttgcataaagttgattggggaccaaaccatggcctcaccgaagtccactccaatatcaccatatcacttttgggccacacaagacaagaactaatgttatgtttgttttagattcggatttagccctcctaatagcaccaacatagaatggacctagccgttggtccagaaggattttttgagctatgcatacttgtggaaaagttaatgaagtctactttcaaatggttttagtccaacgttaaaattcctcatgtttagaatcttagaaaagtcaagtacctttttctagtctgaatctactttgggccttataattgactcttgcttggttggcctatgttatggacaacctaccatcccatgtaactcataaatagatagccttcatcatagttaagatttgggttttgcttagatcggtttgtgtaatgccaacttcgtgagcttcatattcatctgcaatttagattgtgttatccttgttgttctgaattccttcgattgtttgcataaacataacccttgtggttaggtcgattatgagagcatagtcgataacggcaagacttgtgggtgtagtgattgcaaagtgatgatcggctgatcggaagcctcaaaacgatatcctaatgtcaccaaatcgaacctatcggaagatagggcacctgttcacatcaagaattttctataaattgtgtgcagcttttacttttcttaatcatgttccatttgaattatatttttcctgttgttggtgtacctattcaacattgcagttgcttctcttccttatttcactgttttagtcacaccagtcataaatatctgattagaacacatttcggttaagctgaccatcaattttgtatgataataagttcataaaatttaatatgcttatggcattatgattatacttgttagggaaacctacacattccttttttttctttttaaacttagaatttgaaaaactattgatgatcaaagttttaaatgtttaaccaaatgttattctaaatgttatattttttaaaaccataggaagcatctttttaatattttactctatctgtggaacgacagtatcactttatattgttatttttattacatgtgttggccctatttttaaagaaagaagatatgttggccttgttaattgatggtcggttaacacttcattatgtgggtgacaaaatcctttatccggagaacaatattgaccaagcaaaaaaatcataaatatctatatgttttcttttggggcgaccttcaggttaccgttacgttgggagtgggctaaggtggtggtggagcaagatgggatgattatgactagcatcctcacctctagc

SEQ ID NO: 40369 - DNA, 547 bp, Oryza sativa
cttgtcatttgagtaggttaaaaaagctgaacaaaatgaagatggttcgaaatcagttggtactagcagggcaatccgttggctgattgctttggagaagggaaaagacatgatgcaagatatgaaaatagttaaatttttatgtgctaacggcattccgtttaatatattgagaagcccacaatttgctgaaatggtcacagccattaacaaagctcccagtggatacaaaggtccatcctctgagaaggcaaggacaactctgctagatgcatgcaaaagaagcgtagaacatgatttggcaatagtcaaaagtacatggtaattttcagttgctaacctttttcatccttgtataggtgcaaatttattaaccttttaactgaatattgagttattgactatcacttctttatttttgcatcaagcaggtgcacacaaggtgtttctattgtgtctgatggatggactgatataaagaacaaaccacttatcaatgtgattgcatctaatagccgaggttcatgctttctatatgcagaagatt

SEQ ID NO: 40370 - DNA, 1116 bp, Oryza sativa
aggatcacttagtatccttggccttgagactgtcaaaaagaagggagatgcaactcgtgcaaggcttaaagacaaaaaacacctgaggacactttcactaacatgggggagtgcaagcggaagtactactaccgtccagaaagaagtgatggagggtcttaaaccacatgaaaatctttcccatcttcttgtctacaattattctggtgctactccatcatggttattaggagatagtttctcacttggcaatttagaaagcctccatctccaggattgtgcagcagtgaagatccttccaccatttgaggagatgccattcctgaagaagctgtccttggtttgtatgccctgtctgaaaagtatcaggattgacttcaactctgccgatgaggaggatgaacttgagttaagcgaaattgaaatatccaaatgtttagctttaacatccataagactacattcctgcaaggcgttgactatgttaagcatcaatgattgtgaggcactaggttccttagagggcttgtcattttctgaaaaactgaagcagtgtgttgtccaaggatgcccaaaacttccgtcaggtttcatcgcaaactgatgatttggtggcaaactctatcaaactagctgtaagtatggcttcactaaactatgtcatgctcattccacttcattgaagaattgctggatattgcattaataaagacttcatctaattcataacaactcaatgttgtaaactgattggcgtactgcttagctgttaatactaatgactaaaagtatatctccttcggacttgtctcaagtgcccttaggggagtttgtttaaaacatactcaacgtttgtttaaaatatagctcactcagtaagaagcttctttcatccttgcaattgttcttgagttattttttttagataatggatttatattaaacccggcctctacacttgtgagggtgtatacagccaaacaagtttccaagagtacataagactcatccagttatatgggagacaacacaaggtaccaagtttacataagactcatcccgatacatgggcaacatcacataaagataaaaccccaataagaatcaacaaagcta

SEQ ID NO: 40371 - DNA, 1686 bp, Oryza sativa
ggagcgtcgcggtggggttagggtttgggagtgaggaagcgaatcgcgcacagcttgaggaggggggagagagagagggtaggctaggctgcgggctgcggcgcacgaggcggtagcggcaagggaaggaagcgtctagaaaaaaagtgtgaaacggcgtatgggacacgtgcacggctgctgatcgggttccctgtttgtgtgtagccctatcataggatatacggacacacagtttaaattattaaacatcatattatacatataaactgtgagacgtttttattaagcctaattaattcgtcattagcaaatgtttactgtatgaccacattggccgtgttcacttgagctacatattgcagctgttgaactgctgttggctatatcaacagtactagcagcacaaaatttactgctagtgctgtagttgttgtgctgtgaagctgaagccacggcaatctcatccgaacccacccattgtcaaatcatggcgcgattaggcttaaaagattcgtattgtatttacataatctgtgtagttattttttttttctatatttaatactccatgcatgtattcaaacattcgatatgataaggtgaaaagtttttacgtaaaaactaatcagggcttaattcgtcccatcgtattattttactttttaaattaagattcatctcgtattgttttacttttaaaattaagattcatctcgtagtactccctcgataccataagactcgactatatgattattaagggacttgtggaagatttaaaataaaccaaatacaaagaattaagaagtgatagttaatgtatgtatgcatgtacattatattatgagatataagaaaaaaatgattatgtcttactctcataacagtagtatattttaggatatagaaagtagtacttctgcttttttgatatttttttcttcaacaaagcaatctctttatcccataatataaataatataagacaatcatacttaacataatctttattagtttaatactaatgtttggcttataatttctcgtatgctataacaaaactatagcaatataaaagtaaatttgagtgacaatcaaataatatcattttcaacaaataaaatgtatatttatattatactaattattagttagatgttttaaaagttaaatattaaaatacttatgcgtcttatattatagaatggagaaagtaactttttttaatttcttttttcttcaacaaagtaaacaaacacacccgggatcgctcttgtttctcgcaagtatctttatatccaaataaccgaacggcatcttgaacgacaaagggggacctcttcaaggggtattcttcaaagtggatttgagtattttctccggtaaacttttactatcatttgatcaacgatttttcacgagaattgaactggttcgtgtaaaattatttcgttccaaaggagccctttatatttttggaaacttccaacggttggccagcaaaacggtaacaaacgaaacagctgtatgggataaatcaattttgagataaatataaataactacaagacacaagtaaaatattcacttcatcaccttctctgttctcacttccacccaagagtctaacaagaaataaaattgctacggccataatgaccggaagcatgatttttcatggct

SEQ ID NO: 40372 - DNA, 2808 bp, Oryza sativa
atgaactgccactcattacaatgttttatgcaaatcggtcaccaggaacaactgcattggtcgggcaaaagattctcctaattaaaaaaaatcctgaccaataactaactaaatattatcttccttagcaacatggtctaccttctctaacatttcatgttcttcctaactaagacaccttaagcacacaataacactcaatgataaatgtaaatgtgacatacacataactagaggaaacaactgaataaacatttgctaattacatgcgttgccaccaaaagtattatcagcatagaataattgttatttcttaaaaacttgaagaagtcattacaaccatgtgatggttgatggggtataccaataacttctgcccatccatcagctgattccaattactatctttccgctattgtttttgtccaagaaaattctagaattccttcagatgacaactacgggaagcaaagataaggagaacgaatctaatttctcaatgccagcaaccaaatccaagaaaagaccctcaggtttattaatagcatcactaaaataaaaggctacaattcaacagaatacaaaattgattagcaagcccagtattatagagaattaacactaaaaacactaaattataattttctaatgaaaagcccaagcatcaactactcctaacaagcgtgatcatgcttcaatgatttcatgttacataggaagcaattcatccatttcgttcctctgaacaagtatcataaattgatgaacatatttcagcaactaaatagtggcaaaagaagatatacaagagaagaaaacaagaatccctcacctttttcctgttaacaatgttaacacaatctaacagtctaccatcaataggacaaaaatgcatagtgttaacatgataacatctacttatgcaaattagcattggaagtgttgtgttccatggagttatcaatgtatatttaagataacatggtatagaattaaaaaaaagaaagaaaaagaaatccactactagagattcaaataaagcctctgagcctttgtttgttgttaacagataaagaatattcccatcagattctccatttgattgtatccaaaagcatatgcttcttatgccttcaaggtgtagctgaatatctgggtggtatagcttacatataactgggaagagtccttttgtggtggcactaactgtaaattgagctggcttgctggtggctaataacagtaacaaggttccggagtatgtagtgctgcagtaaaggatttcaagctgatagcttaactacaggctcacagttctcaaagaatcagtcagatttcaaacatcaaatttggagaattttctgagaagattctctatctgttaacgatgccttacagcatctagcatagaaggcttaatttgcatttcccaatagtagtggcaattagctccagtattgtcgatcgctacatagttacagtacccaggagacaacatcaaagtgcctaacaatcagaaagagtaaacatggtaaaggaataagtacctttgggtaattccaggaccatcattggatgccccaaaccctgaatcggcccaatctgacattgaaatcgaattgtcagaacatattcacaagtatcaagaatctatgttctaaatgaggagtgtaagtgctagctaaagtaaaaaaaaacagccatgcatatactttgtcttcatcccgactagaatgattcgaagcaggaacaaattagaagatagtggtaaaattcttactacaactataacacaccaaacaaatcaaagagctaatagccctaacacccaacatctacagatctgaaatcctgaacctccctgccataaatatttaacatttaggacaagatttggtcaaaatttaaaattacaaccatcaattttgtagtagaaataagtttataaaatctaataactttttatattatgatagtacttttcaaggaaaatctatatacaacattttattttgttttaaaactaagcatttgggaaattacagtcggaattttgaaaattcaaccgaattttgttctaaacgtcaaatatttatgaccgcagggagtacattagcaagtgctaacaaagcaaggttgctaatgtttaccaagtagaacagccccatgctgttcacttgaattcagtaaactcatactgactatggagcaaaggatctgatagttttcactaaactatgttgtagatcatcaaaaccaatctaatttggtggggaactaactacaggcaaataatcaatttccctcataccatttggggttcgctcatgctgtgctactcaaacagcttacttctgagatcgaaacgaaactttgcccgaggagaagaatcctcacctgctgcgcgattttgatacctgccatggtatcggtcatcatcatacccacctctgcctccaccacgctcgtggtcatatccatacctacccaacacatcacccaagcacacgcgatgaaaccgcagagcctcgaagaactaaccaccaatccagtacagatttcgaccaaatgaccaagaagaaacccctcacctcctgtcgccgtacccgtaccgcggcggcgggctcccacggccgccacggcggtcgtacccgtcgtcccgccgcgacctcttgaacggcggcgaaggggatctcctcgacggggagtggcggcggccactccgatacggcggggggctggaactacccccaccccggccaccgcctcctccccggtggtggttgtcaaaatagcgctcggggcgcg

SEQ ID NO: 40373 - DNA, 1360 bp, Oryza sativa
cagtgtttttcctctttttaaaaattattttatcatctgtcgaactgccggcaccctgtcaactgcggttgttcgataggtaccctgtcgaaccacggatattcgatagagtgccaaacttgcgatttcgtctaaccgacctatatttttgcgattttcctttaaaatcgtattatttccaaaaaaaatcctatacaagcacgttgggtgcatgcactgcacgcagatgagtgaatgcatcgcgttgatcgagccatggatgtcacggtgcatcgacctgggatattaattaatccatccgttctgcttcatcttataattaagtcgctttaactaccttttaagttaaagttctataaatttaactaaaattatagaaaagtttagcagcatctaaaacaacaaaataatttcattaaatcaagaattgaatatatttttataatatctttgtgttaaaaatactactatattttttttatgaacttaatcaaatttatactacctctgccttacaaatactctatttttcagtttttagatgtaatgtatgactattcgtcttatttaagaattttctatgattagtatttttattgttattagataaaaaaaagatatgaatagtatttcatatgtgattaactttttcataaaatttttaaataaaacgaacaattaacgttggacatataataaatttaaaatgcagtctttatgaaacggagggaataagtttaactgataaaaaaatcaaaacgagttgtaatacgaaacggatggactggtcctagtgcggtgtcttggatggcgaagctagcgaacgaaccttccatcgatcgatgagagatcgagcagccggagaaattaatagttcccgtgtgcccggccggaatctgattccttttgctaaagtgtgcgcatggcgtatgcccaatactttggaaatttctttattcacagcattcaagcttctttatagttgttttgctatgtgaactttcaaagatgttgtcaactttaggttgtacgcatcatattatgccaagcagtcggtatatcacttggatcatattattcggggattcacaccgcatatgctatatattgatatcaagtcacttggttgattacaattatcaaaaccactcggttggttagattatttattccttgactatatgtttggatggttcaattaaccacatagtcgggggctacacctattagggtgcatctattcgatgcacctgactttatttttcaccctccacagtcttcatatttggtaaaagtactcgggagaccatggcgaaaatgattgaagcactcggctttggagtaatctagttcgagagaa

SEQ ID NO: 40374 - DNA, 3096 bp, Oryza sativa
caacttttagaccctccactttgtcagattgcagcaaaactgatgctgcctcctgcatcatacgtcaacatcagattcttcactcatacagacaccatagaaatgtacttatgtaagaaataattcaaatgcaagtaaaatatacaatatactacatatctgatgcatatatatgataccaaagttcaaacgaatactataaatcacttatcacttaaatattcactccatcaacaaagcgaacaatctatctgtttgtattctacttgcattatcctgtataaaatattaggatagtgaataaaaccatttgcatgtccaaaatactgtacaagaatggcatttgtatgaatgcaagatgaagaatgcaacaaaaccatgttgcaatgcgcaacaggctcctttgttacattataatgccagcaaaagttgaaaaccacaaggcacattactgaaagttctaatatgtcagacacactgaccaaacagtttgtactattatacaattgaagcacttattacacatttgtcgaattcagcatatactggattaatgtgtcatctagatcatctgcataataaacctttcaccaatattatataggataaccactcagaaactctatggaccaaacaaatagcataaccatatccatcaaaagtgcaaccagagctaaatagacaaggagactgtcactcaggaaatagaaaacagaagctcgtaagtgcgacatagctacgagtaaagaagtaaccatgcataagcaaataaaactgtgattttgctggccaacatcaaaagtgcacactaggcgtagtaaacaatgccataaataaactcagcctagcagattgatgacatcatggaaaaattaatacaaaaggaaggatagtaaataaggaatacgatagcaattggcaaaaacacatgaacattcaatttcagatggcaaaatattgcagtaataactgggaatggtcttattagcacgacgaaacacaatgcaccagtacaactactacgagatttgattacataatggattcgatcaccccctaaataccagaatggctaattcagtgtactaagaaacatacgacagacatcttttgcatagcactacattcgatgaaacaatcgaaagtttcataaactatcactacaataattaatgctagtaaaatccaaccaatagatggtaactaatgcaactgcaacatgtttaacgcatcctagcagcatgaagtacaacaatattaactgaaaaactacacgaggcacaataatcgaagctggatgaactgcaacagcacgagtatatgaaaatccacgcaacatcacatgaccgagctgacacgttagataatagacgcaatatacacacccaaagtatctgtattcccccaaactccatcactagcaaattactcataatcaggactatcaacgacttcccaagccttagaaatcgttcgatccgacgagatttgaccatgagagaactcctaaaatggcataaatccgcaccactccagatgccgaccagagagaaaccgaaacctgcagagggtgaggagatcaggggaggaggagggatcggggagttgctcaccttgcgatgggcggattggatttggggacgtcggcggcggcggcgggatcgacccgacgagggttcgcgaagcgtggggaaatttgcttgcggcggctggattgtggaagaggggggaggaggatggttaggtaggggtgggttatatagctaggttggctagggcttccattccgtgttggggttggattcgaattctgtgagaggggggaggatctgttgggcctgaaaataggccggaccagggcttagtttggtggattcccacggcctgttttgcaagagaagagaagaggaatggaagtttaaagaagggagttgatggtgtgattgatcatgggagtaaacatttttagtacacatctcttgtttggttttcgcatctaattccctcacagtctcatgaattaacatgtcttccttagataagagattggtaggagtcggacgccttgattctctatcctaaaccctctcgaattctcaagtcctccaaccaaactaaactttttaagctcggttggcatgttcgttgtggtgcgaatggccggtcgcgagttcgactcgcgggacctcacctcgacgggttttttctcgtctttctttaggactgtccttcgggtagtcttgactagaaataacggtacacatatacacacgcgtgagtgttcagtgggactgtatgtttcctgtgcaccgaagcctaatgcctctaatctcaatcttagcgtgtgttagggacgcgcacgcgtgtgtgtgcgtgtgttgttgtggcgtgtgtgagtgtacactctgagttgtatcctctgtcaccaactccctcaaaccaaaccgacccctattattttgggctgtaataaggtccttcacagtacgtctagctctcgtgtgaacttttgatgcgccatctcggatatcggcggcggcgatcggccacgagggttcgcgaagcgtggtgaatcctgtggcgagcggtggtggttaaatctctctctagaagaagactcgaagcgggctgtatctgggctggtatggggtgaacttttttaattgggccgtaattattttacacacctgtacatgtgggccgagagcgcgggagtccgccagaaaaattatgccgtctcgaactcccgacgtcgccggagacgaagacgaatacgacggcgagtcggcgacgtcgacacgagatggagcccaatttctcccgagaaaacggcgcgagaaacgaggggaatctcctcctctcgtgatgcatcgcacacaacaattaacgccgctctagcaacctgggagtactcctatcaacacaaacacacaacagcaagatggagctagctaaagatgctctttgcatgcaacgatgcaagcaagaagaacactactcctgtagagtggtagtagcggcagctatacacgcctatacaagcgaatttttttaaaaaataatacgattttaatagaaaatcgcaaaaatataggt

SEQ ID NO: 40375 - DNA, 1323 bp, Oryza sativa
aacgcccaaatatgataacttatagaataggtgggtgcatggttacttggtcagcaaccttcgtagacttgtgctcctgcatcctactagtagtacaaaattttcttttcttccctcagctaagtttcgtggacttgtattaacagaaagcaaagttccccagcactacgaccaaagctcggatgctcatctaacctggagccatggctgctgggtggatttctctctctcttctcgttgctcttcatccaacccaaactccctactgctagcaacatctctcagctgactgaaaggtacagcaagccagaatctgtttctgctctagccgcagcctgctgctgctgtgcttttctcatcttctgttcctttttgtttcagaaacttttaccttttcttcatagatgaccactcttgaaaaacgagttgctaacaattctcaaaaaaaaaaagaaaaaacgagttgctgacaatatcatttgactgcagtggatcagggcaggttcagagcagggggaaatatgagaaaattgagtcgtccatatacaagaatcaagatcaccacagagaaggggaaaaaaaggaaccaagatctataacaggaaaaaaaacgcgaatattagggaaggatctaatatcaaataattagaagtggtgaggcttcgaacccaggtcatctagcccaccaccttgtggagctagctggaagacccggggcgtttctctataacagggaacatgtaagagatcattgcccatgtttatggcctctgttttcttttgtgcaaagccttttgatatcgtgacttgttttttgtatctcaaaaataatactattattagtgactttcatttgaatttgctccaaatgattgcagacatcaggaagtttactcaacaatatagttgcagtatatgctgctaacagtaaataattcttaggcagtggagcaagtattggcagataccctatttcttggttctcagaaaaggtcgtttttctccctgggagaaggtgccttggtgaaattgggcacagaggtggtggaggcagcatcagttttgacatattctgagcacagcatgaagcaaatcgagagtgaatttacgatcatgagagcatttatcagtcaggttagtgcagagaaagttggtgacaaaacgtttgatgcctggttggatcaggttagagatgttgcccatgatgtcgaagacatcgtcgatgagtatgcttacctcgctgcacaggccattgatacaggtaccttcttcaagaggaagttccagcagaccaagaatgttgcagcctggcagaacatctcc

SEQ ID NO: 40376 - DNA, 731 bp, Oryza sativa
gttcataaaggctatggtggcattttaacaattgctatatggcctcttccaccgaatgttggggtgataggtactatgattaatatgattaatggctggaacttgaatttagagttttggcgccaaggggcttgataccaattttcaaacattggattagtgtacatgttcgtcaaacattgaagtgtgatcagatcttcaccttttatgtctctttcttatccttttgtttgaaatggaagttagtgtggagtttgacagtgactggagtctggtgtttgatagtgattgccttgaaaatcttagattgaagggagactggaaactttgaaattcaggctagtggatcccgctgtggttattgttgacatggaactgctgtagatatgtcatatcatgttcttgtttaagtgataatttgaatcgttgaaatggtgttaatagtgtgcttagtatacttatcggcttgtttccacagctcaccctatcatcatatcatgctgcatatactatattgctttttggtgaaagactgttctcaatgatgtttgtcactctgtgtaagtatgtttgaagtttgagctcagaacaacttttttattgttccactcctttgtaacaaactatttaaacttatacagtgtaagtatcgtgccgttgttactttttagtaccaaagtgtaggaatccaagtttttattacaaaaataagaaacaaatctggggctgca

SEQ ID NO: 40377 - DNA, 662 bp, Oryza sativa
tcataaacagcctctgtttataacatatatgtgttctgtcatcaggtaatcgtcacagaagcccagatttgttgtagtgatcatccctcaaccataaacagggtataatgcattcccatcttcgaaagttgctgcaattagacttctttggtggctgagaaagttgttttttgttggcatgaccagttaaatatggctgactttgctgagtcagcaggtgggacccatatatcagtgacttcctcctcatctcatattctttctcacctcttccctctctctttctctttcctctcttccttctttcacctctctcactgtccatccgtcctgtagccactggccaagaccacgtcgcgtcactaccgccgtcccctctcctctcaccacccgccccccccatatccgcctcttctttacctgagccgctatttgctttgtgctttcccctcagccccactccaacccaccccacagctccatccacttatctcctcatcactatggatccgatattttgctatggcgccgttggcatctcgccccctcttgctagttgtggtggttgttggatgtggctgtcagaggtgtctcgggtatggtaacagaggatgagagaggatgttcatcgtgcaggtggatatggatgcattcccaaccca

SEQ ID NO: 40378 - DNA, 525 bp, Oryza sativa
atttgcataaatgcaaatagatggttatctagtatgttcttattttgtttaactatatccatgactccatatcactcctcccttcgtgtatatatttctctgcattctcttattatcagttcatttcatacatatgagttaaatctagtagattgttgctatttgtttatttatttttgttcatacaagcatacaacaagtttactgtttgctttttgtatggcagttttgggtgcattggataaactattgacgatgaattaatttttgttttcttagggatgattgtttcagtacttggttatagtttttaggatttattttcctggtgtagatggaaaaatatttggggcaacaattttttgaactgaactgaattgagagcttcagttgtatctcttgatttcgtagtatttttccaggcctactatgtacgttaaatctaagcatttattgaaattggcagtgcatgctcctaaacatttttgtgcttttgatgtgtctgtcactattcaatagtttcga

SEQ ID NO: 40379 - DNA, 921 bp, Oryza sativa
acatggattgctgtcattttcaaactaagtttgttatgtattgtaagctattgttttacaaatgcactttacatgtcaagggcgcgtggaactttcatgatatatccagacagatatttgtatgtgtaaagtgagttatgaaaaatatattagttatcaataactgcttacgttcaaatgagatatgtagtaaagtgcccttacgacgacatgtctaatactacaacggtttagacattccgtgttaaaaatcttatcatagcctttaagaacgtcatcgattttatgaccactttggaaaaaaatctgaaagattagcttgcgtttattttgccaaggagttaaaaaacacgttagagagaaaaaatcacgaaaggaaacgaaatcgtgacagaggagacattatttctcataacagctcagctaacacgtattgacaacgatttgcctataaaactagctagatttttctcacggtcctagatggaagaacgaaaggacatttaggaggcagaacataaatgaaaatagccccttgctagcatcaaaccatggatcgattgtatcacggcggtcatcaacgataccagcaaagaacgaaatgcctacctattcactctcaggatagagcagcggctatattttgtgactttaggtgaaaacagatgaaaccgatatgcatgggcattaatgtggactattaagcatatatgaattttatttaggcagcaatgcttaatgtttttaacttataaattgatatttccgcgaccaggccttcaaatatgaaaatttaacttcatgttacgcggagcgtcttgtttcggtgacaaggtaagattgaattaacaatgatatggcaaatggtcccatcgatacttacattttgaatagtggatttataaccgctctaggttgggc

SEQ ID NO: 40380 - DNA, 694 bp, Oryza sativa
attttggaatttccgaaaatgtgtatgccgcccaaaacccctctaaaaattttccgacatgtcccaaagttatttttggaattttccaaaatgtctagggggagattttggttctggatattctaacctgtccaaaaagttttcgaattttccaaaaaccttcagtgacctttactattttggtggtctggaaattttttgatttgtcccaaattaatttttggaatttacggaaattggtatttatggtcataacgggtagatctaaagctgtggctataaatagcccactctctctacttgtgtgggttgctggtctgatcggatattttcgtgcccttggcttgttcatcttgagattcacttttgagccttgctttcttgtttcccctctccacctgtgtttgattcggatttggtgtatgtgtgagagttgtggattcgagtttgtgtgagtgcctgttgttggcttcatgaagatttgtgagcacttgcatcatctccaggagatctttgcatcatttgtactcttggaggttgaggactcctaaacggctaggtattactctcaaggccccgatcaatatgtgggtggccgggaaaagtttgggaaggtcggatctccctccggaaagaaaggaattcccctaatggaaggaacagtgctttgggccacctcctgaggaaagggtta

SEQ ID NO: 40381 - DNA, 687 bp, Oryza sativa
cccaaaaccttctttagcaaataaactaaatttctatatattctttcttccccacacaaattttctctctcatcaacttacaactaaattttggagataaaaaagtgtgcaaaacatagctctaaatgtaatatgacaaaaaaacattggaggatgaagttgctaaccttttaggcacctccgattttgtatataatcaccaaaataaattcactagaaattttggcatgacctcccctcttttttgaagaaattttgaagcttgctcgggcagctagaggaggaagaagacatatatataggggtgggactttagtcccggttggtgttatgaaccggggctaaagatccccgatctttagtcccggttcataacaccaaccgggactaaagtcccacccctatatatatgtcttcttcctcctctagctgcccgagcaagcttcaaaatttcttcaaaaaagaggggaggtcatgccaaaatttctagtgaatttattttggtgattatatacaaaatcggaggtgcctaaaaggttagcaacttcatcctccaatgtttttttgtcatattacatttagagctatgttttgcacacttttttatctccaaaatttagttgtaagttgatgagagagaaatttgtgtggggaagaaagaatatatagaaatttagtttatttgct

SEQ ID NO: 40382 - DNA, 618 bp, Oryza sativa
cgttccagtactggctgcttccctccgcgattgtatcgtacaatatctgttcctcatcgcgatcagccatctgttcatacaagaaatagttgctaagtctataggtcatttttgctttaacaatcttatatgctaacaatcatatatgctaagtcatatatgctaagtctaactgtcgtatatgctaagtctaattacaaatctaataatcttatattaaaactataataatcttatactaaaactcaaataatattgtattaaaactgtaatagtcaactatgctaagtctaagtgacgtatattaggaccctagtcaataattatatactaagtctaattacaaatctaataatcttatattaaaactcaaataatcttatactaaaactcaaatagtcatatatgctaagtctaactatcgtatattagaaccctacacaatcttatatgctaagtctaattacaaatctaataatcttatattaaaactataataatcttatattaaaactcaaatagtcatatatgctaagtttaactgtcgtatattagaaccctacacaatcttatatgctaagtctaattacaaatctaataatcttatataaaactcaa

SEQ ID NO: 40383 - DNA, 614 bp, Oryza sativa
ttacatgactacagattgaggcaaaatctcatttatgatttttaagtatacaaaaactaggatatttaaaatcttgcacatcactaaaacaatattcctcaagtaaaagtaaattttcaccttgctacaacattagcaggacaattcattgaacttcaacaatacaacatgattttatataaaaaaaactgtaaacttccttttgacattgaaagttgtaacttgatcccatatgtgtgtgtgacaggtgtgtccaacctatcaaacataccctaaaccctgttcttgacaaagtagcaacttttgataacatcatcaactgtttttgtagttttctgaattgtccagctaatgctataacaagccgataattgacaatatagttgtgttcttttgcgaaattttactcatattcctctaattctagctgtcattccaaccagtaggaattcagctccatgtacatggatgagttgattgaatgatcaatttacagcaatcctttttcataattaatgcttgcagatatacacctggtgtttatccgcttccaaatgagaaagattctgcaaacttctataagatagcttcgaaacgtctttctgaagcaggat

SEQ ID NO: 40384 - DNA, 1111 bp, Oryza sativa
agtagtagagattaattaagcataaagttcttttagtgataaattaatcaaaccacaacaaaagaaatttacctaaattttttaataaggcgaatagtcaaacataatgtaaaaaaatcaacggcgtcatatataaaaagtagaggtaataatttgaaaagtgtctactacagtacaaaactagacacgcttttccttatgctatataaacaatcttttcaaaatattaattactagttgggtagttgggtgtccgtgcgttgcaacgggaaaaaaattatacataaatttaaaatcactatgggtcaaatgatgttaagtcatcaatgagtgaatttcttggaatagaaaacttaatatagcacggaaaataattacacggaaaataattacagattttggatgttagtaacatgaacagctccaagtaacacctggtgctaacaatatgcactccttatagtagcccaaatgaaacaaacaaaaggcattatatgttttggcaagccagcatggaaagagatatagatttaagactcataaaaagtaaattgaagataattaattttttaattatagaatgcattaacagcaggtgaccaccccaaccattttccagagtttacaatccagaatgaacaagtcttactacattgtgactataagacgcaccgaagtctgaaatttcataagaaatgttagtcaaactaattttcacagatctagtccaattgagctttaatttgatgaatgtcatatttcaaatattttgaaggaaaagttcaaaatatcatattgtgtagaaattaattcgaaaccatcaacagatatatatctaatcagaatcagctaagtagtagtactaaggagttaggaaaaactatgagcttcattcagatcgcaggtttgatttatcttctgtagatcgccattgctgacttgtgctccagattcccattgttgcttttcctaaaatgcaattcaacaaaccgaggatgaagcatggattagtcaaagattactaccaaagagattatatgtagatctggataagtagcaacgagatacattattagccactttcctggcagagtgctactggtcaatgctg

SEQ ID NO: 40385 - DNA, 683 bp, Oryza sativa
cctgcagcccagcgcaatgcctgcaccttcagtcttagttgttgttgtcgtcgtcgatggtgcgttgccatcgacagcaatgcctaccggagggaggatgaaatcatgactgacatgctcaatggatggtgcatgctcaatccagaggtagtcaaggtaagggagttggcccaagccaccgggcagccggtccagcacgcgtagtcttctagcacagccgcctcaagctccgaaaggcggtcgccgtggccatccactgcggtagccgatgtccaaagtaacctgcaatcgtaagacggtcaattgaaggtggagggcggagatgctcaaaaacgttctcgattctctcgcaatcctcctcgctgataccaccttgcacggtgccgtttgcgctgatcctgctagtgcatctcagctccagttgtgtgagattctgcttgctgctgagctttgatcttgctgccatttggccaagtgttgccttttccagaacctccaaatgtagtgcactgagatttggcaaagatcctagctcttccaagctacaccaatcatgtgtactgtcatccaaatcggttgggaaccccaacatctcaaccaaattttctagctttccgaaacccctaggaactgaagataccattgtgtgtctgatgtccagagatcttagcttccgcagtcga

SEQ ID NO: 40386 - DNA, 804 bp, Oryza sativa
cctgcagcccctttattatatatctaagttacttttatcatatatataaattactttttcgagttgattaaattacttattatacattcataatatttttgagttgtttattttattatcatttttagtcaattccattatttgtgttgattaaatttaatttctagatatactcacgcttttacctccataacggatctacttttaatgtcatgcaaagttacttcctttttgttttaagttacttctataatatatgtaaattaattttaagctttactgaaattacttttatatgtttaagaagtagtttagtgaaatctaaaagtaatttagatatactataaaagtaatttgtaatttttcatcaaaatataatcatatgagatcttgttagaaagatttaattcttacgaacataaccgtgtaatcggatgagtagtttaagagaaaattttatttgaaacataggtgataggaatatattttctatttacttgatgagaactagtactacagttaaagtatctagatagagactcgttagcactaaaacgagaggcctacacgtgaacagttacagacgaatgtcgtgcatgaatacacgtcatgctagagtattagaaacgcaaacgtttcccatgcatgcacgtaaattggttggagttcacgtcacaactaaaagttatactataacggagacatgcaacggtctaattctaccgccattagttattatagcacgatagggctaacataaatgcgattgttgtcatgtatgtacgtggaagatgagaagggcta

SEQ ID NO: 40387 - DNA, 589 bp, Oryza sativa
ttcttctcccctctctcccttcccctcatgttgctcagccacgacagcgatgccaaccttcatcgccaccccacatctccaacctctcatcgacccaaaaactttgttaccatgatccataccatctaaatacataaagccaattatggtcacattttccatcttcttcccaattcttttttcttcttctcccctctctcccttccctcatgttggtctgccacggcaacggtgccaacctccatcgccacccccacatctccaacctctctctctctcctgtggagcagatgacgatagtgcttgccaactcaggcgatactaggtgcctcatgcacatagctctgtccgccaattttgatggtagccccaaggaaacggtcttgagtcgccaaatctccggcgccgggcttgggtctctcatcctcccaccggcagtcgtgaagacgacgacacgatgaggacgagtggaacttgtgaagacgaggagggtgtcaacctaaatctggcgagaaccgtcttcttcggcaccgggagcaagcggggccattgggaggagcttgggacgggtggcagcttatcggcgagc

SEQ ID NO: 40388 - DNA, 644 bp, Oryza sativa
cctgcagccctgttcaatcattctctctgtgagaatagaactactgcagagatccaataagagcgggtgagcaatcgatgcttatttagtcgctcgctttcactctctttccattcattcctactccagctcgtcaatttctccagcatggatgcagtgtagccaacaaaaacgatctattgtacctgctgtatcactctatccaccatccctccccctctccgtagccagttctgcatctcgccttgcagctactcaaggttatatgaggtatcaaaacgagccgaggggaaaatagaagaaaggccaaaccagttgtttttaaaacagagcacagatggcatgtaggagtagctaccaagaagcacaggagaatggagtctacttatccttcagttttgctatgtcaacttatgtgtcaatgagaatcggaggcatcgagaacaagaaatccagagggaccaatcacatatgtaagggagcatctatttagtatctttttcttctagaattccacatttcgcagctggatcagtaaataaattaatgtttatgatattagttcctttctttgaaaaaaaactgtgtttgttcttaacaagctgaattctatgttcaatggcttcttttgttgacatctcacc

SEQ ID NO: 40389 - DNA, 724 bp, Oryza sativa
ctgcagcccggatatggagtactcaagtgctaacattcaaatatttaattgacaatagtggctaaattatcggtagagcaaagtaggcgaacttaagtccacccaaaaagaatattgcaaagaaactgagagatcactcgtgtccagtacagattaagggacctagttgctataagacaaaacatttggggacaaaccgcaaaagcaaccacatgaggggacctcaagtactggtatccacaaagaaaagatgcagaataaattggtatccacaaagattcacggatgtctcgccataaaatatttcgaaaaagcaattttttttaccaaaaagaagaaaatttatcgtatgcaattccatccacccatccactgatccacatgacaagcttcaatcgcacacccgtttccacttttgcaaattgatcgaacaaagaaagagaaacggcttggaaaaaaaaatctcgcgtacctcgaattctccaaatgcacggagcctctcaagaatctgctccataggagagcagaacacctgctgagaaaaacaaaaaaaaaatcaagagattgattagaccatatcataatcatagtcaagaaccagcggcgcgactagaaacctcattcctcaagaaccggccaaatcaatcaataggcacccgcagtaacggcaacaaggcgaatcaaatcaagaaccagaaacgcacggcaacagcacgaatcgatc

SEQ ID NO: 40390 - DNA, 1534 bp, Oryza sativa
cctgcagccctcccctgtgtttagcttactcggtcagtgagttcgtcaacctaccacaaagctgaatttcttttttaattaacgatagtagaaaagaatataaaagtataacctgaatatttttattttgaaaaaaaatggattggaaaaccatgtgtttatatctagaccgaatatacgcagccacgaaaaacagtgattaaaaaagagaacaaaacaccaccacacgccgagttttttttttccatagttgcgtccagactgttaagaggtcgtggtcggcagcagattgctgtcaagatcttaattaagataagcaagatcggtgtcaaggatcttacgataatagacgactcgctcttgttgagtcctcaggggagaaaaaaactgtcactcttgttcttaattattgttcctctttgatgttgcatggccgaatagattgagctggacagatcatttcagaatacagtcaactcgtaccgttattgcttggaatgtaagaatggtggtaaaacatatgaatagcaaataagcagagttttaatataaatacatttgcataacaaaggatccgtataataaaagaagtacaagaattggatcagagagacgggggttgttttaaccttactccaaaatattaatgcattgagcagtccaaaggaatttcatgagatttttagatctccaatcctttcctcaaataaatggaaagattgaattttacaaaactccttgacaagttctttgttattaaacagaggctctccattttgcacattcatgttcaagcaaaaaaaaaagacattttgcacattgacatgatctttcaaacataatattgaccatcactttgcatcataatatatacagtgataaaattccagtgtattttgcttatccatcttgaacgtttaaaatggatttttatttataccttaagtctaaatgcatatctaaagcatcaaaatatggggttaagtatacatttgtggataaatttgtactaaccacagtacaatatttgtgacgagatagagcctagtgagagtgtgactctgagatgggccggcctacatgcaatctgtgcagataggcccagtagatttcatacggcccatgtttcaaatccagccttttcttcaacctcaccaaaaaactagttatacatttgttgtcaaagatgtaattatagcacaattgtgttgtaactatattataatttagtatcatgtaacttgtaagtaactttcaaaaatcaataggcgacatgttatttccatgaaatggaggtaatggaaccgaattcccttacagcgtgtgcaatgtgattttttcttatctaccttgcatgaattttaaagcaaaatcgaacggtttaaaagtatgtgaaagttacgtacaaattacattatagttacatgtgtgattacacatatttacatttgttaaatttttatgagaaaatttgccgataaatatccagaaaaaaaagagaaaaaaaactgacttggcaagtgaagggctgcag

SEQ ID NO: 40391 - DNA, 636 bp, Oryza sativa
aagcctagtagggcttaaacataaaggctaaaagtatccatgtctactcactagtggatccatcgccgggcggccgccctggctcaccggtacgcagatgatctattataattctatgtaattaaaaatacagaatttagtggaaattttaactccacaacgcattatcctttacatcaataccatagttttcaaccatggttattcttagcatcagtgtactcctatccaaccaattgtgccttttcaaccataaaattgcatgcacaaccagttgtgccctcctctaacaacatccctaatttttagatctaattcattcaattggtgtgagaaacctagagcccataacaaagacattcgaaccaagcacaatacaacaaattattttgctaattactaatatactagctctggctcctactatttatagggtgaattcattgtaccgaacttgacaaaacgattgcaatgctctgcttatcttcgtccagtaatccattagactaaaacaaactaaaatccagattagcaaaatcctaatcgactcaatattacacagtgcaaggtgaagaactgaagacctgacctagagttggggaatcagaagtttggagcatttccagattagctggg

SEQ ID NO: 40392 - DNA, 642 bp, Oryza sativa
cctgcagccccgcgtgccgcgtgggccgggagtgcacgctaccggcgcgcgcgagaattaggattctcgaaattactctggttgctgctttgctttgctttattgatcgtggtgcgtggctgcgttgctgcatacctgctgtttctctgaataaacgtatctctagtgtagtagtgtatccggtgcggagctagaatgaaattgaggagtgtgttcttgtttaatttactttatcatggatcttgtttaaactggtacggatgtttaagtttgtattgagtggatgtacaaaatatactagctataggttaaaaaaaacctggtcactcggcaccccttcgtatgctcaagttccgccctgactgtactagtagtagtgtctcagcgttcggttactgacttcgtgtgtgtttcgtgtttccattccgaacagacgatatcttaattttactgtgttcgagtccctgttgtttttgagatcacgccatgttcccattcaagacatggccgacagagacgaggatacaaaatagacttattttcagccatataagagaggaaaaagtacaccgaaggtccctcaacttgtcatcgagttacaaaatcgtccttgaaccacaaaaccagatacaacgtatctct

SEQ ID NO: 40393 - DNA, 613 bp, Oryza sativa
ctttcataaatatgtaaagctatatgtatacatataattatatttaataatgaatcaaatgataagaaaagaattaataattactttttttaataagatgaacagtcaaacatatttaaaaaaattaaatatttagaaacggatggagtattaatcaagtcagggccatcgaggaatgagatcacgcgcgccggaggtgatcggtgaacaggaggtagcttgccggcggcgggcgtctcgccgtcgccggagcttgctctgatcagtgccacccacctaatcccggacttgtgaattccggcccatccacagggcatggcctgggaagcctcaagccgctccgtgacggcccaccaggctctcgttgatagtcttcggtgcttcaccggcacggccagagcacgatcggacccgggctgaaatcagtcgggttggcacgacccgacctacacggtgggccgggccatgcccacctacttgctgcaccatcagcccaagcacgatccaataagactcgggtcgtgccggaccgacccgaagacacgaaaacccaccgtgctcctccttaaataaagtatatcttgcctccctaatctcgttgggtcatctctta

SEQ ID NO: 40394 - DNA, 1000 bp, Oryza sativa
aaaaacatctaaaaactgaagtaagactgaagaaacaagagggtgtgtgacagaggatgtctgaagggaatgacattgggttggtgcaaccagaagtactgccccaactgcattatgggataacaatttacccatatgagcagagttaaccaaagtctgtcctctgggaatagaaacatcagataatgtgacttccaattgcccattaatatgcagacttaactccctggaatgaagttaagggtaacagggctgtgttgaagaatccaatcacaaccaaaaataatgtcatagcctttgacatcaagaactctgaaggtagtagcaaaggaatgaccctgaatttcataaggttgatcaatgcacattgttgttgtagtcaaaacttcaccatttgccactatgactgaaataggatcattgttggtaatatccagtctcgctttgaggactactctgggagacatgaaggtagttgtactacaggagagcagtgagatgaagagaacccatcttgacatgcaaggtgaaggtcgttaatctagcatgcggaccatgaagagcatgcatcgaaacttcatctgtggaggtgttaggggtagggctatctggtggggtactaaaaggtgcttccacctgttcttcttatgagacctcctcatcctccactgtgactaaatacaactgtttgttgcctttacagactctgccatgtccaggaacccaaggctcttggcatcaaaaacacttaccagctcctcttggttgtgtccctgtagtaggtttgtgctctagggcaggcaattctctcctggcaggaacaaatggtgctttggtattcggttgagtggaactgttgtactgtcttggatgagcactggggatatcataattgcgagcatgttcataagtttgaaccaatgagtatatgggtaagagacttcagaggtcgtttgatatggtccttgaggccagagatgaaatagtccaaaaagaaata

SEQ ID NO: 40395 - DNA, 730 bp, Oryza sativa
ggatctgcaggacttcgccaaaaggtccagaggttggaagcccaggacagaagaaatgctgaggcaaaagctcagagccaagctgaggagattgagaacctaaagaaggcaataacagatactcagaagtcagcagcagatactcagaacctcattcgacagatgatagcatttggacagactcaggtcactcatcagaccactcctccttgacttggttgcgcttaggtacacatcttcatcttatgatatgcctcttcttacataatgcagtttctgtttcttgttcttggacctctcatttttttatactattagtagtattgtatgatatagttagatactggaatcaaatgaacataggtactgtttggaatcaatatctctactacaatgacttcctatagtgccaggactcatgaggctgaataaataaaaccactggtgaatataatttccaaaaggttgctgcccctagggactactagattgttgagcttgtgttcatttcttactagtgttaattcctgacacaatgttctttgcaggctgttggattcattttggtgatctgtgaatggagtttggtgtgactgtgactagagtatgacaccatgtgttttgcttttggcatgactggaccggagtgtggttgtttctgttagtgatctcgtgatgacaaaaacttgtgtatgctattgtttccatgactgaaactgtaagtggagtg

SEQ ID NO: 40396 - DNA, 2411 bp, Oryza sativa
agaaccgaatcgaatgcaacaagttttgcatttgttctgtttggttccatgtgcatctctttcctatgaggccaaggagcgtgatatatgtgtttgaacttattgtacactgctgttgattgtcattttattccctacaaacggttagtggacagtaaatacccgagagactataaataattgaaaagattttatcatagcctcaagattagttgttcacatccacgctaaagagaaattgtattcaaaacttaagaagcgtcgagcccaaaagtttgccatttatttttttttgagagacacttcttttgttcttgaaaacatttttttttaattttttttgttcaccaaatttttgtttaagcaaaatctcatacagggctgatgtaaaattgcatgaacataatcaaaagatggtgtgctcctcctttgcatgttagcaatttactgatttgtttcccgggccctgacttacctccaatgagaattgaacttgaggactcacctgtcagtttgaaaactttcctgtaggggttagtccacagaagatatatatccaatgtcgatgaacatattaactctgatggttcattaatcaatctcaactccatgtctaatttgattaaagcaaacaattttaacctaagcaccatgcttaatttaaaaagtctatggaaatacccaaaccagagtatatgaaaatagacaaggtaaacataatcatgtatgatcaagccatattcacatggtgatattattgagtaaatgcttggtgaaccttgttttatctttcgcatacctgagtgtacttaccgccaacatgatggatatattggaatctttggggcagttgcatggtcacatttgattgtagatttctcctccatctcgttgcggattatagcggaggaaggcacctcgaccatgccaactcaggcgagcggtttagtcatgcacacacgtcgggtgcaagaaccttttgccttgaaggtatgatccgttggcacaatattgtagagatgtaggaagcatctcttttttattggcaaatgtgcaactgcgaactggagcaaacgccgcctagaaaaagaagagggcatctcctcttgcttgtataagtgtagatgctgcgggagcgagaagttgtgcaccactaggagtggatgaaagctaaaccaaggcgacacataagctcaagagagagactgggtgtagctagatacagcctgtaacaccctagaaatctccacaagtctgggatgccactaaagaaccctataaaagtgccaaaacaaagaaatttcagcagcatctcttttttaaaaacaatatagcggaagcatcaatatatagattaaggttatgatacaacaactgactgacttatagggatagcctcgaaaaaaaaagttaatcaatggtcgataactctattatttaattaacccattatgtctaaacacaagtaatcttatcaacatattacaataatcatgactaagtgagatcatattgtgcaacagtgtagctaatcccatcccttcatgcaaacatgtcacaacaagtacctgaaaagactataaggggtgagaataaatctcagcaagcaaacggctttaacaacctatttaaaccacaggtttattatatagctgattaaataccaagttatgattcacataaagacaagttcaatatccaaggactaaaacatcatgacatcaccaatcaaatccatatattcacaactccgagagaagaaaacacttctcaaagacatcttcgatcgatagttttcataacatcctgcaatatgtgcatatgcaatgcaatggtatgtactcctgccttcgcacccaacaaggtgtgaagctgcatcgtattacgacaatatacgatgatgtaccggtacggtcgcaaccataggttcacagcataacttcaaatgcaatgcaagtgtgatgcaaatgcagtatgaattccagagtataacatcgaaaccacattccttagatggagaccagtataaggttattataaccaagagcataaagtataaccataaacagtgcaataacgataagcaatgattcagataggtaaaaccttgctacgacctgtaatactatcttgattattggttattgatatataattttaaagtgaaggtaggaaaataacaggttaaagctgtagcaaaccaccgctacatttacttgcctttaccgatgacgagatgaactctagttgcattccgaagtggtatcacctgaataaacaccgactcagcctcaaacaacacacatataatcattcaagaatcacacattcactttctatgctgggaacccaccccaaacaacataaagcaaatcaccgataatcttcctataaaagcagcatagattaac

SEQ ID NO: 40397 - DNA, 659 bp, Oryza sativa
tagatggacccgagtccagacatggcccaaggtctggaacagttgagtttattgcagaccagggtggttctctccgtttcagaggagctaatctgattgtttggttttactaatacatggagtagaacaagccgaacaattgtgtatcagaaaatggcagggttggcatgcatgagaaagcataaaaactactgtagatgtatgtatctcctatcggagtttcgttgttttgagtaaaaattttgatattctcaaatatatagtagaaactgcaaaaacatccgaatgatatgtagaacagaagctgatatcacttaattagttcatgatctatattatatctggggcatacacaacaggcctccctaatcctaatatatcatacaattaataggtaagatccaactcggtgaatcaaactttaatcctagtaatcactacacgaagacctaggaactgttcaccttgatgccatttttaaccataccatttttttataaagttgccaaaaaaatgtttacgttcaatttgttgctgaatttgataaatacataagaaatcctgccaaaattttagcaatattaccttcttactaaaattttggcaataccaaaatttgataaggtttattttggctacaatttgaacaggcccctaat

SEQ ID NO: 40398 - DNA, 880 bp, Oryza sativa
gtttctactagcaattagtaactcccattttagctgataaattccttacttgttggcttttgcgagcaggggatgatgtcctcctctcctgactcctaaggggacagagttaataaaggaggacggcctgcactgcttcagcttcgattaggatttaggagcagacaagaagaagcttctgtacttttgctggcaaatggcataaaactcttgcatctcatggtcgcttctgtattgccgttggccagtttgtatctgtacattatctaaaaagtttgtatctgtaatttctgtgtgtagttgctgttggccacttgtatctgtaagttctatttctgtgtccatgttttcgttcaaacataattatgcgagtatagtcatgttgttgcaggctgcatgttcattcgtatcagactcccttgttgtaatagctatacattgtacctctctaattgagctagctcatgcatggcgtcttgtacagcgcatttggggctaagaacttgggaaaatgttggacatgacaacatcagacatggcaaatctgcgttgtataagttttgactgggactgaagctggcgagaacggtgattacgtggctgtgatgagtggtgacagtcgagattaattagaactgaatatgacgatgggattcagcggcaataacacaactggccaaacctcggtgtcgctgtgttacgtagtagtactgaactactgatgatgtgtttactgtttactagtattcagtactgcaggttgacgccccagttttgtgcacaaatattcgagactcgcaagtccaaaaccaagttaaagtaattcgttaaaatcaatgttgtttttctagtcttgccattaattataacttttttccta

SEQ ID NO: 40399 - DNA, 522 bp, Oryza sativa
cggggacgggcactggaagaaggttttttttggcttggtgaggaattctgggttgctttgggtagcctggtgaaatatttattggccttgccaggtcctattccgaattcggaaacggcaagaggttgattagagtaaattaggatgggtttgtctttcaatgtttctaaaagtggtgtgaacatgcggattcccaaaacattgtcagtttccaatgtattgtatgactcggttttccttattttcattttgactgattgtccgattaatctttttttttcttcagtttttaactaattctaatcctaatctagttctatttttctttttccttattcttttggattaatcttattttcgttttgactgattgtccgattcatcttcttttctcctttctttagtttttaactaatcctaatcctaatctagttctatttttcctttttcttatttttttgattaatgtgagaatttctaggttgtgagagcgaacatggaggcttctttttctattacttt

SEQ ID NO: 40400 - DNA, 737 bp, Oryza sativa
ggtcaaacgtctgatgtgacaccccaaaaatttccttttctccaaactaaacacagctaaggggcccctttgaattggagggaaaacataggaattttagaggatttcaatcctataggaaaatttcgtatgaaaccctttgaaacaaaggattgaatcatatctaatcccttgaaattcctatggaatggacgatcatatagagattttggaagaaatttagcaagagcttcaacctcttgctaacttttctttgagtctatctctcccatctaattcctgcgtttttcctgcggttcaatcaaacggtcattcctgggtttttcatgcgttttgcaatcctctgttttacacttacattcttatcaaaatcctacgtttttcctattcctacgtttttccaatcctgcgattcaaagggcccttaaccatagtcaaaagttcttttttccaagtttgatcgtgtgttttatttgaaatatttgtttgatttgtatttttgttatattagataataaaccataatagtattttataccgaacgcaatttggaatttttgaacccctaaaatttaaattaaggccgagtttagtttgaaattttttcttcaaactttcaactttttcatcacattaaaatttttcaaatctattgcccttgactatgggagcaggtgtaggcttactctcatgcatactgtatttatttagaactttttccagatagggctgcagga

SEQ ID NO: 40401 - DNA, 721 bp, Oryza sativa
agtactacggggaagtgatcaacccccttggtcatatcctagccggccgccgcgtacgtgacgtactgacgacgcgattaccttggtgctcgtggatggatcgatggatgttggtaaggatgcaagtgagactagtaagtagcattttcttacatttttctttcaaattctatacaagtattggaaacaaactattaataatgtctttattttatagtttatttaatagtttacatgcatacagattgattctttactcgctggataacaaagtcatcatctataatcaacgtgatgtttttccgaaataatcatcctctactaaactgtctctatttttatttgagcaaatagtaaatgtgtatctgtaaatgctctatatgcatgcaaccaaccaagattggatcaacacgaacataaaagataataacaaaccatacgtgtgaagtgactattctcacaacaaaccactcataaaacccgtaacttataatccgatcatgagaaatgttaaaaagggctaaagagatagttccaaatcattgggaaaggcgtcctaaagggcattgatcgcacattgatcatcaatgataactttgttatccagtgagtgaccttctgtaatgttgttgccatctgactatttcagtggagatatactcgagaccttaactatgcaaggtcaatatgacatacaaactactccctccgtttcgaaatg

SEQ ID NO: 40402 - DNA, 1403 bp, Oryza sativa
tgtacatatgtggcccgcaatttgcgggctaccatcgttatattttctttcatatattagtatgtatgaattatatggtggtttaaggatatatatatagacacacacatgtaaataggtgtcaattaattgctactaattagacttctaatggcttgctagcaacatatttaatttctctctacatgtatataaacatggatgaagctagaacgaatattaacttatatcccatacatatatattacatggttaatattctaatcacatgtggtaagtccattaaaatttcttaaaatacccttaagctgccatgtggtgcactaataaattagagaaaatattagaaattctaaggaaaaaaacaaagtaattgatcttagaacaaactaaatactacgaggtcccacctctccaccttgggtacggacctaagtacgtgggtacctacgcttcccctccaccttctttttctccatgtatacgcttccctcctttccttactatatcatgcgccttcatgagacgatttaatcgcaagaattttgagtatcttgctctcgtgttttttatttgtagccatactacaagtaatagtttattaattactcgagaaaaaaacatgattcaaaagtcgtaagtacttaatctattttctactcaaaagtttgtgaatggttttttaagattccttaagaaaaatagaacccttaaattattaaaaaaatattacaaaataatagtatccgaacacttaatctataaaacaaaatttttaaataaacaataaaaatcttatctttcaataatataagtgcccgtgcatgcgtgtgggccatcttcctagttggattaaaaagaaaatttaaaggaaataccgttccttgtttttcaaattcctgcatgcgtgcatgcactccgtcggtcacgataaaaaattcgtagcatgcaatttggtggcatccagtatatactaaattcctctctagtagcatttaatttcgtggcatccagtatatactaaatccctcgttagagtactggggatttactagaacatgctaataattaacgatgcatatactggttcattactgcttcattcgtctagcttcttggtttgctccatccagaatcacgttcatcgccagcgtgtacagctaccgttggatcaaattaatatacaatcgttcggctggtaattttttaaaggtagtatagtattgttttttaagcaacagtggcggaaccaggatctcgatacgtctggggctcaaattgaaggctttttaggattatggataccagacacctaatagtagttgcctaaatctcggcaggacccaccacataccatgttttatacagaaacagccttcggatataggagttccgcataagga

SEQ ID NO: 40403 - DNA, 871 bp, Oryza sativa
ctctgtttctctcctcagtgccgcctcatcttctgcctgaacaacatcctctggcggattgacttggttgaatcttgttgcactctctgccttctcctcaccagcctgattaacttctatttgggtaccgttgatgaaaaggtcaatagagttgtgatgcttggcgacctccttgctcactacctctactgtcctcttaacgttgggactattgatgtaccgtgcattgtagcaaatctttgcctccgaaagcttttcaaggttgctgatacctgaaggaacactcatctcgctcgctgggaacgcgtacagattcagtcgaagatatgtgagcttcggcattgcctctttttcgaaggtcagccatgggacagggcaatcaagggagaatctctcaatctctttgaacccttttgtctcaatcactattgcttcttcgggaatgaactccaagcatagtaccaggtgctgcaatttgaccaagcctgcgaggatcttgacatcgtctgccacttgtttgcaaaccgtgatctgcaagaaagtaagatacacgagcctttcgatccatcggggaacactgacaaattttccggctattaccttaaatttcttaagtccttcaggtggttttgttagagaacccagaaactccatggaacaaccgagcccacaatgaatggtgagggacttaagcttcctccatctttctatggataaccgtagggcctcttggtagtcttcgtcactgcactggtgaaaggaccatgttattgcgaggacctccaatctctccagatcaccgagagactgtattgactttgcagagaattcacttaaatcgatagttgctagcgtctttagatatcttaat

SEQ ID NO: 40404 - DNA, 600 bp, Oryza sativa
acgaaatcggaatcgggcaagcactcgaccttaccatagccaactcagctaaggacgaacccctgatggcagctgcctcttatttctggtcaaacaccatcaatgccttcttgtttaaccatgggccgatgactccaactctcatagatatcagcatgattacgggtttggacgtcacttcatcggctaacgctatgggcttaaacacaaagaatcaatacgacttcaagaccaagagcataggcggctggtcaggctatgtagcagcatacatgggccaggattcgatcacccctcgagaacatgtggctttcttgttaatgtggctagagaaatttctcttttgtggatccagctgcggtcctacaaccaattggcagttcgtaaccgaagccttggaaacgaaaagacaatttcctttaggcaaaatcctcctcggctacttgtaccaaatgctaaataatgcatcggctaagctagctgtcggctcagtagtcggagcaggtggaccatggtggctactgcaatcctggctaaatctggtagtcatgaaagttgtcaatcggccatccgtgacagaagcagaattcccaaaactgg

SEQ ID NO: 40405 - DNA, 551 bp, Oryza sativa
  unsure (1)..(551): unsure at all n locations
attcaaatcaagaagcctgcaaggtatttatcaccagttcaatgactacaaacatatgtcatgttaattcatactgttgccatcaataaactgtgacagtcgcacatacgtaacagtgatttttcaaccatatctggtaattttttgactnnnnnnnnnnnnnnnnnnnnnntccacagatacatgtcgaatgctaaacaagagcgctacaggttcagaattatatgcaaattatcacattccggacaagcatcacacacctactagtcaagagtttctagtagcacgagtggtaagtagagataacatatggcaatgcaagctaacctcggtgatgaactgatgatggtcctgttcgacgggccctacacggcactgttaatcctccccaataatcacgagaagagactcttccggctctgcatccacaaccacacacttcagaattcacgcatccggaagcttccaagcggaaggagactgaagaggtaggaagaggagacgcgtcttacggtcatcggggtcctcggcgatgcgcttgacctgggcgg

SEQ ID NO: 40406 - DNA, 509 bp, Oryza sativa
aaatataatctataaataactaaaatcttgaataaaaaatttcacaagaccctggcgttacccaacatagagttcaattaggaataaaatttaaaaatgtctaaaatttggaatattgaaagaatactatatccagaacacaacaaaagattaattacattcagactaaacaatcatgttcagaaaagtcatctgcataaatcttagcaagttcaatgagcttatcttcatcatagttggcaaaagaattccttggatcaaggcaagcaatacatctcaatagctgagtagacctttcagcaaaacgattgtttaactcaacaataatttgatcaagtaccacattaaatatgcatgtccggccggccgctcgccgccctgcgcagtcgccactctccaatcggcaatcggtgatgtgagagacagggaggagatgaggagagctgataacgtgagagaagagaaagaatgctaagcggcgctcggtgatgcgggatactgcgtgatgc

SEQ ID NO: 40407 - DNA, 537 bp, Oryza sativa
ctctattgaccttttcatcaacggtacccaaatagaagttaatcaggctggtgaggagaaggcagagagtgcaacaagattcaaccaagtcaatccgccagaggatgttgttcaggcagaagatgaggcggcactgaggagagaaacagagtttcagagcgagaaagaagatgaagatgaagcagagtgccatgcctagctcctattgaaaaggtaatcactgttcgcgtctagctgtttatcaatattgctacctgcaactaactccaaatttagttgataaatttcttgtcaattacttgttgccgcatgaaatgatgtccgcctctcctgacaatacatctcacagaacagtgagataataactcctgcatcacgtggtcgcttctgtattgctgttggtcgccgtgtacatatgtggcccgcaatttgcgggctaccatcgttatattttctttcatatattaccatgtatgaattatatggttgttttaagatatatatatatacacacacatgtaaataggtgtcaattaa

SEQ ID NO: 40408 - DNA, 847 bp, Oryza sativa
agtggtattttataaagtaagcggtgatacctaccgaaagtttataccctctccgttccaaaatgattatcatatagtttttttttagttatttctaaatgatcatcatttgtgttcactagatgataccccgcgcgttgcggcgggccattgtgggggcatagacatacttgcatggaaaaggagttatcgccacctcctgcgaccaagaagcgcgttgtccccaccaccacctgtgcgcgaccacgccacgctagggtccgccgcactacgccaccgctgctccgctcaggaagtcaggaggagataagacacaccgaatcctaaatccctcattgggctgctttagattgacttgggcctactgggctgcggtatattcacatgggcctcacgtgttgtgtttgaccccagttttgttcatccaacggtgcagatgcaatctaatctaccgatccaagggctgtaaattagtgatgatgtggatcattgaggattgagctttcgaatcttaattgcacttagtgggagataactttataggaagaagggattcattaagtctatttgttatttgtgcattggagtaaatggacattgatgcatgtatccatgcacacaagtatttataatccacatgcaatatcttgatttgctattggctagaaaatagtggggattgtgcatacatcgagtttgttgctagagtaaatatagtatgagagagttattagcttttattagtcttggtgtatctatgtgatatgtagatcaatttagaatggagtaagtactccatccgtttcgaaatgtttgacgccgttgacttttttaaatatgtttgacc

SEQ ID NO: 40409 - DNA, 759 bp, Oryza sativa
ccctaacagataactatgtttcttcctagtatgccttgtggatgttgacagaaaaggcagctctcataagtattatttttcaacagctccaatcagaatagcgtataaaaccaatgtgactggttgaaatcactgagcttcgaaatcattagacatatactacgcttcaaacagccacactaagaatgcaactaaattgcgcactaacagatcaaatttaatcttggacagcatagctctcatattctcattcatcatcaaactatggtcagcatagcgtatattaccaacaaaagtgactacaatcactgagctatgtatgacacaagaaaagaacttcaacaaaacgaaaataaacaaacagcataagaattcaatagagaacaagtgagaccaatgaatcaatttaagggacaaaactagaggggtggtggggttaaaatgacaggtgaatgacggttgtacgacaatgcaaaagtcaaagcttaagtaaaaaaaggagataaatgcccatgggaacatagccagtagaaccacaacaatgtactataaatctatacactgagtaacatagaaaatagacacctgctctcataatgtttatgacatcttaatatgattcagaatagcgtatattgtgatggcataacatggcttataatccttgagcagaaaacacacagaagtaatatggaacaaaagctaatccagaacataagtacataggtaaaacttaaatatagcattcttacaataatg

SEQ ID NO: 40410 - DNA, 647 bp, Oryza sativa
gggagcaccttatcccttcccccacatctttcccccccactagaaacgtcgctttcttcccatctcctctcccaagctggctgcacgccgcctccactataacctgcatcttctagctatcctcttcttgggtatgtgtcgacgagccatatgttccccggcccttactcttttctttgtcctctctagcgtgacaaacgaaacgaaaccacttttttcagattatttaatatacacatgcataccgctttcttttctttttcaattttttaatatattagaaaatatatccatgcgctgtaacgggtaaatacctttttttttcagtgatacaacaattattagaagctggataataaattgaaccgttaggaccactatacattataattaaaaaagttaatgaaaattctttgcaggttttgggctgaaaacccattgttttcttctattcttttgttgaactgctagctggtacagcacgacagaacagaattattgcaacaaacgactgtactgcattagcacgcaactaaagcagggaacaccttatctcttccctcacatctctccccccactagaaacgtcgctttcttcccatctcctctcccaagctggctgcacgccgcctccactataagctgca

SEQ ID NO: 40411 - DNA, 718 bp, Oryza sativa
attcctgcagcccttgggtttcagagtttttccagattctcagaagctggctaccaaacagctgcttctcagaatttaaagttccccaaacaggccctaagagagtatgggcggctccttcatgtcagcttcgtctcatagattgatagagtagctttcatgtacaattatgttactagtaatttcgctgttattataagacgagacgagacgacttggaaaagaggagccagcatgacgaatggattttactattatatatcacttctcttcccggtgatcaaggacgagatggtggagtacgtgcaagcgcacgtatccaagagcacacgcgataggcaagtgagaccaattgacatttgttaaaaggtgtacttgttttattcttttatttagttgccaattactataaaatgaatcatgtaacttctttcttttagaaacacagtacaaacacatacgctcgtaacatgcgcatatatctctggaagattgtgccggtatatcttgagattgacgagcgtctcgctgtataccggtacgtcgtttaccactgaaaataatgtgaggacttgaacttggatgggatggttccaccacaataaatcttaccaattatgctatactcacttcgcatgaatcatgtaactaaagcaatgaaaataagaatttcaactcatttaaaaaagagagaaaaaaaataagacttttagcatat

SEQ ID NO: 40412 - DNA, 1250 bp, Oryza sativa
ttcctgcagcccccataatcattaaagactgtattttcctatcctcattggatggatttgaaaatctgattgctctcagaaagttagtggtagcagattgtaaaaatttctgtttcttgccagctgatctgaatgcattaatatctctcaaaacattagccatttatgggtgccctaagatgaaatttctcccccagaatggcgtaccagcttctctacagttaattttgctgtcactgttgcatccagagttagacagacagcttcaaaggagggaaggtactgaatgggacaagattgctcatgttcctgaaaagaaactagaggtatgcagtgcttgttatttatttccatcgtattctgatggggttcgttgttcatatcgccttacttactgtatgtagtgttgtgtcatgtaaatatatgtgtggttgttgctcaagctgcattattatcagtgattcagtgttatgaatcatgatctacaaataagtgtcaagtatctcagtttgctatttgatttgcaaattcttctggagatgtttttggcaaaaatatcatgaagtttcataatggcacacctaagtcctaactgtcttagcatatagttccttgacagagttcagtcttgtactaatacttaacctcttgcaggtagagctaattgatttgttgacactgtttccatccagttctttctgacgagtgttgtcatttttggacgtgtggtatgccttcctgaaccactctactacatttacttcaaccgaataactactagtcatgtaagtatgtgactttaattattctatggggaccatggggttgggagcatagcaaaattttcataagcttttgtttcattacaggctcacaaaaactcatatatgggcattactacctttgcagtttatcagtgccaaactgccaattcctgaagtagaggttgtttcaagctgaatgctatttagaccattttgaatggtacgcaacatctcaactagaaaaactctaaatgtcgtgtataatgaacagattataaagtgactatgtcatttgttttcctttgttttcctctcttagaattcaagcagttgaactcctgacaactctctattacagtcattatcataactttggcaagcaactttgaccaacctagtctagtgtttgttttgttgcgatatgtttgtcatgccacacttttcggttgtgttccacttgtcataggctcatctttaccaaaacat

SEQ ID NO: 40413 - DNA, 661 bp, Oryza sativa
ctgggacagtgacaacccctttctctgaatttctttatttctttctctgatccttcctcctggattccttccatccaactagatgcaggccaccacaccacacacccaaaccgccttccagtcggcttcgatcccggtcaggtgagctttccggtttccggtagcttccggcggcggcggcggccggacgacggcgaccgtcttcaatgtctccggtcaccatcggtgattgaggcagcaacttgtgcaagaaaacgagagagaaagtctggcattggagagtgaggccgtgtggcgtttgcaaggtggtgatagattgacagggcacctaactggggttaataaactgataagtgtggctaattgcagagaaaagaaacattggttgttggttgcaagtgcacgtggtgtggttgtggcttttgtgtgcacattcctctgctcttgcgtgtgtggtgcctagaaggatacatatataattactatgaaattgaaggctatggattggagtactatggtggattgattattaatcaaatctgtgatggaagatgatcgtaagttgtatttcacatggatgcttgttggcatatgtttagttgatggaggaaacatggtgtgcttgtgctgttgtatgtgaagcatttcggaagatggattt

SEQ ID NO: 40414 - DNA, 1835 bp, Oryza sativa
attatcatttgctttgctctgcaaaaacaattcgatgtgtcaacataagtgcaaagagcgataaatcaagtgcatgtatactgatgcacgttaatcgttagactcaatggttcagatgaggattactagaattactttgtatgcatagatgcaaaatatcatctgttggaaaatagttcaagatttatgaatgctttcatcttttatgcttaacaaactatgatgcatttctttgcaaaatgctgctgtacttcatcaaagtaacgaaaatatttgccaactcatgtaagaaaatgtgtaagaaaaggatcaagaaataatttagtattgtgaaatatgggaggtgcaaaacagcttatataaggacccacccattctgaatcttcgtccttttccctccaaaatatatccggttgctcaattgggagtggaaagttcactgggacaggcacaacatggtcagctatgtatcccaacagaatagcaagctcaatgagcatacacacaaaaatggagtggagtaagcatcattagaaataagaacatatgaaatattattgtatcatgatttttcagtcagtacacattcacaaacagttagtgaagtttcagcacctcaagttggtaaatacacaccactgaccttcttcatttagtaggttgctacttttctgtgaaacacatatctgcaatgggactcgagcttcctgcaataaccatgttgattttagtcttactccaaggtagagtatttacacaattgcacttatatgaaatgccagaaacacggataggcaaattcagattgagttcatgattataaaaataaaatgaagaggtggcatcaggtggtttccaatacaatagtaaattgtaatcatacacaagcactgataacctcaaatgtagcttaaaaaaacactgacgcaacactttaagaggtggttgcaaagagctagaagaaccaactctaaacgtgtgtattttatcatgctctaagcctctaaacttgtctgataagaaaacttaacaagaacaagaatgaagactgaacgcatgaaactgaaacaaatgtcttaagcacagacaacacaaaaatcatattgatccttggtagtccacataaatactaacgtaatgacattactaccaagatatgggtttgatactgagctaaaatcgagcatttagggcctgcaaagccaacacagacaatcgcaccaaccaaaacctactcaaaagaaatttaatgcaagcattgagcacatgcatctatttttaacatatcaaatgagggctgcaggcacaatttgatgacaacccacgtattcagcgcttaggctgatacgagaaatacatagaattgtaatctcattctagattgagaaagaacaaggcactaaaagagacaaatgatatcctagtagttttgaatggtatttataccaaacaaggtactgctaattctctacctagaatacttagattgaggatccaacttgatgtctaactagcacatctactaagtatgtcctcagacaagttcttcaacacaagtcacagcttcaatagttgatagtaacttcggcaaagaacacacaaattgatcactagatcaaaatttccacaattaagcagagataatgaaagcttaaggagaacaattttaaggctggaatggacgtacagaaaacgagcatggaactcaccaattgaactgcggtatttacaggggcaatattttgatctccattacccaatacaatcgatcttccaaacaatatacttttaacataataaatatagcggacacttatacccctatatgatggtgg

SEQ ID NO: 40415 - DNA, 1390 bp, Oryza sativa
aggtattactctgcaaatatacgtgaataataacagtcagatcaaattcagcttaagaaattacaattcctgtttatcttcaggatgccatgagaatcggctattacagaaaatctgagataaatcgggaaaaaaaatgctgaaacagaactttagtaccacatgtccacaatcccttatctaaaacttcaacgcacgggtcttttgtctttctcgagtcttttcctgataactttgacatccaaagtaatgtgaagtgcacagttgcaggtatattttagtctttgttagcacaaactttttggttccacctacactactggtgcgtgttgaaaccataacatttacagctggtaaatactaattacctaatattttacagcatttgtcaaaccatggaagttgtggatagtcagtataatttgttaggtaataatatgatattttttcaatctcaaacaaattatggttagtgttttacatgcctaatgtacagaataaataccgctattagtcatataaattataaagggtagaggtgcatcctctttgatagttaaatctgttaggcaatagaatatgccgtctgtggatatcccagctgctatagatagcagatgtaaatcagggattagctactatagatagcagatgtaaatcaagggaattatccttgccttgtacagcaggccagccggccctatataacagaaggcgccccctcccattgaggcgtggccaattgccccctaatccaattctctacatggtatcagagctccgggtcccgatccccatctaacctcgagatcctctcctccagcgccgcccccttcctccctccctccccatgggaacccaatcggacctcctctctgccactagcggcgcccttggggccaattctgcccccgtgatctgccccttcgccaccatcaacatcaagctccacgtccccatgaccctcgagttgaagccctccaacttcaccaagtggtcaacagcgttccaggccacgtgtgggaagttcgggctgctgcatcatctcgccaccgcctccacctcgcgccccaccgacgaggcctggaaacaggctgacttctgcgtccgcggatggatgtacagcaccgtctccgacgccgtcctcaaccttgccatgaccgatgacacgcagacagcgagcgttctttggacggccatcggcggggtgttccaggcaaacaaagctcctcgcgccatcttcctgaatcacgagtttcactcgatgactcagggggacctgtccattgacgcctactgcgttcgcatgaaggagaaggccgacgaactgcgcgacgtcgggcagcccgtatctgagcccaacctcgtcctcaacctcctgcgcggactc

SEQ ID NO: 40416 - DNA, 3069 bp, Oryza sativa
ttagtacaattttcaaactactaaacggttcgtttcatgtgaaaactttatatataaaaattgcattaaaatgttaaatatatccatttgtcaagtttgtaataattaaaacttaattaatcatatgctaatagctttctcgtttcacgcgcgtcaacttaatctttaccttcaccagtcccgtctcttctttctgtagattctcttggtcctcttcaatcttcctgtcagtgctagtctttttgaccctgagattcttgaattcccaagcatgaagccaaaaaattgctgagaaatttgtatccgtacttttgagattgtgacaacctgtcgatggaactgatgttttaagatcgtagaggtttacaatctcactcaactatcacagtgcgaatgaaactaattagctagaataataacccaaggttaggtgcgaaaacatttcccgtcgctttctttagcagaatcgttttcccattcttcgtgtatataactacttggcggtacaggccgcatatcctggagggggaattcggggtcggatttgctatttcactttcgattttttttgtccgtagagtcttacattaagatttgtgttcctgtagatccaacttatacttatactcagttgcataccacttaaatttagttacagtgcgccaaaattagattttacaactgcttttgtctcgatatttttggcatgtttgtccctttttgtttatttcgttcaaaacaggctgtatccgctggttaaaaatttctttaagattaaaatctcaaaatctgccaatctttttaaaccgaagccagcatttgctagtgttatattaagtaggatagaaattatttacaaactcaccaaaggtgaaagagataaagctgaaaagaaactgaaaaagaagggaacaacaagaaaacccgacagcctcgcatgtgttttattgggacattctcgcaatatctttggtgccgcacataatccacaccttgatctcatatgtgattttggtcactagttgaggcaattcagtctcctgattgcggaacagtcatttgtttcgttcacaccagattttccaagccaccatcatatgaattgatttcattgctttcattttgtgtttttccccttgggatgtccacttgatccatcagtcaagcagtggctcatcgccatcgtatgtgtttagtgtctcatgtcccagctgttgaaagatcttctcccagatttggtgtgcgaaggtgcagtccttgaaaaggtgttgtgccgtttcaaggttttcatagcaaagctgacataaatagttgttcggccattgacggatttgcagccgatccgccatccagattttgttttgaagagtcatgtgaaatatttgcattttgacggtgcccatcctttctatattagctttgccactgctgagtcaatcctccaattgaattgtgccatgtatgccgattgtgtgttgtatatgccactatttgtccatcgccatcttatggtgtcttcaactccatcagttagggtgacatttcttctccatatctgtaggaacacgtcgaagaattctttaacaagtttaactgccgaaaaatcaataggttagtcccctcagggttgagtaatatgcacactttcctgttcctaaaaaaagctagtactcatcaacttgttaaaatacatctgttaatctgtttagacccttctcaaattaagcattaataactcaccctgaaatcaactgctttaaaatagtagtagtcatgttgacttgccgtactttgaggagggtttaaacagacacagacacttcatctcagaggattaattaatggcgacgagtccatgtggcagtcggatgggtgaggcaaaacgcctctgcaccggcagtgctgctctcaagcagctgcaccacagcaccacccggtgcatcgtcggccggccggactgccgggctcggctcgatgctatcgcggttatcgcgcttatcatggggtacggtaggggaaaccagcgatatagtttggatgaattttgatcaaattcaaaattctgaaaaaaatcgaaaaaaaataaaaaaaaatcatggatgtagttcttaatttgtaattaccaatagtgaagaatgtttttgaaatagagtaagctaaattcaaatttgagagcaaaccaaaacatagtttacaaattgaaaaagggaagagaatattgggccttaaatatcctacatattcttccaattatttttaatttctagttttttacacatattcaactgtatttttgattttttccctatttattttacacttattttagctacacaaccccgcgataaccgtgcgaatatcgcggttattgcggtaaaccatgcgattatcatggtgaaaccacgaaaccgccgagttttttttttcgaatttttggatgtgatttttgtgcgattttaggcaattatcacggttatcgcgttaccgcggggtgacgataaccccgacccaaacgataaggtaaaccctgtgcaccatatagtgcaggtgccacgctcgcggaacctctccaccttctctaggtcaaatgccgtcacatcgtcgtcgtcaccgtgcagcatgagctctgtaccctccccgtgcacaccagctgaccggcccacccgaaaagtgtgatcactgtgtcggtgttgctgtcatggtgatgggggtggtgaaaagtttgataatttaacatttttttcgttgtccaattgctttaattgacacttgtgaggatgacatgtggaaccatatgagtgaatgaaagtatgccaggatgtcaaataacaacagctcatatctagcagagaaaattggaattttgccattgtcaaaacggggtttcgctgaaatgccactcccaaaagtggtaacctcaaacaagggcaacatgttgcaatgccatttgatccatttcttctcagtttaatgatttttgtaatgtttattcttgctgagatgaccaaaatacccttggatcctatcttatctctccctctggctcttcctcctcttcggggtggctgg

SEQ ID NO: 40417 - DNA, 1155 bp, Oryza sativa
attgataagaggagtatatctagacatgttgttttagttaatttgcccctgctgttgctacccctgtgtcatatatactcctcctgctgctgttttatgtcaatcatgcaaattctgtacccttgctgctgctgttttttaaatttgcatgattgattcagtggttatatacctctacacttgttctttttttatgcataagaacagattttctgcacttgctcttttgatgttatgatttcctctttttatcccttcatgcaaatgattgtaattgatgcatatttctcagcaaaactgaggccatatctttcatagtataccccgtattacattggatctaatgctatttagtctaatggtaggaaatttataatctttttcgcgaaagttaaaccatgtcaacgcccggcgcaaaccagccctccccaacacctgcgaggatccaggaagaagcaaacccagccacagaggcagttgccgaaggtcatcccgcgacaatggcggtccaacaacccgaaattcatggtaatttataggataaattttcaccatatgaccacataaattttagctagcaccccttagcaaatattgccttctgtttgtgctgcagaattgccgcaggaacaacatacgtcgatgtcgggcgggacaagtgcaagtaggtctagtagaaatccgcggtcacaaaatatatggccgaccacagtgcaagttataagagaggttgacgctagtggtaggcccacggcgcctaggactgtcattggaagatggtctaactgctgcgggctagcggcacgtgagaacttcgggatcctccataaagatatcggcaaggtcacagaagccgagaaagagcgagcttggacggcaatggagaaatggttcacatttccagccgaagcaaaggataggctcaagcggaaggcattccaaaagatgggcaaagcttggaagaattggaagtcgaagctcttcaccgagtttgtcaacccgcccggcaatcatacaccgttcgatgaataccctcaaataaccgaagcggtgtgggaggaattctgctctctcaagaccacccaagagtttagggaatcaagcgaggcacatcgcgtactgcaacagcggaatgagcacccgcatcggctgggc

SEQ ID NO: 40418 - DNA, 517 bp, Oryza sativa
aacattgtcctaaacgactttctttacgaatatgaatggagtatctctgtaaactcccaatacctccttaggaactgtccttcagtcagtgtcgtctgtcgtgtcgtccccttccttgatcctctgctctctttcccatccagcctccgggactccggtctcgcgtcaaacgcggattgatcgacaaggagattggagttctgatcctgccaatcaggtatggcgtttgtttcccctgtaacctagcttcattaagttatcctaggactcgtcgcgccgccgcgaaatcgtgcttaggtactccagtggcgcaggattcagtccttataatatcctctatttttttttaaatttttcggaggaaatacagatacttcgggttttcgggatagtacttcatacatgaagcaacgaagtttttgagaacttagtttatctgggcagcatgggccatggaaagatactccagttgatggttatttggatttcggagagggatctgctatcattaggaatg

SEQ ID NO: 40419 - DNA, 1388 bp, Oryza sativa
cccaaaatgcatggggagttttggtggattggttagtgtagtccatggacggaaccgacctagtcaccaaaatttttcatgcattttgttttctgtcattctttgataattaaggaactttattaggtttagggtttgaaatttagttcaaatggaagaattgattgattggccgcagatttaatgttgttctgaggttatcaaaccatcacagagtacaaaatgcatggggaattttggtggattggtcagtgtagtccatggacggaaccgacctagacaccaaaattctccatgcattttgttttctgtcattctttgatgattaaggaactttgcagattatctaaacttgtggatttatataccctttttgtctatgaataggtgaattgcatgaattgttgtttatatacatgatttatatacccttgctgctgctgccacataaatgattgtgggctgttttattatctacacttgattgaattgaatggatgaattgctgtttacatgaagttagtagtactgtctcctttttttttgatgaaatatatgcatatttgagatgtgaaatatatgaggtgatgaatttggactatttgtggatgaaatatatgcagtattagatgaattagtctttttgtattagatgattttaggattaattttgctgcattggttgaattttgcatgattttaactagataaatggccagtgatgttttatgttaatacacccctgccactgctgttattgtgggctacttgttaatacacccctattgttgctgcccatgtggagtatctttgcccctgttgctgctgcccaatgtgttccttgttaaatggccagtgatgaattgctcaataagaacaaattatctacacttgttctttttttatgcataagaacagattttctgcacttgctcttttttctggattaataagaggagactatatacacttgttttctgtcattctttgatgatttatatacccttgctgctgctgcccaatgtgttccttattaaatggccagtgatgaattgctcaataagaatagattatctacacttgttcatttttttgcccctacacttgttcatttatatacccctgttgttgctacacctgtggcatatatactcctcctgctgctgttttatgtcaatcatgcaaattctgtacccttgctgctgctgttttttaaatttgcatgattgattcagtggttatatacctctacacttgttctttttttatgcataagaacagattttctgcacttgctctttttttatgcataagaacagattttctgcacttgctcttttcttctggattgataagaggagtatatctagacatgttgttttagttaa

SEQ ID NO: 40420 - DNA, 1970 bp, Oryza sativa
cacaggtgggtcaccctgtgacggctactatataccggagatcatcacctctgacgggcctttatttaggggctcgtcagagatgagacacctgtgacgggtcctaacaagccctagtctagcttagaccaacacctctgacggccttctattaacttgcccgtcagaggtggatgtcaccactgacggccggccacccgtcaaaggtgactggacttaccagtgaccactgatcactgaccaagcccaaaaccgtcaaaggtgagggtttgggcccgtcacaggtgaccttgaccagtgtagtgccggtacgaatcaagaaactactcggtaaatcaaaatcttgttttactaaaaagtatatgagtttcacctgttttttggtacatacatgtgcttctacacaaagtcgcttaggcagtgtttgtcaaatggaaaagggaaatgatttcccacctatctttatatcctaaccattcattcttcctctttcatttaattctaaccctttatttattttctaatccgaatccaaccctccattttccattatctaaacacacccttaagagttgtattcggtgaccgtatggttttcaaactgtaagcatgtggttcttttaaaccgtaagattagcctctaaactggggatgcaggtccctctacagtgattgcaaacaactctatatgtacacaatgatctaactcttgtgctatagctatttaaattagcacattagctagacactgtaacaatagtgttctaacaacaattaatttaccaccgaacacttctttaccatagcattatgatttgtaccgttcaatgaagatccaacgcattaaaacatgagctaatgcaaggtactttagcacctctgaattttcttcttcaatgtagaaggatcccgatccctaaactggacagttagttaaaagagcttgccaaattcagatgcatgcacaagcattaacggcggttagtttaatttggagtacacactggcagtacgagtacgaatcttttttttccatttgccaaattggcgtcaatacagaatacactgtacatctatcattttttcctggggtgtactggtgaacagttgaacactgaccagtagagttgtgtcgtatggacgaattcagtggcggctgcagtgatattgtactgtagatgcatacgagagagggagagagagagagacactgtttcgatctggtcgtgtcaacccctgcagaaacgacgcaaactggtaatcgatttttaaattgtctgtcattttccagagatttatgatctgtggttgtacttgacctgtttgctggttgtttgtggatggacttgctgttaagtttgagactgaaattattgaaatcttggccgtgtttggttgcaggatgttttctcgtatgttgcatgttgcacaacttcgctttccatcgggttgttgttagcaactttttttgacaagttgacaagcacgatcgcagcaccttaagccttgcggtgatcctagagtcgccaaccacctcgatctagcaaagagctaaacctagatgggttttgataactaaaccggctagcagagccgatttctagataactacccgtctcgtgggcaaaacagaaagttttcaggacaaacctacaaagaggtgtcgcactctcgcagcggcggcggacggtttacggcgcaaaccgacaaagatggacaaactaagagaaaactaaaagcaatatgaaaagaacgattcgattgattgatagtagattgatttttacaatgaaccggccttgtcccttatataggggttggtcttgccctctacaggcctttctccacgtccaactcggggtagaaaccaaaggaaacccgaaacatgccttcccgagcaaggaaacctcgaaacccgacgcaacagaatcggactcgggcctgccggtcagaccggccacacaccgccg

SEQ ID NO: 40421 - DNA, 2541 bp, Oryza sativa
taggccatgtcagcaagacaccggtgtcccagatgacataaatcttttgatagtaagaaactaccccttttctaaatcatggcgccgtgcaaagtaactttggctatcggtgtatgtagctttggcaacatctttgccctgtcctaaaatactagagataccaatcatgtagaataactgatcagtatcaacaatatacatacgcctatgaacaacaataataataataatttgatcacctagtgaccattgatattttttgccaaaaaaaaggaatatcaaagaggagctccttgaattaagatagaatagggcacaagaactccataaaaatagacgccagtttcagattcaaatttaggtggtctggacctgagagctatgctcagttctcgaccattgatattttgaccacaccggcgcattaaatgaacctaaattaagcgctcgaactacacaaattaatcccagtttaaagggagataattgggacaagtactgaaatttaaagagatatatataccgaggttgacattaggaatgcgacatgcttgcctgattggtggcagcttaatccgcagttatttctttatcaagccacttgtgttgaggggggttacataatgtgattattgtttaggactcagttcgttctttcttgtcccttcatcgcctcacgagttattggaaaaggtgacgccaagattaattggaattgggatatgggatcgacatgaggaagatgccaaaatcaatatatttgttttctgattatgagaagatgaaagattagtcggcgagcacactgcattcagagcataaacatatatataccaattgcgtgcctgagaatattatttcgctaagattaccattttgaaattgacaatgtttatatcttattagcacgtgtcgtgttaacttagggcatgtttggtacagctccaacctctaaatttagcttcaggagttgggtttggagtggagttgtggagctgcctaaacccagctccacatctctagttcattttgtgagagagctccacccaactccactcccatttttaatggagctgaaactgtttggctgagctccagctccaggagctagagttgtgacaaatatgcccttattctagctataagcagtaaaagtgatgaggctataataatgcaacaactagacatgggtccttgtattaagggatagttatttttcagtgattgacgatatacccgttgttataaaataaaatgggaccaatctagaaatgactaattgattttgaattaaggagggggtgaggctcgaacccggaccggctagccgggaagaccctaggcctttctcaagatgttatcgagaagctcgtgataacttcatcaatctgaagatgtgttgactttccaaggtactcataggagaggatatacaggtacgggtgttgcgagtaactgcatttgtaatgtattctaatactaatagtagtagtaataataataaataataataacaataatcataatgcaaaaaagatcaaatggaaatttcaactttcaagcgatttttttttaaaaaaaagcagctgccttgccatctgaattttcgaagctgtgattgatttcagcccaattagagttggactaggccaagaaaagttgctcgttttcgcacaacccaaaagggcctctagaggggtcacaaggcctagtgttttactgggctattaaggatggcggcccatacaattttaactcctcttctcaaaaaacaattttcctcttatttctcctctcttttgttctttttttttttggacttctttctcgcggaggtctttctgcggataaggcgaagcgcgtttgatcgtcgctttcagatttttggtcgtgggaacttgacaatccagatcgcttttgttcctatagcatcttctatattttttcccgaatttgaaattctatccttttttttttctcccgtcgttttacgtgaattctgcccttacttttgttgggtttttgcttttggattgacttttggtgcgttccataaacagtacgctctgatagatccatgaaccgtgtgttctctgactcctacatcgagggggaaatttagttgggagaaggaaaggaagttctacttggatcaataagttgcgcaccaagtgttcggcgttttgtgtctaagaagttggttgggctttgcagtgcttcttcagtaactctggatgcaatttcttttagttttggttcatgtcttactaggtttcttgttctccttctttatctatagtagtatgtgaaatctaacaggatcgaaatgtattaatgggaattggggatatgtaatgctgaaaatggtggaaaggtagctacagatctaaagaatcaatttatcagtcctatggctgatggtttctagcaaatcggtcctgcattcaatatcctatggaaaatttgtaaaccttgaatatttaatttagactcacacgaattgcagagctgcatgctatgacagtagtagtttttattttt

SEQ ID NO: 40422 - DNA, 641 bp, Oryza sativa
catccaaagttcatcattcatccaaagttcatcattcatccaaagttcatcattcattcatccattccattgcatcatttattcatccatccactgcaccattccattcatgggcatgagagagagaggggtacctggagaggagacgacgagcagaggaggcggcacacggcgacgacgagtcccggcaggcgcacggcgcacggcttctcagcacggcggcgcggcggcggcttcttggcacggcggcgctgaggaggagaagagggggttaatcggcgaccaatagtaaacgaggggaggcggggggagtgggctcaccgtggaggtccggtcgagaggaggaggcggcggagaggagatcccagtggcggcgacgacggtcctggcgtggcgactgagaggaggtcccggcggccgtcgagagagtgagtgaggcggcagcggtggagaggtcgaggtggcggtggggaggacggcgtagagggcggagatggcggtagagagggcggcggagatggcggcggagaggtcgatggagatggacggcggcggtcgagagagtgagtgaggcggcggtggtggaaagggcggcaaaaaggtcgaggcggcggtggggagggcggcgtaaaaggcggcgg

SEQ ID NO: 40423 - DNA, 704 bp, Oryza sativa
gatctggaagatgaagtttgggttagcacaattgcatctctgccaagtttcatagcaccagtctacaaaatacgcaccaagaaaacagtaaactcaacaagaataagaacaatttttcacataaacaaacatctgcaagtataaatctaggtcgaacaagaatgcaatacggtaactgttttgaacactagcacatgaagagtatggatttgcctcttaaaatcaataaaagggctaaaggagcatgaacagagggtgtgtttactgaatagatattcctaacttctaattgacataactaacatttattcaagttcattggttgagcagttaaatactgtacagtccaagacttttaagtcatgctagcttacagacagaaaaaagaaatgaaaggacgtcagctttgagatgctgtatcactgcatagcaaaatgttacactctgcctccaaaatccgtgttagcgcacttcttatgtggagcaggcctatgttagcatagcactgcgcttacactttcatcccggctcgtacaatggttggagaaccaaggctataagccgctgaccctcacccacctaaacttccaagatggtactaaaccacctcctacaaccacaattgggccatgggcctcaactacaccacactacaggtggcaaacgggctacagtgttacacaaaacctacctaactagcaccc

SEQ ID NO: 40424 - DNA, 606 bp, Oryza sativa
ttattttttaaattattaaatatcagaaatgttaagaaactgataaccggagaggaggatgacgccaacaggttaccttaaatccaattccaaacctcccaatttgatcctggcgttgcttatccggtcttttgtgaccgaatgagatcattctcatcatttcagcacaagtcattccatgcccatcatcaattacagacaagacagggatttttttgtctgctttcttcgaaaacaatgatttgactgaaatattcaaccttcaagaaaggtaggagaacaaataagaagtcagctcaatcaaaataacacaaatgcacccccccccaaaaaaaaagggggggtaatcttcaaaatacgctaacaacacagtcaaattagcaaaagcctcaaatagtctttaaattatgtatacaacactaccctcagagaggaaatgcttcctacacaactacacatattactgagattacattctgtaaatactacaacaaaagcagtaaatatgtaaagtttgtatactaatagaatgggcatgtgcatattcatctggaagagatgtaaaacaagacaataaagaaaacttagtttggcatattggaagat

SEQ ID NO: 40425 - DNA, 602 bp, Oryza sativa
aggcttctggcattgctccaccaccactctttcggaatatgcatgcttatcagaatacagcaggtggcaatgctccttccaaaccaaaggttaatgctccgaacctgacactccgaagaaaatacatcgatgaagcaggcctaaagaaggttgttgtttcctcaactgaaagatactgtcttgcaacttctataatttctactgatctcttgagcttctaggtttctctcggtcgactgtcctctttcaataatttaaattgttagattaaacctctcggaaaatgatacgtgtttggagtaaaccacatacttgctgatcctctccagttgtgcatactagcattgcttgttaatgcattagtattcattggctcattgcatttacagcctaatacttcctggttgtatgagtctgtagagtttcagtcatggctgttctatcaggattcaggatgttgatcccttgcttctacctaactgcgtctgcattgcaaagtttgtgattgcggtcttctttttatttgttagtttgtattgcccattaattaagattcattgactatggatagctctgtttgacagtaccagactacccatcaa

SEQ ID NO: 40426 - DNA, 3868 bp, Oryza sativa
caccacctcccccgccaccaccaccgcctcctccacctccaccgctccataccccccatccccgcaagctcgtatggcgcttaacatcgtccacgtccccgcgcaccgcattctcccccttcttgagaaccacctcatcttcgcactcctcgacgccgccgttggagttgccacggcggaggtcgccgcttgcagctcctcctccgccagcgcgagccgcaggagcaacgcgccggcggcgaggaagagcaggccgagccacggagctctcctcctctggcccatattgcctcacgtacacactagctagctcgctagttccccttgccttcttggcagctgtgtgatgagctaggctgccattttggggtggctggctcgcgtatttatagccttcagggcgactttggtgagcagagcactatagagtatagagatccatgcactttgtatcggtaagaacatgtcggcgaagtggaggagtccgtgtaaatcgcttatgctacaagcgatgatggatgtgtgcgtccgtcctactacagaaatgattttcacggaccataggtttttcttttcggaatcaggaactgaacaacacagtgacagtgtatgattggttaattatctgacgtatctcagatcgacagatgatttatagatggtgatcactgagctcataaccaatttggagatttttataggttatgaaacggatgtataaaaaatgtgccagaccattgtcttacaatatatatatcctttgctttcttggaaaaaggctgcaaaattccagcatgggtcatcgatcaatcagtgcctctttgctttagcaacaaatcaaatacatgcatatatactcttacataggctacggtagtagccattcttcaacatcaaggatgaccacatagcgtaaaaggaatcaattggaatccatctcccaatcttaacgaaattggtcgaccgaacttttggccaacccggcaaaatcaataggaatccatgactctctaagtatgcccgtaaccataacaggttaacaaaatcggtcggttttcatgaaactgtcagcggttggtttgtaaaaaccgattaatttgtatggagttgactaacagtcaaacaacttttggcatgttttcgtttagttcttggcaaacggcggtggggactgattttcactttaaaatatctgaaggtaaacactaccttatatcaaggcttagtaccatgagaagttaaaaccagtgggtcaccatgctaagcacaaatgaacaacactgcacggtttaatcaatttcatatacacattatatgattgatacaaggggagaagcaccgataatatgttggtgaagttgtaatgtatgagtctacccaccaagatttaaatattggtgtccataaatattacgtgcatatatgtacacgcttttagtaagatttttaaataaggtggaggatttatcgttggtcttcatctcttgcagacacgttcgcagggacgtggcgctgggttgtttatctatggactattaattttgtggagagccaatacaaattttagcaagataagggatttatagctagtctccatatcttgagacattcgccggggtgtatggctaggctgttcatttgtgaactatttattttgagagccaatgagctaatccactagccgttgagttgttcttctaatcttgggcttaagattgctcgatttggttttagtcggttcgaaatggaactaggtattagcaccccaattatgtgatgtatagtggtgagtgcacatattgatacatgtttttccatatctttctttactagtttaaaaccatagttggtcttctttctctgtaaaaaaccgcgccctcttcttcctttaaaaaactccctagaaaaccactcccctttttctgaaaaaccacccatcaaatccgtaagtagtaataaaaaataacactcagatttgatactttcactatgcaattaagcatggcaaaaaccatgcaacacagcacccgttgatcttttagataatgaaagcttaaatacaccaagatgatatatttcaatcgagtctatccccggcctctgcatagaatgtacacagccaaaaaactagatctaagaagacttctctatcacaaaagacagaaactagtggctattaatccgtaaactagacctccacccatgcttctgggtaaaatccagtaaaaaaaaagagcaagaaacctcacgtacgtgagaacgaggcaactagcagatcgaatcactgtgatcacggcgggcgccgacgaggccagctagcggcggcggcggcgacgacgacgacgtggttaatttgatttctgttcgatcggagtcgcagctgtttgttagatcgctaattgttttgtcgacgacaacgctttctgcctgacttcctgccaatgggaagcccacgtacgattgaattgcttgtacagataaaaagaggaagcatatatatacatcgatctggatgtgattaattagtgagtgccagcacggcatgcacactaattacttaatttaatcggttttgctgcatgcataatatgcatcagtgcgtcgtgttggtaggtcaattatattagtcatttgagttcgaatgaaattatgaactcctttgcaatgccaatgcatatatagtcagttagtaacacaaatacactagctagtagcaagtacatgagcaataattgcgagccggccgccatcgtgatgattgctctggccttttagctaagaaacaagaagaaaatgaaagaaatgtttacagcaacaacctgttggtctctcgtctcttgatgaaagcaaatgtaatatcaggagagtgtttcgagtataacccagtgttttccctgtttaggtaagagaaaagggagagaactaatggtactcaactcaccattacgtgaaagcattgggcaagatctaccatctcaaatgacaacgaacgaaacaattcgtctggaaatagcttcaaatgatacagacacctcgtgttttgtgcacctgatcagccgccatatttggggggaccaaaagaatagatctcaccagatcattttaaacaggtactaccaattttaaataagtactccacacactacagattcacagcatctaaaagtaaactcacctttgccagtaattgcttatccctattactttttttctttaatcatttcctaatcataatgggctagcagcaatcacaaggctactgccaagataagagaacgaaggctagactttgcttgaaaataaaggctttcatatttcataactttatctatgcaccacttacagtggaacaaagctgactcactgaagcaatccatccttgtgccttctccatttcttttgacttgagcagaaatgctaacaaccttgaatatgacaccaggtaaaacagttcatgcgatacgcgatctgcttcagtcagcagatcgctccgataattaccattatttgtcaatgatttctttcagtaatctgacaattctacaatgatacagatcacattgccaacgctcttaacttacacatctaaactaatgccctggtgtgccttgtgtgatctaggctcttacatgttacatctactgctacaaaactggaaggttaatggtacatggtcgcgccccaaagagagttagtccacaggagaagcagattacgaacagcacacggtgcgcattcttccttgaatctccaggttccctcgggaagcagtgaagcacacgcagccacgctggctacaaactcgggaagcacaggcatgccaatcaatgttggttcctcccctctgttcttcggagtgagcttaaat

SEQ ID NO: 40427 - DNA, 814 bp, Oryza sativa
taacggaaatctagaaggttgtagtttggatcttaaggctaatgccctgtttagatgagattaactaattttagtctagtccctcccatccaatgatccaaacagcccctaaacttgaaccaaattcaaatctcacacagcctgccccacatcacacatcacagtggcgcaattcaaaacaaccaaccccgggtcccacatgtcacagacgcaccagacaaatcccccgtgtccgcgtagccgcggttcccccgcgccgctctaatcgccagcaccaccgcaccagccagtcagcccaccatttcaaacgccacactcactcacaccaacgcgcacaggcgcaagcccaaactccgatccgttcgtccgaatccccaatccaaaaaaatcaaaaatcccaacacaacaccaaaaaaaaaaaaatccccctcgaatctaacccaacccctcccctctcctcctcctcgattcaaacggtgcccaccctcgccgccggccgccgcgcgccgccgcagtagcccgacacgcatcgccgccgccgccgccgctggagcgttggcggcgatggaaaccctaatggtggaccgcgtccacggcagcctccgcctcttcatgcaccgcaacgccgtcttcctctgcgagcgcctctgcgcccagttccccgccgaggtatgcatgtgtttccctggagtaagcgcggttcagtcgggtgcttggtcggggggtgggggcggcgatttggggtgcgggcgctcgcctgcgccgggggggtcgatttattggcattgtttaggttttagtgtttaggcgtgcg

SEQ ID NO: 40428 - DNA, 3287 bp, Oryza sativa
ttggccatccattccacacgaaaacaaacaatccactccaacctctttttatttttcctgtgcatgggaacgaggcaatcaacaaactaatcttcacaagcttcactcctctgacacatgatgattttagttagtgggtaggttctttaaaaattcctatgtttttcctacgctctatccgaacgcatgtttatatagtattcctatgtttttcaattctctgttttacacgtgcattcctatcatattcctatgattttcctattcctgtgttttttcaatcctccattccgaataagccctaagcctatatagcctcgccacgtgggattgttctttttgtttctttttcttttttttttaccgttgcagtaattgtgaccgtccgccaacctcacacatcaaaacaagtcttttctttttcaccgttacagtaatttttgaccgtccgccaacgtcacacatcaaaacaagtcttttctttttcaccgttgcagtaattttgaccgtccgccaacgtcacacgtcaaaacaagtcacaaggttatctcttctaccataacggcagtagtattagagcaagtttaatagtacagccaacaacggacttcaaattatttatagctaatctaatagcttattcatataatagttaactataaaaatatactccctccgtcttataatataagggactttgagtttttgtttgcactgtttgaccacttgtcttattcaaaaaaaatttagaattattattttttttgacttactttgttatccaaagtactttaagcgtagcttttcgttttttatatttgcacaattttttttaataagacaagtggtcaaacaatgcaaataaaaactcaaaatctcttatattatagaacggagagagtactacactattaatatttggtcacacctctcatacacatataatgtcttggagtccatgttgacatataatgtcttggagtccatgttgcagctggctacaaatctgtagcccgcttttttctctctcttctggatatgtggttatagctcaatatgtggttatagcttgtttatattctgctattgtacctgctcttaaagattgacacgagggaacccacattggaagatatacggtccccacatattaatggctataatggtagtgtcgttatgatagagaataattaatcatccagtcatgaaacaatttatattagagtaaatttcataaaactacagatactttgcacgatctatcacaaaactatatatttaaaaaattgtttcacaaaactacagatttagtgtcttcatttagcacaaaactacaggtactttgcacagtatatcacaaaactatatatttaagaatttgtttcacaaatctatagatttaatatcttcatttatcacgaaactacaggtttagtgtctccattatcacaaagctatatgttttacactaaatctatagttttgtaaaacaagttcttaaatatatagttttgtaataaattatacaaagtatatgtagttttgtaatagattgtacactaaatctatagttttatgaaacaagttcttaaatatataatttgtgataaattatgcaaaatacctgtagttttgtgaaatttactctttatattaaaataataaatacatttttaatttatttaaaatttaattgggttattgggtttgccatctacacttttattatctcaccgcgtgaaatcaccgtgcataccttgtgtattgtctaactaaccgccatgagtgcctcacaaccaccaaaattaagtgtgttgtgtgcatgggcatgatcaggtgaaatttaggtgcttgtttccgtagtttggttttaattgaaattacgttgttttgcaggagaagatgggtaaacttcggtatcattatcttcctctaataatcacattagttgacaattatgactaaccaagcacacttaatgctctaatgttttgtggcaaggtttagaaataatacaacattataaataatacacttttaatggaaaattgtcaaaaaaaaagatgttgattgttcaaatcacaaatttagcaccctatataataaccgtagtttgataaggtacctgtgttcgacaggtacgcctgtcgaataacaacagttcgataaattagttggcttgattaaaaaaggaaaagagcaaccatggatcccaaggtatgatacatcccactgctagggatgaaaacgagccaagccaagtcaggcttgcggtgactcgtaacaaattaggcttggcttggctcaactcgattaggaaaccaagctaaaacttgatctcggctcggctcgtttcctgactcgagccaactcaagctggcttgcaagatttcctattgaaacacctcttcatatatattttgtaatcattaaaaaaatcaagaacaaatcatcaacatataaaatttaaataagtttatatattcaattcttaatatcttaatgaaaaatttcaaattgacaaataataactctataaaaaataaaataatccatataagcacatgatggcctagactcacgagccaaacaaagcagctcacgagtcagctcgggctcggctcattttagcaacgagctgaaaaagaggcttaggtttggctcatttgacttacgagctgagctaagccaaccaagcccgagctgatgagttcatgcgcccgagctttttttccacctctacccacagcccactcacattcactcatcactgtccagattcatagtattataatgcgtcacatccggtattagattcgttttttttaaacggtggagtatagaccaaacggcatatcttagccttagtaaaatactataaatttaaagttatgtatccatgacttcactactatatcaccagatattatttgtggcttcttctactatatttgttgggcatttatttatgagaagttcaacatattattatagtcccaaaaataatggttaaaaattgtagtgcgagaattaaggccgtgttcttttcaactgtaacatcgaattgttaaaatggattatttactccacacttcgatatgtacattttaaaaaaatctacctcatttcttaaattacttgttataaactatctataaagtttatttcttacaatatttcatttatacctataatatattaataattcatagtataataatctaaatcacgacctaataagatcatactagtagtatgtagagctatcattctaactaccctagcag

SEQ ID NO: 40429 - DNA, 941 bp, Oryza sativa
cttcagaagtagatgagaaataacaaccagcatgtacttgagaaataacaatccggcattcctggcattatttgaacgcggcaagtgttttgtttgaagaatgtgaaaagaaaaaaaaagctccttttttagtcttattgtaactgtaacagcaagttgtaggttcagatgaacatctataagaaggtgggaagtgacatttgtaactgtatgcttaagtgtctgttaccctgcgactaaccgtaaattcgaaatatcactaaaaaggttgccaatggtttgtttgcctctccagaacgctacatttcctatttctaccatgccctcggaaatatttgcatccacttcacagccagtaattttgtacataatagtaaattttataagcctatgaataatttagttttgtgtgatcaagatcttcatttttttttgacaaaaaactctcaattttggtttcgtttctatatgatctttccatgtcctatatagattgatatatagacaactcttacaataggttttgcatttgcataattaataatatgactctatagcggttccattttgcttgtagcaattataagggcattataattagaggacatatccagtgaaaatgagccaagtgttgaaaactcgtgaaaatcatacctaaaagtttcgtaaatttatgaaaaaaatactagagataggtgtagatataaaatacattctcaccaaatctcaactccaaactcaagttagtttatgagaaaaaaaaagacaaatttcaggtgaattgtaaccctgttactataattatactacaagggctaattcacaagttcatattgtagcaccttaattacgtagtacgatcttaactaacggattttgattagataagcagctaggattgttcatccactatattaggacctctatgggggagaatccca

SEQ ID NO: 40430 - DNA, 2872 bp, Oryza sativa
aagttgagagtagtttagcaagagagatgtttggtgttgctttgcactactatcatgtacttagctgatagctaggtagctagcaccttgattgccatgtgggtatggatcatatagttgcctcttcaggtgattaattaattaacatataatcaagttgtgacacatgctaacataactagcatgctcatattttatccctagagcatacatatatcacacacatgccctttggactttgttgttgattattattactacaagtaaatacatacatcgataggctcacagcgtatatacgtgcacatatgaactatgacgcaacaagttgatcgtggagagaaaaaaatattttcaagttgaagattgaaccactgctttggagccgtgtaactaaggccatatttaagagaacttttagccagttgtaccttctctaaacatgataaattctcacataaactttaaaaaaattgtaagtgtagaatccagatgacagaagccaaaaaataaaactagaagtactaaactgaggaattggctttttcagatttccaaagctagctacgcaacctaattttcactagaaaattttaagctccgctaaaccggatagggcatcaccgagagatatcctaaaatcaatctccacaattttgttttcagaaatcataagcaaaatttgaagtgtgaaaatatttatctttccaacatatgtctaaaactgatttcttataaggggaaaacatatattgcaaaccacatatatagtgaaaatatgaaaactattgttggatccataaatgaatgtatgcgatttgtctacgttatcaggagtaaaaattttactcaataaaatttgtactcatagttgaatctgggagtaaaatttttactctaggtaacgtggacaaatcccatatgtctatttttagatcaaacaatactttttaggttttcacaatacatatgatttgcgctacatatttctcctcttaaaagtgaaatgcatgtgggctcgaaatatgatttttcaatccttccaaacgccgttactgctgatgaccccccgagctcaccctcaaatccgtggaattctcgacttgtggagagtggatatccgcggattgggaacgagtcgggaatggagccatttttttttccagaaatccaaaattatagggttggggatagtatagcaaaatagcatagcccctgcatattttgcgatagtccgtaaattattttcgatcgttggatctagctgggtagaatccttttcaatcatttgatctaacaatgctcatccaataattgaaaatgatttgtttgtgtgaggtcccggtacctgaagatattttttattggaacgaagcaaatcttaaattttatcctaaaaactaaaattgaatttttctgttaaactaccaacagaatttcccttctcctccgttaatggcgcgctatctccttgcgcttctccctgaagccacgccatgcctagcaacagagcgaatatcctgcatagcaacaaagcggataatccatgcaaggcagtaattaagggatctgtgtttagttcacgttaaaattgaaagtttggttgaaattaaaacgatgtgatggaaaagttgaaagtttatgtgtataggaaagtttggatgtgatggaaaagttgaaagtttgaaagaaaaaattgaaattaaactcggccttaaatccttcaaaattggttttggggtgaaataggaggatcattggtgatgctcggcgcttgattactgctgatccagcgttgcgcgccagcgagagccgcggacgaggcatcgtacggcgctagcggcgggcggttgggatggatttctcaccgtctgtctccggacagcctggttgttgcacgtttctgtttcggctttagccgttggcatgcaaattttctaagttttacttgcactaataattttggtagaggattcttcgccctcgtgcgttgctcgcgtatacttgcttcattttaccaatagataactctgttgatttttgattttgatataacgtatacattgttgattggatgtacccgactacattattagtatagcatgagaaatgcgggtacgaaagtatacatgagattgtggtaaagtaagtgaaaataagggatttctttaccaatttagaccaacaagataaataatatccttaatttagtttatatatatagctttaaaatgtctcacatattacagtggtggagcaagctagctaattaatctagccttccaactaatactcgtcgagaactatccaacaactagctattgactttcttctatggatctacgatccggaaggagttttgtttattatctgctacattcctatatttgaacactccttcgtatataggtatacggtattttaggagattacgaacccaagtataaaaaatatacctaatttgaaacattgatagtagtccctgatctcaatgcaaatgatggaaacaacgttcccggctatataattcgagaaagttaactttgctgggatatttgatcactcgagaattagagaaggcttgtaatccttgaacaagttctcctcgaccataggtcgcaacattggcaagttttgaatttggattgaggtaaaaaaaaaacagccctcatagataggaaaccgctaaatttatgtagaaaatttctccggctttctcgaaatatgaaccatcacttcgtggtttataagacctatttacgagatttattggagttccttttgcaagcaatgtcgttcttctccctttccgccctcaatccaccgtagaccctagccaaagttttcctttcatcaccaagatcccgatgga

SEQ ID NO: 40431 - DNA, 567 bp, Oryza sativa
  unsure (1)..(567): unsure at all n locations
gtgagccatccgccngcggaccgtcacaggtatcccctcacctgtgacgggccgaaaggaaaacccgtcagaggtataccagtgacgagttttgcttccaacccgtcactggtatcccctcacctgtgacgggccgatacattagaagccgtcagaggtgatgggccgccacctgtgacggctttcatttctggcccgtcacaggtgagcggataccagtgacgggccgttgaatagaagcccgtcaaaggtatgagcaatacctttgacgggctttttttatctaactcgtttgaggtgtgttgggtctataaatacccccaaactgccaactgctttccatcccgaccattgtactgttcacaaatcggttgggagggcaagggggcgatttttttgctaaaattcaaggtaaaaaatacattattctccattcattctcaacatatcgatcatcatttatttttcttcgtatgttgttgatttcagatggatcgtagatggatgtactatgcgcatcgttcgtctaccgagtatagagagggggtcactgaatttgtcacattt

SEQ ID NO: 40432 - DNA, 1400 bp, Oryza sativa
tgcttcctgatcattaagtgaatgaaatcaaccacataacaggatagtaggttagcatttccaacacaaacatcgtgaacatacctgacacttaaacaagcaagaaagcctatacccttcccctagtgtccgcaagagtgccattagctccctgataccaatagctaatttggagtcctgtgacagaactcgttcagatttctcttgctcgggatatcttccatcaactatacttgtagaagacgaagttgaagttacattatctgtccacatttcatcaacaacgtggtacctgtttcctatggttcagaaggggaaataaaaccatcgtgaatattaatgcaccattcatatagagaaagctgatgcgattattatgataattataatttcacaaaccacgtaattatgatatcgaaaaggataagttgatggattggatgatcctgcatccagtgaaggagaaggatgtgtgatcattttaaaagtcttaagtgttagggctcttgaaacaggattcatggtgcaagaagttcctttcgatttttttttatcacaataatcaggaaaccttatccataggagtgaaaagttcaaacaagcaatgatacagtaaaaatgtatgaatctggatgtaaatatttatgtattttaggaataatgatctaacatgaggcgccaaagaaaaggataagcaattctgcagttcatatgctacatgaagaagaaactaaaaacaatatgataacggagacacttcaagggttgaatgatagctgataatgttctggtggtattatagatgcttaaaatttcagctcaataatagagatatttaaaaggtatatggattaacatgaacagccaataaattcggtgagtagttgcatgatgtttcttagcatcctaaatgccttgtgagttgtggcttggtgtcattattgtacttttcaagtacaatcaatacaatattgatgagtgagttttactaatgtgaacccattgcacatgaacatataagcaaacatgcagatatatcctgattgcagtgtctataacaacatatcaaccacattttttgcgaggcttatataatttgaggcttatataatttgaggcttatataatttgatgagtcatccatgtcgaaatggtaatcaccttcatcaaaattttctgttgcctgtggtttccctttcctaacttgcacggaacgtagagctgttgaacacaattttgatggtgtggacgagtttactcgcaatttacctgacgagtgatctgttccattccctccaaattgagagatatttgagtttgagtttattgttgtatctctagaaagtcttgcacttcttcgaggaactgaatcactactctgattaaacagccttccagaa

SEQ ID NO: 40433 - DNA, 1421 bp, Oryza sativa
cagtgaagggacttgaagcggcagcacagtggggtatagcgcatattcacttggagacggactcgctgttgcttgtccaagccctgaaggagagcaacatccatcttgcagcgttaggtggcttcgtcctgcaaatgaagaagtttattgctttggcttttctttctttccgtgttggttattgcccacgtgaatgtaataaggtggccgacgctttagccgcatttggatgtaatagcccagacaatactgttctcagctgggatggaactccacctggcgttgaggatttggttatcgacggttctgtcgagacaatgggttaatggaaacagttagttttcctctcaaaaaaaatcaaaatattaatttaaaatttatgactcttcaacgcttaaacatcagtcatatgctagtcaattttctgcttgcctcaatcgtaataataaattggtccttacacatcctacagccttgcaaaatattaaaaaagaataaatacattttaaaagcacattagataaagtgcacccaagcaaaacaaaaaccactttttttattattattttgcggattaacatacctcttccgtccacctcacttaatttaagagcaacacttttagctcccttttactctttacttcaaaaaaggatggtgtacatattgcaactcacaaaatactactaaccttttatttctcacattttttaaaaaagtaataatatatgcttcggggctctggccatcaatttgtctccattgttcaatacgtgacttgctaactgggaagaggctcctctcacgtagaaaccatctttggtcggtctaccaaatttcacaatagtcccgattgtattaaaaaccgggactaaaaatatttttagtcccggtttgaaagctttgaggaattttttgatctttagtcccggttagtgttgaaaaccgggactaaagatctatttatagtcctagttggtgttaccaatcgggaaaaaagatcaatataagctttactcccggttgatgtaccaaccgggactaaagatctatgtttagtcccggttggtgttaccaaccgggaaaaaagtcgacataagcaggctagttgcacgcggatcggatcaatacaatctcctcctctccttttttaactcatctcctcacaaagtcacccactcacccttatctcttcctctccctcctccctttctctcctcctctccctcctccccatcacccttatctcttcctctccctcctccccacctccctttgcaacggcggggtgcagaggcccgcccctcgcggcggcgcggcgcgcggagggctggctgtagcgcccgttccgtcgtggcgcctagcgggaaaattatctcggaaaaaccctaattgcgaaatttgtttctttgattgttgtt

SEQ ID NO: 40434 - DNA, 1821 bp, Oryza sativa
ggactaaagatagagtatctttagtcccggttggtaacaccaaccaggactaaaaatggatttttactcccggttttttcacccaggactaaagatagcgatctttagtcccggattctccaccagtgaaagttagatggacgtggtcactgacgtgtaggcccataaaggtgggccccacctgtctgcgacccacgtctctctgtctttacgtcagaggagctgtgtcctactaactggtttatccaactggcacatgcacgtgaacacaatagtacagcacaagatatgtgttagaacaccacgaaatgtcatagaacgcaccatgaaattgatgtgatcttagactgttgattgattcgatctactactatttgttacatgtttcatgttgtgaacaacttcaggaataagtattaggaacaggaggcaagctgaagccgacaagctggcggcggggtgactcatgatgatgaaagaaacaaagcatcaaactgaactgaagttaatcatcaggggataaggttgtgccctgtaatctttttttttctgttttattttgtcctataatctgatgctagttaagcatggataattagtattgatgatagattggagggcccctgattagtactgatgcaagagtagtactactgaaagtctgcaacgagttcatcctggacggcagccgtaaaagggtcaatttgtcaaattcaccactccaagcttccaagtattgggtactatagtataagctaccaatctagctaggtaggtagcgttgtgtggtgtggctgaataatcagagtgtttccttttgttttgaagttagcatgaatcattttacggcctattcctggaaacaaacaaaattacaaatacaccctacaaggaaacaagcaataataagataatatggccttttactagtctcctttcctaataaactactataaaataaaaataataaaaataataataataataataataataataataataataatattattattattattattattttgtaatggtttgtctatttggtaatttattggctaagtggttgcctctatattgggcagggttttgcgtaaaggttagactggtactactaagaaaacgatttttttcgtgcggtcgaaaagggttgttgcgtgcggatctcacccctgtctgcacctaagtgtctgcaaaaatccaatttttttgtgccacgcgaaaatgattttcgcgtgcggttgggttatgtcgcccacatggaaaaaaaacccaaaaaaaaaatccaaaccctaaccctagctaccgcccaccgccaccctcctcgccgtcgccgtcgttgtcgacgtgcgccaccatcgtcgtcgtcggtggcggcgtcgccgccttctgccgcgaccggccgccgcagctggctcacaagcccgtcacctctcccaagctcaccgccgctcccggccacgtcgccaccgccaaccgctggatccagccggcgggagaggggcgcgtcctccagatccgggcgggcgagggtcgccgccgctcctggctgccacctgtcagccaccaagcccacacgctgcccgtgagagacgatagacgagagagagaagaaagggaataatgaggataaggatcggtaggtggagaggataagatataaatttttgaagtggttgagagagaaaaattgcctgaggagggagggtattttcgcgtgctatgctcttaagatgcccgtacgtgaaaatacacttgtttttgcgtgcggccttttaagagcctagcccgcgaaattgccctccccccgcaggc

SEQ ID NO: 40435 - DNA, 513 bp, Oryza sativa
acttggtttggatttaacctttttcacgatttgatgattcctattgtggagattatgggtaccccatatccacacggcatggttatccgactagtaataggggataacatatatgtatgaaatatgtaacagatcatgacttgggtattacgtttccctgtatattatggaacggcctaaagtcctggcttgataagattgtaaagtagatttaggaaaccgataccgtgttggttaaggtttctatcttgtaatcctgccccccatcctatataaggtgggcaggaggccctctagggtgcatatgacacaacctgatcgtcagatctatactacacccggcggattcaaatccccaaacaggagtagggtattacctctcattgagagggcctgaacctgtctaaatcctttgtctctgcatccatccacttttaggtctcgtgtgctacccccttttattattgccgaaatcatgtttcgacagttggcgcgccaggtaggggttgcgtc

SEQ ID NO: 40436 - DNA, 1961 bp, Oryza sativa
ggggcggcggaggaggaggggaaaggctgcagctctggcgtcctcctcgcctcgcgtcgtcctcgtcgcctccctcgccgcgcctccttctccggctgctgctgctcaggcggctccaccgcggcgacctcaccgagggacgcctccacctcgagcagccgccgccgccgcgaggaggaggagcgggtgggccgggccgccggcggcggcacggaggaggtgcgggtgcaggtgcggcgggggcttgacctgcgcctgcttcttcttgtcgtcgtcggcggcttccgcggcttcacgttggatctggccggggtcggcgggagtgaatggctcgaagccgacggcggccggcggcgggagcggacggcttctcctcctcgccgatttcccctttcttttctctaccaaattactcgagaaattttgtttgtttggtctacatctgtggtggttttcttcctttcctctaccaaaggattttgtgttctctttctcagattttaatgaagaataattgtgattcaatctgtttctgttcttgattgttctttcggagatggatgtttttttgatctaaaattgctagcatgtctgatatgtctgatgtcgtggggattttggagggtgatttggggatttacccctccacaggcgcgcgagggcacagggcagcgaagaaacgttgcccacagcgcgcgtgcctcgcttttccccgtccgctcgagccctcgccagaacgaagtttcgcgtcgctcaactaggaggcgagaaacctagctaggacgcggtcgtccactccacgtcgacacttttcctccgtggcactactaaggaacgctccagctaggagcactgtgagaggcctaagatatgcgtaagctcggttcccggtgtctcctaagcctatgagctcacaaaaacaacttgctctccagttggttctagttgttgtatgtgagacaactgaatgtgttctgaacataggatggctacatgtttacactgtgatgtccatatatatggacatggacacctttaagttccttgtatgtctttaatgtgagcttcactatgtaagactttagttgctccgttgggagtatatcataagatgtgatgacggtttggtggcgacccctaacttgtaaattcaatgtacgccaaaacagtaatcaacttcagtttttgatggtaagagtctaagacaacaattgtccagggagctgacatggactactatcgttatgagatattaccaacacacactaactgaaagtagtcaaagccatatgaaaattctgtttcagaaatttatatgctcaagcaagtgcataacgcacatatggggcccacatagggatgcaagtaggtagtaccgctacgtacctgcataaaaacccacttgctagttaatttctcatatggtagtacaaaatttagaagaaaaaatgaactagaagtgaaataagggggctaaaaaagcccacttgctagccctgcttgcatcgctaggtccacatgttagtgaggcattagtgtcctaaaaaaggatcgggtgaagtactccacggaaaaagagtttccatttctctcttttttaagagtcaatcaagtgttgcaatcgcattactataaaggcaaattttgctacaggacatcgcgactttgtggttttagctgtaggacaccgcacaaagtcacttttggggaaagacactctcaaaatatggttatttgccaggggacactccattcattaaattaatatttttgtgctgactaagcgacaaggggcctacttttttacatggcatgaccaaattgccctcctctctctttctcttcctctctcttcctcctttaatagcgaggccgctactgaggcgttgcaacggcgcctggggacgggcatgggcggcggcgcgtgggcgatgggcgcggcggtgcaacgacgggtgggg

SEQ ID NO: 40437 - DNA, 2858 bp, Oryza sativa
ctcgttgctcgtggccgtgggtggggtgaggacgtcatcaccggtgaaggtagagaggcaaggagggaggtttggggtgggggaagaatatgacaagcgggcccgagggcatttttgaccttttacattgtttatctctcctattgaaccagaaattaatattttattggctgcggtgtcccttggcaaataaccatattttgatagtgtctttccccaaaagtgactttgtgcggtgtcctacagctaaaaccacgaagtcgggatgtcctgtagcaaaatttgccaatttattccgaatttactgcctgatcatttcttgtcagcaaagtttcttgtttgttgaattggacgcatatacaagccaagcaaataaatatcaacatattttttgtttgtttacaaatttgttaccttatatatctatgtaagtagaactacatatggcatcaaaagctacagagttgggattcgaaaatgttcaactacttgctagataaccacaaatccaaccaaacagctccagctggattttgccactggctgggctagatttccagctgcaaacattggtgtttcctggccgtgggaggggacatggaggccttggcgtgcgcttaccggcggtctacaactagttcatccccaacggcagcgatggagtccgctattacccgggttaccccaaagcattagccacttgtctatctgcctctcttgctgcatatagtgaggttgcgaaataatcagagtattcttttgtttggaagattaaatggtttgattcgtaattcaacctacatctggaaacaatgaaatataattaatatatacactaaggactcattgtttcgcttattcgcgaaataagccaaatgatatatttgcaaactgaaaataatttgtaaataaaatttttatatacgtgttctcttagcaatctaaaagctggaaaataaacttcgatgaaaaaaatcctcaaaatcaacttcaaatttaaagttaaaaatcaaattttcgatgataagtataagcataataagcgaataatctgcctcttgttctaatctcttttggtaacacaatactgctaataagaggccacccgattaaaattaggactcaaattatattgaaattctcaggatctcgcgctcacacgctatctagctaagtctgaacctttcaaaaaaaaaaaaacatcagagaaaagacaccaaagaacagaaccaaagagacagttggtgttacggattgtttccagctttccagagatttaatttcttccttttattcatctctgtataggaggttgttacatgcacgattttataggaacaaacaactactgactgtgtcctcccacgatccgattccgcttcaatcttccctagtgaaataaatgagagaaaaccgatgacggaaaccacatgttctgctattttgcagccactatgtgcatgatgggagtccaaagctactaccaaactgatgcaacaattagacatgacaatgcttacaagattacaagcatttgcaacattcttaacattggctcctcatcaaaaccttaagagcccaagttaattaattggcttgcccatatataattaactttatccctctttccatcggcctcatgttgtatctaatttaactgattttgcagtcatttaggaaataccatattttctttttctagtgtaaaacttagtatctcttggtacctctagtactataaggtacaaaatttgtactaataattttggtgtcactagttttatttccattgctccaaccagaaaacaaatcgatacaaaatcaccattccaactttgcacactgcgtgggaaaaaacaacatggttgttgacttcactctcaaataaaagctaaaacagggacttagagccaataaaggaaattactgaagctgttagtacggatgggcagggtggatagtcgaaggctcattccccatgcatcctaatcctatatcgtctacaagagatttcaactcgatgatgaaattgtcatggtatatccttgtacttgtatccatgcagacgatgctcacagctttttatgatcgtcctacactcttgagatgcttctaattcccagtgtatgtgtatatattagctgctccatgattgtagttgctagcagtcagtaaatataacgtacaatggtactgctaccgtccgtaaaacaactcaccagatttaaaacaaaactcaaaatttccactagtaaacaaaacattttcctgtacaaggagcttccattttcctagacggactgttttcgcatgcatctgcaaaaattaaacttctatttcgcatgcggacctttaaaagatccacacacaaaaatcgattttcgcaggcaggtctcttaacggtctgcacgcaaaaataagcatatgttcgcgtgcgggcctcttaagtggaccgcacgcgaaaatttatctccctcttttccctctcacccacttcaaatatttcatcttctctcttccttttcctttttattctctctcaatcactcctctttctctctttcctctatgtgcctttcctctgctctcctctagctcctcccctccccaccgagcacacggggcgtgggaggcgtccggctgccgccgccgctgccgacaaggcggcagccgggagcgggcggcacgacaactgttggcagagacggcgcggcggctacaagcaactcggggggtggcacggtgggcaagtggctggatccgcgctgtgccgacgatgaggaggaaaaggtgcccgggaacggcgacggcggcgggcagtaacggtggcggactcgggagcggtggcggcgcgatca

SEQ ID NO: 40438 - DNA, 813 bp, Oryza sativa
attcctgcagcccatattcagtgcctaaatttaatttcttggtgatgaaatctaactaagttcatgcaaaaatctgttgtaaacctatgccaaatgttatggttaggatgcatcgggagtgaagctcccattccattgtttggtcatcaagctgggtactgatttctgctatgtttgaacgaggtgtactgaagtatgttgtttgttcatcactcctgctggttggaggttaggagcaggggtggtgagtggtgagcgaggatctagtgagcattattggttaagtcaattggcagaatacactgatgtggaaacactactagctacttggtagttggtactaactactaaatagatggattgtggttttgctacaagaacttggcagtagttagaatattcaagattcacagcacatttaacaaaatcgatcttcgggtttttctcgtatttcactactattttaaatcttcattgtatacattgagaaggaggtaggtgatatcttttaaagaagatatgcacattggagtgtattgaaagagctagcatctcaaattgaggcagcatttttctgattgtggttggtaaaaagtatcatcttcctcccaaattttccaataccttaatgttttttaatgggacaaatgattaaataacagttaatttggttgcataaaagtttcttgatatgatttgtatgaaaatataataacaagggttgattattgtcaaccaaggctagacacagtaaaaatctgggtgggcctcgctcgggtaattggccaagttggccgatgtgatccggtctaa

SEQ ID NO: 40439 - DNA, 561 bp, Oryza sativa
ctttcataaaagtatatatatatatcacttttcaataaatatttttatagaaataagaagtcaaagttgtgttttggagaccgtgtcgctgtcctaaacgactttctttacgagtatggagggagtctagtagtatggttaatttcgatgtcggtgtgtattcctgcaatgaacttcaccaactgtcctccagacaggtgtggacaagcacctctcctcgatccacacatatgtcacgcagtagagaacaacaccaagcttgctcgatggccaaacactgtaatggaagcttcattcccgatgcatcctacccctaacaagttcatgttagtgatatatatgtttgcaacatatttttgaataatcaacttaataagatttcatcattgaagaaattaaatttagctactgagcatgcatataagacaaatggtaagtccttatacatattgtgtctgtggacatatgataatggatggataaatggatgcagttcactaccttccatatatagtctttagaactatatatggccaaataggccacccgggctgcacacat

SEQ ID NO: 40440 - DNA, 555 bp, Oryza sativa
attttgctgaaagtatgaatgtaataatagtaaaaaaaaagtaaatgttctgaaagtttgtagtttcttgctctgatgtgtaaactgttctttcgttgtagaccttaaacttactgtttcatcttaaacaaaattaacatcagcggtcattgaacaaattgtcaactatcttgaataaaatggacactattacaactagtgatcccacaaacaaacttctgaaattcttcgatctcttttctttgcttgcccaatttcttcttgcttgtgcgatccatggccaaaagcctttcagccatctcaatatctagcttcgttttttcttctttctgtcccctccttctagggttgctagtgctcgcgatccaatgcataccacagcgatggcgattccacgaacaaaggcttgcgatggcgtcggcggacgagctgccgaggccatattcgccacgctgagctcgtcgccatggtcacctcttcttgttggcgcattgaggttgtcgtcatccaaggatagaacgactcccagaagtcggcggcggccagacctggacc

SEQ ID NO: 40441 - DNA, 1612 bp, Oryza sativa
tgcaaagatggattcgaatgagctctgtatgcaagtcagatactgatatggtgctgggttatggtgtgccaatggcaaaacatcccgggggcacagcctgtagatgacaacgcagcttggtgggctgatctcaatcaactacaccccaaacctttcaaattcagggttaaaggatctcttctcgccacttggtggaacgtttggttggaaagaaacagaagaattttttaaaacatctcttacacagaggatcgcgttgcgagaatagtaaagtccaacccccctaattgtcttttctttttcggattccctttgttttttcaggtttctcccttcttctccttcgatgtcttcccatgtattctctgaactgtttttctctcctctaataaaattccggcagagctcctgccgtaacctcaaaaaaatatatggtgctgggttaaaaggcttaatgacatggctggggaaaaaagagtaggtcattattttgaagaacttgtgcatgttagagtatattgtattggttgtattgaccttttaaacaggtatcagatatatcagttcacagacaatacatatgtgaagcttgcaaataatccttgcccagcactagtcaatgatgaattgcaaaatagtgccctgattgtgctagctagctagcatatatagaaataaaaacatttactataccacatttaatagtctagaaataaaaataaaagctaccatatatagaaaattaattgacgctagggcctagggaccagaactccaaagcgcaagaaatgcagtgaacaacatccattttctgtatgtgcgcacataaggccttccttacctcaattcagtttctgcagtgatgatttatgttcaggcagaatcctcttgcaccaaaaaccagggcgtgttaggtctaggatgcatccggaagaaagaccctatcctagtacttgtttgggaagcaaactgatccttctgtgctgtgttaagagatggtgttagccctcacacaagccatttgccaacaatttgtgcctacaggacaaggatgggcgcattgggctagtggatcagctcatagaggcgtggattatatatggtgaaaatattacttgctgtttagtgaatgcattatatacatttcattcgaagaaaaaaagatcacgactgtgaaccatccttttcctattcagtttttctccaaaaagatacgatgagtaatgtatcctcgaagtgagtaatgttttaacgaaaatgttgttcgtcaccacatcatattattgtcattaatttgaaaatacatacacatatattcacagtacgccactacactggtcaaggtcacctgtgacgggcccaaaccctcacctttgatggttttgggcttggtcagtgatcagtggtcactggtaagtccagtcacctttgacgggtggccggccgtcagtggtgacatccacctctgacgggcaagttaatagaaggccgtcagaggtgttggtctaagctagactagggcttgttaggacccgtcacaggtgtctcatctctgacgagcccctaaataaaggcccgtcagaggtgatgatctccggtatatagtagccgt

SEQ ID NO: 40442 - DNA, 783 bp, Oryza sativa
aggcgcagcggcggaccggcgcggtggcggaccggcgcggcggcggaccgggaggggagcggcgtgggaggcgaggaggcgaggagcggtgtgggaggcgaggagacgccgggaggggagcggcgtgagaggcgaggagacgggagcaggggttttccttcactcacccgtgtctttaaaactgggtcacgagcgttgtggggtttgttcccttacagtacctccatccaattaggtcacgtaaaataggatacttgcactgtaggaatgagtgtctttagagccttttttcgaactaagctacggggaccggtgcttgcactgtgaatggccttaagtgggtgccaggtgctattgcttctttctctaccgatgagtgctgatccacgacggttgtgtgtcacaccttttcttttttttttttttgaactagggcttgaaagcccccatttctattatcagaaatgcaacagtagaagtctgctaactgctaagacaaaagaggaagaaaaaaagaaattacagcacgcaggctgtgaagttttttacagaccatagcactgtgattcataaacaaaatgagaggagctcccacaccctcaacccagatctggtgataccttcctaagagactgctaactatatatgagagcttatactataccaagcaggaaacaaaagatcacagggatgattctccagcagcatcacgcatcagttggttgtgtgtcacactggcattgccatcggatatactccctccatccctaaatgtttgacgcc

SEQ ID NO: 40443 - DNA, 776 bp, Oryza sativa
ccaattaattatagtttggggttctgaaggttttgattatgactcaatgttgagaatcagtataatttgagttaccattttaatctggtggtctattattatttgtagttttaggatcaaaacaaaacaatcaagcctaccggaggggtaagggtaggaataccaaaaaccaaaacttttaggggaattaaaagttactctgaaattcgatgaagtatgtgacgaagtccgatgtgatcgccagatgtacacttgttagactgctggtctgaccggggcgatatcgttggtccaactgtcctctgagcaactattgtctgaagccaccgccagtctgaccgtcgctacctcgccaatctgaccgctgagatcaggagaaacatcgattgaagaactcataaaaataaatcatctttattacttctaattatgtttacaaaacacaacaattacacttgtctctcaacttttgacgaaactcgaaatctaggctaaacctaaacttttctctcaactaataatctcacaaaatctatacctagaggcatcaaccactcttttatttataccctgatgtggttgtacaaaaaccacaaatccactttgtagaaaaagtcataatttagtaggaaacctacccatacaagtaatccacctgatcaaactccaatcgtcctaaatttatactacttctaaattcgacttcgcatcccaaacacacaaaactcattttttatattgcatgaaatcttcgctactatgtgcactatcattta

SEQ ID NO: 40444 - DNA, 1049 bp, Oryza sativa
ggtgggaggttcattcccgacgcatcctaatcctacgtactgtagacaggacgtcggtctacaaaaagatttcgggaggatcatgaacgtgttcttgtacctataccactactttaatttcatgctctttagtcctatatatagttttaagaagtttaattagctgattctaattaatttccagtgtaactaattaactgctccatgatgctagttactcgcgatgtacaagtatgctgcattgaatttcaactagttgattagggttcatgtacaataatggttgttgaaacaggtacagtctgtttaagtctcctaataactgcacccgaggtccgtaataactaaaatgctccccctcacaacctacccccaccccggacatcgccgttgctcgctgctggcgcaggccgtcactgtgccggaggaagctgaggaagcccatgccggcgaccaaatccaaacttgatcaggttagtacttgttcgatccatacatatattggttttcattgcacgctccatgcattccaaacaagctaaaagaaaatgaaatcttaaataaactccgagcaacataagagtgacatttaattgtatatgcgaccaaaggtgggtttcttgctaccctatactagcaaggttatttttatattaccaactactaaccctttttctacaaacctttaattggatagcctaaaacctttaattggatagcctaaggctgtgttcagcaccacatgttcccaactcctctcgctcgtctttcatgcgcacgctttataaaatgtttctataagaaagtttgttaaaagaaccatattgatccatttttgaaaaagaaattagctaataattaattaattacatgctaatggattgctctgttttccgtgcgtaggagattggttaccatctcctccaaacgaactcagccaagaatggcctaatgccaaaatgataaggaggagtttccatgtgcggctaaggccgttgtgcctgtatatcttgttgacaaggtgtccctccttccctaaatgtttgacg

SEQ ID NO: 40445 - DNA, 2448 bp, Oryza sativa
gaatgcattggggtgggtataatgttcattcgtatgattgctctaagtcataacaataattgtagagtagtatttggtagtataagcgaggtgcttagactattgaatatcattatatggggttatatgctgcgggtcagtcgaggtgggccgctgatagtgatagctcagtataagtattcctccatattagtatataatcctaagttacttttctagggaggttacttctccgtatttagcaccggttggatggccataatgggttgtcgtaagaaactcggcaaccaggagtggtctctcgaaacaccaggagggcattgtaatgggggtattggctatataattatatagcagataatattaactaaagttgtatgtatattagaggtgtaagaatagattattttcttattcttttccattttgcctagacttattatttatgagagaatgagtttttatgcttcgtgtcactctacccttgaattaaattaacacctgcttagactgattattacaagtaacatataaatattagcatagttttctccattataatctttccacgggactaaacaaatatgatacccttgtaatacttccgggtgaaatgctactatagtatatccgtgtgcttgcgtatatgatttgtaaccataatataacataaatatttctgttccattgctgggcattatatttctagtaatgtcgttaagaaataccaacagtgtgggggtggcgacggcgccggacatggcttccctggccagatttggccccttcctgggatgacggtggcagccaaggaggcgggaagggagatagcaagcggcggggaagggggaagacaagcggcggagtggagcaggagcgacggtgaggccagatccatggcgggcgctgccagatctggagggggcgaaggtggaggaaggggagaacgaggtggcaggcggcgggggcataggagaggtggtggtggggcagcggcgactacgctgggagccaccagagctggcaattggcagccgtaggagcaaccaagcaaggggcgcgagatggcgccggaggcgccgtcgcgacatgaggaggtggtcgtggccttagacacggcggcgacatccctcacagttggcaacatgcaggggagtttttgggcattggcgtcgactcgtgctccactagtggctagacatcctcttcttcatggagctcttcccccccccacccccctcctcctatggccagcctcagatctggtcacgggaagatccacgaggagggtggaagccgatactacagaaacacaaataggtgccggtttaagatccgacacttttgaggttccacgaatcaaaaaaaaatccggctcgatgcatcggctagtcacgacgaaggaaacaaatgcggatttcttttttctcggaaaataaaacgaatagagtaaggtactatccgtcggaatgggaaaacgttcagaaattttgtccggatatccacatacatagatcaaattttagaaaaagcacttatatatacataacattttcatacggagtcagatgaagataaactttagatcaaattgtagagcttgatgatatctacaatttcttgttgactattttattatttgagatcatttttgagtctaaatattcattataaaataccatatctatttttacaaaacctcatatctccaattcaaacgacatctaatggagatgtgttccatatcaaaattgtagagctcaatgagatctaccacttggtagtttataacatttgtattttaaaatgtttaaagtataaaacaaacactacaagttttgaagatgtgaaataaaataaataacatctctaatttatacaataagatcttgataagtgatatggtaagtaagctatacatgtagtaaaaggtcgtgggattaaaaaataaataatcatatttacatatatttacatgtgagtctcttaggggaattgccttgaaaatcaattttcacataaggttgtagtaccgcctccgaaattgtcgatataaatgtttgagaggatttttatataccgacaaatatttgttgccatattcgttcatttcatattcactaggtatctttatttgataatattcgatttgatttccgtatccggttctcgattctgattccaattccgaaaaaatctaaaatctaatatgataaagctagtttccgtccgtttctgtttcgttttcatccctacatacgtgcttcttctggccgtatataatgtgccgtgccttgttaatataacccctgttatccaacgtgcgcattaaagctatctaaacttgtgtttcagaaaaaactccaacatatatgcttgatcaggcaagtctagtgttgcagcgtccggaggcattacttttaaaaatatctgtttgaaactatatat

SEQ ID NO: 40446 - DNA, 1541 bp, Oryza sativa
ctatcaatatggatggaacctgggtcagcatgagatctagataaccaaaggccatgtctatgactgaggcgcataagcttggttcccagtactcctaaccctacaagaactcaaaccaactccactgttgtatggtacccgtatctatgtgttctgaaaagaggacgcggtttcgaaacacttaaggtccttgactgcccttaatgtgcacttcagtatatgagaatttagttgctcctttaggagtagttcctcccatgtgttttggtttggtggcaacccttcatcatccgcacacgcaatctttttgcaccctttatattattagggtatattgctacatttagggatgaaactggttcggatagtttccgtccgtccggaccatttttcggattcggatagtttcgatcagaactatccggaaattctcgaatttggaaacaaattcggatttttttttctcggaaacgaaaacgaatacagtaagggtactatccgtcggaatcagaaaacggtcggaaactatccggaatttttttcggatatctgcagacattgataaaattttagaaaaaacatgtatatatacataactttttcatacggaattagataaagacaaactttatatcaatattgtagagctcgatgagatctacaactttcttattgactattttattatttgagatcatttaagggtttaaatatttattataatataccatattaatttttacaaatctcagatttacaattcaaacgacatctgatggagatgtgttctatatcaaagttgtagaactcgacgggatctaccactttgtagtttataacatttgtatttgaaagcatttaaagcataaaacaaatattgcaagtttcaaagatgtaaagtaaaataaatagcatcttcaatttatacaatggcaagtaagttatacatctagtaaaaggtcttgagaattgaaaatgataatcatatttgcatatggaggaacaaccattaaaattgatttttcacatacggttgtgagaccatctacaaaatgacgatataaatgttagagatgttaaacaaaaataataagtgatatctctttcttgatcaagaaactcaatttgaggggctttttatataccggtaaatattcgctgccgtattcattctgtctcgtattcgccccgtatctgtattcgataatattcgatttcatttccgtatctgagtttttgattctgattccgattccgaaaaaaaatatgaaaacgaatatgataaagctagtttccgtccgtttccgatccgttttcatccctagctacattctctttatagggaaagccctcttctaagaaactaatagaaaaggctgacaatcagcgtgaagatctgttcccttgttattattttcatacaaattgtatcaagcaacttttacggaacaaatattaggttttttaattcttttgttcaataaaaacatcaaggtattgaatggttttggagggagttcttttatttgaggggggtgggg

SEQ ID NO: 40447 - DNA, 809 bp, Oryza sativa
gtaatctccctatatataaagagaccttaagatcaatgagaatatgggcaaattcatgattcactatctctacttttagttttctaacacgttatcagcagctctatgataccgagcaagaaaggtgaagaactcaccggtaactcgaagggtaagatggctcgtcgtttgcccattcctcttgacgccggatctcctcttcctcgcaaccttcgtgctcaccatctacgttgtctcatgcatcaacagctcaacaagcttctcgggtcctgtgtgccgtcctcgacgtggtaggggctgtggtgctagctttgctagccgtggcccccggtctcctccctctggcttcgccagacgtggaggacgacgccgcgacgacgatgccactgcccgcaaaaccaccaaagctgatagcactaactccagcaccctcacgactcgtcgcgggcctctagtgatgcccgaaaactacacggcgccacaatgcattctagtggagtcaccgcaccactgcaagtcccatggatggatggcaagggtgcggctgcaacccggcgggctgccgcaggaggtgccatacgtggtgacattgtactgtccttaccacggctggacgaaccatgctcgctgtgtcatatcaccatcaccttcaccagagtactcaccagcaacaccgctgtacactccaacaccgactgaaccgccgttgttccttctcagtggcaccatcgtgatgtgccgtggagccccgcccttctacatggcagtaggtggctccaacggctccgtgctctcccctccatctccac

SEQ ID NO: 40448 - DNA, 537 bp, Oryza sativa
aattaatgtgggaagcacatgtatagggaaagtaactttgatatgtgccctctctctcaagaaaaagaaaaactttgatgtggtgccatagttagcaggattcaaattctgatatcacgattatacatatgtgagtgttcttgctagaaagttagcaaaatcaggtcacaagagtgaggtcgttcgtcggtcagcgaatatggtggcatatatagcaaaggagtgttgctccaagaaatgtgttacgacttattgtcggtgcctcccaatttttcttaggttttttttcttgatgaggattgtatccaacataacctgattgtataatttggctttaggtttatcctcaaaaagtaaaaaaaaagttagcaaaaataaccaatttaatcgttggtctctgtttttttagcgagtagagtatatacctagaatttacgacatcgattcctcataaggacttgaagaacttttaggtactaatgatgacaaagaaactaagctcatcacatcaacataataccattgttttttagatgt

SEQ ID NO: 40449 - DNA, 520 bp, Oryza sativa
aggcctcgttcgggtatgctccttggctctacccattgcaactaaacatgtttcttttgctcctgccgtcgtcgtctgcgaggatcttgccatcgcctatgtggttgttgcaaggatttgattgctttttattttatctttgtaggtctttttttcgtatatgttattcttgaagtgtatttacccatcacttaggggcttttatgtaaaactagctattctctcaactttacccactagaaaatgtaactcatgtaattgtccttgattaataaacacagttttttttctgaaaagaaaagaatagtagcactttactccacagaataagtatatttttgctccctaaactctgtgggttatgcacatatagttggaaataagtctatttgtattcctcatgtctttgggcctcgcttatatggttaattaagtctattttacgttcctctactatttttttcgatcagtgacgtgccgggccagcccaccgtgccaagggagcggggctgcaggaatt

SEQ ID NO: 40450 - DNA, 821 bp, Oryza sativa
ggtagcagcgaagaatcaagagagtgcttaaggtgaaaaaaaaaaggaaaggagaagtgatccgtaccagaaattgatcagttcggagcagttggccttgatgcagcggagtcccctacggacgggaggccttgatcttgccctccactgagtatgccttgtagctcaccacgcgccgtcccctcctctttgggtcactgaagatctgggggatcacatgccaccatcaccgtcaccaaccttggccactactatattctccttcaaagcaacagatcaagtggtcaacaaggtattcactgcagcttcatgaaaattacaagcagagaagcagtagaacctgaattttatctgtggatccttccataccagaacagcaccaaagaagcattctcttcactctcttaaatgctcgcacaacaaaacatggtcaaaggagcttccactagcattcaaacttcatagatacaatcatttaatcagaatatttgcattaacccttctttataagactagcaaaatgcatttgcgttgttacggaattaaaaatcataacagcacaatgcagagaggaaatctattttgaatcctagagcttaattttagaattaatttgagttttttgcttgccaagtttacgctccatttgttattaactcgcaaggatgattatggttgagagctccatggtctgtccgtgatttccactgttctatcatacaattggtttggagaagggattgacagtgatcccacatgtcttggagaagggattgacagtgatcccacatgtcagaattttgagagttggtggtggggtg

SEQ ID NO: 40451 - DNA, 661 bp, Oryza sativa
tgcacagaaaaaatagaacagcaacatcatttcagtggttcctaaaaagaaaatgtgttgaaccaacagtggtaatgacattagaaaatatgtgactaacacacctttgtcttagtcacaagttccatcagatcctccatcttggatgctgctttttcatgggaatactcctgagttatgggaccatactccaatctgcgcagtgacaagaggcacacaaatgaacactcagatagaataaaatatgattgagccatgaattatacaagaacagtaatgtggtggcagctaaaattttacccagagaaatgcccttcaagattgtgccatttgggatccctgcacatgttcccaagcctagcaacagatgccgcaaaatctttgaactgttgtctgcataaaccaagcccaatgaatgtaagaaatcttgaaaaacacatataagtaataatttatataaatagtaaaagcattgaaatttatagaaaaagtcattaattacctaatttcatccccaacaagagcaagcaactggctctgatcatctgagatcagactttggacgccttggttctgaagcacaacacgtttcaggtaccttatgttttcctcggagaagaagttcatcaggggggaacccatggcaattgtgttggctacc

SEQ ID NO: 40452 - DNA, 519 bp, Oryza sativa
tattgtttctgcagaggaggcgctcttcggttgctagagaacagagtgcatcagctggtgatgaagatgatattgctgatctgatggaaaaccatcaagaattcattcatgcagtgaagtctcggctaacaaaactagaggttataacgagtatggtcatctatagcatctgctattttgagatacctcgagtaacggtaatctcaatgtgttatgtgtaggtggtttacaggtgttggcacaataacgatgtaaagggatctattgatgctacacgcaggattcaggatcttgatgtgtgtacttcttaattaccatcctgttctgttgaagttccatccattataatgtctgatgagttctaccacttttacaggttaccgccgatataattagtgttctgatggagaatgataattctatcacactagatatttgtacttgtgtcttacctcttgcctccagtgttcttgaaaaaagcagctatgacaggtacttttccttgaatatattcttgta

SEQ ID NO: 40453 - DNA, 711 bp, Oryza sativa
tcactaaatagacaattgagatatgattcttattacctggaaaacacattcttatcatagtcacggaatacagttcatcttatcatcgaacatttattggagcagagagaaaataattctttctactcgattcagtggaacagaaagaggaaatttgaaaaaacgaagtgaaattaaaagatcacatcgaaatatattaattaaaataggaacacacaccgatcaccttctactggtgtcgtgtcacactgtcactttgctacatctctacctagtgcacattagcaccacatataccaagtcaaacatatatccgtcacttaagcaatcccgttgagagatatcatgtcagctcgaagtagttcagagattaacctttcacccagcggctcgaaattgtcaagtgaaccagttaataactatgcacccgtcaacaacagtttcactgtcgttacgcaaatcggaaagctcccaaacgacctgacctacgagagcgttgggcgaaacactccatcatcctgtgcgtgaatcgtctgaatatacacgcaattcatccggccaactccgctacggaatcacggatatgcatggatgatggaggcagttcatcccaggtcaactaacccttgcctaaaacggccggagtttcagttcaggccgggcggcgtacgtcgtttggacgctgcaactacatgactgggctgcaggaat

SEQ ID NO: 40454 - DNA, 993 bp, Oryza sativa
tttaattgaagtaggaaccccttcctttttttaattaattataagtagttgttactaattaattgtggaaaaggatctaatgggtagctaggggttaaaaatgtttagtgggagtcagggacatcaatagttaagcacaatacaacatcttatttaatttaatttcatggtatttctttcgtttcaaaatataagtattttcgaaatatatttaggagtagtagattagtacgtaggatagataattaactgattttgtacatgtgatccatgaagagagcaatatgggatgcttataaattaattaaccatcaaatttatcgaatcaagccacagcagaactagctaacctatgtaactactgaccgggcaaattaagccatatagtaccaatttgcttgatattattagcaaagctagctagttaagcttggaggtatagttctattagtgtatgaaatatcttatgggcataactaagtatattaattaattagttggtgtgtgatttggatcgatctcttgtacatatatgcatgtgcatttgggtagtctttgattcaaaggatatagtaattaatgtaaacgtagattacaattgatttgggggtgcaacgggatgcatggttaattaattagtcagttaattactgtaattaatccaatttgggagagaggttggtcgacacagttgctgcagtgtcttgaccattagctttggatgtgaatgggctgtacatgtgactgttaatctgttaaatatacggtccaattggaacaaactgtgtcggcctgtacataatcaattaatggaataattaagttggtgatgcatattttagtttttgttacacccacaaaaaaaggctcaattaaacaatcaacacgttggttggatgaaaacattgataatatatatatgtcaatttggacaaatatatacgtcgccccatagcgacttttcatggatgtcggctctcaaaacactcgcag

SEQ ID NO: 40455 - DNA, 1124 bp, Oryza sativa
aagtgatgaatctgtgtcaacctttatattctcagtgaaagtgcgtcacatatatatatatatatatatatatatatatatatatatatatatatatatatatatatatatatatatatatgtattagttgggtatatctgcagggtttgaaccctgatagatagaaaattcacaaccacatcaaactaatgaaggtggtttgcgagacccacagttaagtttatttaatttgaagcttacccattaagcatgcatgtactgttcgtacgtcacggttaccgtagtaaaacattagtcaactaatagttgatgttaccaaaacccaacagtttgaaccatatgcatgtcttattatcagctacatatatagatgcatgcatgttgtctatactacatctgctaataattaagaatagaaggtacaaatataggctcaacgaaaacgttcttaattaattggtcatatttggctctacatgcatcccatcgatccttgcattaggtcaaacacatgcattataagtagactagatggtgtgcttagtggagacagtcaccttaaattgtagtagcagacgaatattagcattaattgcattgctaatgtacaaaagttcaaaagacaactagctaaaattaaagaaaaatatttcaatttgagatatgtcaacctttattaatttgaagatgagttcggttgaaaaagaaaataaggtgttcgacttcttaatttaactatttactcgtaaagatactctataggtttttaacgtttgatgccgttaactttttaatatatgtttgataatttgttctattcaagatttgtttttacaatcaatatgtaaaaaatataaaagtataagtcatatttaaagtacacatgatgataaaacaaattaaacaaataaatgataattatgtaagtttttaaaaagacatatggtgaaacgtgcgcctaaaaatcaacagctttaaacattaaaaaccgaaggaagtataatataatattttttgagatatcgttggtataattaatctacaaattaatggcatttctgtatgaaaattcattatgctttcatgtaaaataaagaccatactgatactcattatgcgagta

SEQ ID NO: 40456 - DNA, 964 bp, Oryza sativa
tccactccagacttaactactggagttatatttagaagttgaagctgggtttaaataggccttgttggctcaaaaccaggagacgttggctcaaccgggagaaagccttaccacacctcaaaagcttgctcatgaaacacaaaatagtaataacgcacacacaggcttcggcaacgaatgcctttatattttctctgtgactcacacacaactcaaacaaacgagtacctggcttatataacctgtttacatgctgtatatgggagcaaccactacccgggtcttcatgcgcacatacgcacgatctacatctacatgcgtgagcccctaactcttgcatggctactgaccacgagtcacgccgaacgtgcacaactaacaagcatgcatgcagctaactaattactaacttgccgcgctcactaaccacacaagctaattactcagtcagctaattactcagtcaactaatctccaacacatggctgttaactgagctaatctcctacacgcatgcaacatatatgcagtacttcactacgcgcatgacacacatacacaactaactaatgctgataatttaaaacatgcgcaagtcatgattaatgctaacaggccctatattccgagtgatctggactctggagcagtacattttatactaatcccacggtcacaccatgctcgatattctcttatattatggctagttcctaaattttttttttccaaaaaacatcacatcaacaacaacaacgtactcctataaaaaaaactactggtgtcagagattataaagccaaaattcttttttttctctcatggacggatggcgtacggagaaaaactgtgttagggttgctttatctacagctctatctctattttatcttttttttaaggttggagtccaataaaatagttttgaaaaaggaacggaaccttcagagtgatttgaaaaaat

SEQ ID NO: 40457 - DNA, 3934 bp, Oryza sativa
  unsure (1)..(3934): unsure at all n locations
catttgagattggaattgacgttttgcgtacggccaagggaagctgatatgtttgattttgcctgcatcctgaaagctgctcctttgcttgaaatactggaattgcatgtaagtttatcactcacttacaattaatttcacgtaccatatagtatctgtttaatattccatatgccattttcttttctagatgtggatgccctatgataaccaacattactgtgaagatcatggtgttcttcgaagtctccccaatcacgctcactccaatctcaagctcgcctatgttactggattttacggcatgaaagatcagttggagcttttacgccatatcctaataaattctgtcatgctcaatgcaatgaagatagatccaaggccggttgtcgctgttccccatggaacggtgatgttatgtactgaagggcttaattgtttgaatggatatagagttgccatggaatatcttagcaaagcagaccaccgcaatgttcttgatgttcatgaaatcctgcttgaggatgttcaaaagcgtgaaatttatgcgattatgaaggatcgttggattcaagagccgaaagctatgctaagctatttctgatcatatcatctgcaacccttttcaagaacacagtcaagcttgcttgggagaaactagttgatattgtcaattatgcaaattaaatggagaagtgagaggatgttgtaaaattggagatatctttatagctaaactactgtaataacgtttctggatatatatttttatgagtgaatttcattttgggcgtttagcttttgttgtccatctcaaattaaaaactttgattaaagaatgatccaaagtgaaatatcgaaaataaaaagatggtgcaaagcaaaatttgctttatttttgtagctactgattgactacttgactgaccatacgctctaccacttaaacttgctcacacgtggttgtgcatgttggtcctaggcttgtttcttgggttggaattcttttattgggctcaatatataatgggctcaacccaacccgataccggactttgtcccgtacgacccacgtccattaggaatggcatgcatgactttggagtgagttgggaattaatccctctagcacgcanaacagagtgacttattagcgtatgattaattaagtattaataattttttaaaagaaaatataatataattnttaaagcaactttcgtataacttttttttaaaaaaaccgtaccgcttaacattttagaaagcatgccgcgcggnaaaacgaaggggttaagttggaaaagctagcaaaagaacatatcctcaagggcaggacagccgagtgggtatctcaaaataggagtaatatctctataggttaataattaagggaaaaaaacatagtcaagttatcaacgagttgaaaaaatatcaccaacagttcaccaactgagcaacataagttctattcctctctttttctatgagatatataccaacgtagtgatatatatatagttttattcctctctttttctatgagatgtgcatagcgcgatatcttattcagttttaaattttaaaatgtgcagcgtgttagccgtgaatcatgattcatatgagtgcccggccggcgattgattaaacgatggggaatatgaatacgcctctttagttcagaccaaaatcatgccactcatccaacaccgacagaaacgcgtgaacaccaaccaaaaaccaatgaagttttttttcttttgacaggatataatatggcgtgaataccaacataatatttttttctgttagattagtgttgttgctgaattatatggcgtcagcttgtggctaatcgatcgatatggtccaaaactaagacgcatatacctggaaggaactgaactgctgcaggatctgttcatcaatcaacatcttggctcggtaaggttgtagttcacaaatgcacatccgacgtatatatcatatcatccattcatccccgtatatatgaaaatgacgatattttggcattgacctcgcacctatggaatcaccaaagccttttgtttgttattactgtagctatgttgtttccttcgtactagttagccttgcacttttttttttagataataatcatcgaagtattaacaactgtaaccggccgcttgttagtatcgatgaaaactacgttttcatttgttgcaaataacttgataaaaatttccttgacaccatatccgtacgttttccaaatcagcatggacgaactcctaatttcaccatatccattccctccaccaatcagcccaatgacctaattaactcggcatcttgttagatacatttccatcctatcatcccttggttgtagacgaggtaatttgtcccttatcttacggtgcgtttgaacattaagttcacctgggctaatctatttcaagcaaaataagatagtagatcattaaccacgattaattaagtattaattattataaatttgataaataaatttatttattgatttgaaaataacttctatatataatttcttttacaaaagtttcatttataagtttgggaaatgtgttaattgaaaaaaaaaacgaacacaatcttagcctacttttcacccgtagatagaaggaacacctcaatgccctcagttgaatggcaaacaatcagttaaaagcagaattatgtttaccaatgtgtgatggaaaatgaatggtcaatgtatcaatgatcaacggtggtccaaacaaaacacatcctatcctacatcttgtgccaccatggcgtattattgtacaaaagttaagtactagtataccgcagcgtgcaaagcagcatggtcaaacacatacgccatcaaacacaacggatgaaagcaaaggtcaaatgccccccaaaagcacagctaaaaagttttaaaaagaagcacacgacagcaaattcgcccccaaaaaaaggttttcgcgcgccggcacaacacaacacaacacaaacccgcgccaccacgcaaagcaaacttggcccaaagcatcacacacacacacacaccaaactaatcaatttttttagagtaattagacttggtttattttttttttcaaaacatcacatcgaatctttatacacatatatggagcattaaatatatataaaaaaacaaatagcacattttgcatgaaaatcacgagatgaatcttttaacctagctagtccatgattagctgtaagtgttacagtaacccacatatgctaatgacggtttaattagactcaaaaaaaattcgtctcgcatttctaaatgagttatgaaattagtttttttcatctgtatctgaaaagctcttttgatatccaatcaatcaaccgatgtgacatctaaaatttttattttcgtgaactatattttaaagaaaaaaaagcctaaaaagtcgtacaaaaaacgtgtcgcgaacctgcacaggttggtgcagagcgccgcacaccgacacaccctccccccggccccacctgccagcctgtacccacccctccctactgttatacacaatcgcctcacctctctccccctctcccaagtctccatctctctctcctcgaataaacccccaccaccccacctccatttttactcctcccacgagacagcacaaacccaatcccatccaccaaccacctcgccgccgtcgccgccgccgcagccatgggcgtctccgccctgctgctcctcctcctcgccgcggccgccaccgccgcgccgccggagcagcccgcattgtccgctactccctcctccgccgccgccgccaacaacagcagcggtggtggtggtggtgcggcgagcaacggggtgaactcgaactcggtgctggtggcgctgctggactcgcactacacggagctggcctagctggtggag

SEQ ID NO: 40458 - DNA, 625 bp, Oryza sativa
actatgaggtatcaaattttgtagcataaattttgatagcttcacatacctcccaaaaatttgacaaagttggccctttcatcattgataaggacgttgagaaaatcctggactaggagaacagcacatgaagcaagttgaatcggagatggatttaaatcttccgggtggatgtccacccgtttattgcatgcatgccaactaaatggttttgaaaaaaatttaaaaaatttgacaagatagattaatgcataatatataggcaataaataaaatgtaacgagtttacatatatttgcagaaaatttgtaattttgttaaaacttgtagaaaatgtttttgaacttgcatctttgtggaatgatatattccatgcttgtggatgctatagcaaactaggcagtgacccaaacaaaaataatcctctggtacttgtggaccttgttaggtcattcacagggcacatacgtaacgtgtgacaatgttggttcacatagacaaattgcttgcgtgtaggagagaggggagtggggaccgctccttcaccggcttcgcgtgaccatagttggtcactagaacctcccactcttgcagcagttctcgatcagaaaaagtggtcatctgc

SEQ ID NO: 40459 - DNA, 693 bp, Oryza sativa
gtatctttgtttattacaaaactacagatactttacacaatatatcacaaaactacagatttaagaacttgtttcacaaaactatatatttagtgtcttcatttattacaaaatacagagttagtgttttcatttatcacagaactacacatttagtatcttcatttatcacaaaactatagatttagtgtctccattatcacaaaactataggtttcaacaatgctaaaatatgtagtttgtgataataaagacattaaacctttagttttgtgataaatgaagatattaaatctatagttttataaaacaagtttttaaatatgtagttttgtgacaaattgtacaaaccaggaattgaagaggagtgtgcacatgtgtacgtttgtactatatttctaaaaagaagaaatatgccaggttttttacgtaatgtcgtgatatcttttgtatgggggtgtataatcgggcaatcactcgtctggaaaaatgttttatttatcagtgtgaaacacgcaatcctcgctccgatgatgctccccaagtgcatctgaaatcctataatatttaagtttttcatcggtgcctttctatttatcacaaatactgtagtaatttgaggacctatttgtccattaaacagcaaacaattaattacaggtgctccaagcaaacaacttttggctgcaggaa

SEQ ID NO: 40460 - DNA, 1484 bp, Oryza sativa
tgaagactagatctacctcttggatagtcatcttcaggagggccttcaacgataggaatgcccagctgaataatttccctcccatgacccttcattggtctttttccaattattacagtctgcccagctgttttaccaaaaaaaatcatagtgaagtgacaagatcccaaaatgttacatggttaatatgaccctttttctctagtttgtgctcagcatctgtgtcagtttgtgttcagcgtcatagttgacatagatgctgaacacaaactagagaaaaagggtcaaattaaccatgtactaacataagtgtcagacacatatccaaaaggagccgcaaaagtaactgtcaatgattttctagttgatcaactaagcataagaaaaggctgtttctcagacaaataatctttgatggactcatggtacacttttttatatacagatatggaaacagattttgcaaaactggaatcttagtgcacaaccacgtggtgcacagtgaacacattagcacacaaatgaatagctgttcatggttatttcacccaaaaaaaagaaggtaagtctaccttcaagccctcctcgacgaaaagaagcttttgtttcattaagtaaagagagaatcttgtttttctcattctcatttaccaacccttcataaaccttaagcccttcaacagcattaacctaaagaagcataaagcatatttcatcaaatcttcgagattcaagagaagctagttgaaaaggagatgcgaatacagcactagaatttctgatctaggtaaaacagaccgtcttgccatcaataatgtcattgaccgtatactccacaggagttggaaccactttactgcttccttcagcaacagcttgcggcctaggagttttttcaccttctacatgatgcaaggacaataagatgttaagaaatgataaaaaattattgcatcactatatggaaactatcagaagcaagaacaaaaagtatagcagccagcaataaatgtactattctgcctgtataaatattcgacaatgtatcaacaagctggaaagtggaaacagtttcctagcttttgtcagtctagaaaaaaagaaaagggccaaaattcctgatcctattttaccagtattgcatcctcacgctataaaattaaggttgtaagtaatgtggtctaacaattttatgaacaatttcaaaatattccaaatgtgaccaagtcattgacatagttggactaaatttgaggtggagatagccacttaagaaaactaatgaaagtcatcttcagattgagattgcttcaccatcatttttcaaaaaaaataacacacaatagtaaaataaattcgaatttttgctgacagggtagaaatccaagcattgtgggttgcaatttattgctgtcttttttagacaattcttttcccaactaaaggtctgccctatgttctacaagattctagagaactattga

SEQ ID NO: 40461 - DNA, 2346 bp, Oryza sativa
ttcagtgttgtcactgtgtcagctcatatcatatggaattatggatatcaattctttttggacaaaggttagacctcgtgcatgaatggcagagtaaatgggcggctagtgagagatcgatgtgtcgtcgtcagcttccataactggtaatcagttttccatatggctgcatgcatggcgatgggtcattggacgctaggacccttttcagcgtttctgaatctctgactctgaagaagtgtgtgatcttctgcaagcttgcatcgctcaactcaagtagataagccgctataatctaatagaatagtgtagcagcgtaaatctgtagtgaagctgcacttagcacgcctcctaattcccagtgctcgtgttatctatctgaaatgaaaaccccaagtggttcgtagtggagcaccaacttaatcaaatcaaatgatcaagtgctgtaaatgcatgcatccatgtatatgcatgcgtctcggtgttaattaggcagcgtctatttgcaacgtgtggcacgattagttgattgggacgaatggtatggggacattgtttatcagcctgcagactttgcgacgatgtgatctgactgaatctgccaatcaaatctgtagacgagtagcagtgtgtagtgctactgctgctagctgcatgtattgataaaagaaaaagaaaacattttccacaaccgattacatctcgtgtgttgagtcttacttggaaatttctaggcggttgctgtatctcgcagaaatataacttttttgttcagattttaaaaagttgtaattcataaaatgaattaaaagctataaacctatttttaaattttttttaaattgactacgaaccaattactcctctaaacatgctcttggaatagtctctcccatcagaaagataagcatcgtgacatcatatcactaaatcagttagtgcgcacgattggttggtgcagtgcatgcatgtacgacgacagtaaagaacaccacaagtcggctagcctccactaggccaggcccgcatagacgaacggcccatgtaaggtctgggtaaggctgaactgtaaacagttttgggcttttgatgggtaagagttgtcctggacgtcaggtcgaatgggctaggtcggttcaggcctgatgcactaccaggccctcccaatcccggcccgttttcgctgtgaaatttattgattaccaagtttttgtaaaatttgtatcaagttttaagttggactttaaaaagtacagcaacgctagctcatgcgtttaaagcttacactgcaagtgttagccttctagattgccaaaatatttctcaatccatacatgtaagaaaaaattacgttacgaagtactccctctacctcaatttgatcgtcatctaaatttttgatattttttaaatgatcatctaacaaaatacttatttgttatttgtgcaaagagtaaatttgcatcgcgaaatgccctaaatgcattcaactaatcaatattattttctattggtttaacccatgcaatatttaaagtgttaattaatttttgttgaacacgacgggacaccttgattgatgaggattaatatcagaatgatggatgttttggtgccttttgcttatgggataatcaaattgggatggagagagtacaaaccaaatcgatcacataagcacaaaacaaatactgcaaatgcggaagacacatatttcacatttgtgtggttaatattgcaacaatcaaaatatctatgttgaaatcatttttttcacaaatattagggtgccttctaacctggttaagatgaaaattaagtgtagacacacaaaacaagaaaaccattagcgcataatttattgagttttaattatttcaaactaaaaaaatcatttgaattttaaatcaacatcaacttctatatataatttttttacacgaaatatatcgtttagcggtttaaaaaacgagctaacgaaaaccgaggtaaattatgtcaatcataatattggaactaaaactatgagtctatgacaactctcttaaaaaaaaaactagaactaaacagcttctttaatttgaaagcaagcaaggagagaattggagaatgacacttctgcaagttaggagtaaaattataatggtatggttccaaattactttttttttcctgtcctctcctcgtctctctctccccaacctactctcttctcctgcagtccagctctcggttccttgctcctccaagtctccgtcggatccatcctcccctaccccgcgaaaccctagcctcccgagcccctcgccgccggcggatggcgacggcttgatcggccctggacac

SEQ ID NO: 40462 - DNA, 1178 bp, Oryza sativa
cgtactagcattgcttgggccaatatatggaaaatctgttcattataatgagccacatcatgttgggccgacacagtgaatgagaaaatcccaaacatgaattctaacacattgagggtgtcccctcatatacttttttctctttaaaatttaatgcagatggttatgaaaaaaaaatcaatatagagcatagtagcatctatcccttgattgttatcattatgtcaaaatggagttgctagaaatatgacgccatatgctatttcagccactttgcacagtagtgtcacgccccgaactagtcccgaccggaactagcccgtgacgctccaaattaacctgttaatcgataccagtcccaggaaacagtgctggtatcacagggagacagagtatcacagcaacagaggtctctttattatagagtagaagtacagtcatgttgggctgcggacagatcccgagctcacaactgcattacaaaaggaaaacggaagccaggacttggaccattcatcacaggcgcgacttgggaactaggccgaaaccctaaaactcatcgtagccgacttgctcctggaagaactcttcgtcagcaggatccacttcatcttcttcagcaactggggggggattatttatatagagcaagggtgagtacgggagtactcagcaagccaggggaaataagtgtttaatgcaggcttcaaggaaaggctgttgttttcgtaattgattttgtttgaactcttttctaaaaattctaagtgagtgcttctcaaacgacacggatgagacagtgcgtctcgtccggtcggagtatgtgcaatgtatcagtctttaggattgcaacaaggttggcacccggccaacagcttttcaaacggccacccgggccaacaacttttcaaacggccacccgggccaacaacttttcaaacggccacccgggcctagctgatcccatcagctacagatttttcaaacatcgaaccccttttcacaacagcaatttcacaagcagtagtcagacaaaactacgctaggaatcacctcacatccgcccttgaccgtgggcacgactattcgaacagttcaatgacctctgcagagggggtacactttacccacacgacattactaacccggatcacccagcccgtggggatcagccacgt

SEQ ID NO: 40463 - DNA, 1892 bp, Oryza sativa
aatctcgtcaaattcgaggagcacggccgcgttgcgggtttgcggttgcagcgctctcggagtctctccgtcccaagtcataataacttctaaggagcttctagcaaaatttatctaagatctttaatcatctagattctaaaattacgtagttaaaaaactaaaaactgaaagatatagatttttttatgttcttaaaagttggctactaaccagcggcttttcagaatcttaatcccccaattcttcatatgcttatgtaagctttggaacaaaatatttgataaaagttaaagtctccaatatgtgagcttgtaggttatgaggtattccatgttaacgaccacgacatgttgtataaagtacagttatattcgatgagttattttgttattatgagaaaaacttatcggtgtgagggagtgtgtagtcttcggttgtttgattttggattgaatggttaggtgtatactcaatgactcctacttctctctctctctaacattcatagcaatataactatgatgaatgcttgctatagaagtgaacatacgtaggcatagaaaattcagcgataaggaattcgttatgagaaatatatatgattgtgaccacaactcttgtttatttataatgcaagaaggggaaaaaacgtgaccagtggttggctcaaagaatagaatagagctcatatagatttctcatggaaaattgtaaatacctgtgaaagtttattgttcatccatttggaacaaatgaactaagcgtaaaggaaccaaggaattggcgccttcgattctataggaattttcacgtccatcttgggccctttttctttcctttgccatgtacataaatcaagctttatagcaccaaatatatataaccatgatttgagcacatgtaggtaccaattataatatacacttatatggcaatatttgtatatgtgttcaaaacactttacccttttatgtttcctacattttaaaatcatctatctcggatatgcattcctatgtttttttcccctaatttcccatatattacatttatgcattccacataaacctaacaattggtggattttaagatataaatcgaacaaaaaccctaaggaagattattagtttctcatgtccatgatcaaatcaataccaatcgttgctccacgcctaaataagaactaaaaaagatggtagatcaaagctagcaccgctataaaaaaagggggaaaggggatgatgcacttgaatgccatgcatatgcctagagtctattattttgtttaagaaaagtataacatatgagattccaagtattctatctggtcggagattgctgcagttgacgcttttggtcatcttgcttggtgcctatttggtacccattcatcatcactatcagacccactttccgtcatttgaatcggatatccttctcttttggatatctggtcgcgtcgcttgccccttcctaactctttaacaataatatatgttcctttactacttgttttcatcgtatcccgggctcgactttggccccgtagatgggagcctccacgcctaggcatgtttgctaccattcccttcccccttactataggttgccttcgccgtaacctggtggggatagagaagagaataaaacatgagcgattagaataataaggagagatgtttaatatattgagaaccaccgaagttgttgaatgtgataaccattgtattaatgaagagataaatatgtagaccaattatgcaccttttcttgatataaatgctacctccaagactttaaaaaaaattgtcaaataccaactctataattaatactgctaacttaatacatcctgcaactataatgatataatggtattttggaagcgt

SEQ ID NO: 40464 - DNA, 546 bp, Oryza sativa
gggtaaccataaagatggactgaattgcatgactactgtaaaataatagtaagccccactatcaatcatcaagctcacctggttgctgtgaccacacttcttcttgcggcagttgacagccctagggtgcaggcgcgcatagcatctgtagataaataacaaggtcggtcaaagttaaaatttgtttttttacagtccaagatacatacagaaatataaaacatgaccccttgggagttatgtacagcatgaaaagttgcaaatagcatgtcaaataaaagcatgcacatacataggcaattgaaaataagagaacatggaccacagacatgtaacgaaacactgaaatacaacagtagattggcaagtcagacaattgtatgcctcaaaattttagctcataaggtaacctcgtacatctaattgattcatcattcctgccaattaaaaaaggaccaactgtccatacaaacaaataaagaaaaccaaattcacacaccgataatcaataaccaaaaataacaagaatgaacaaagcaaataggc

SEQ ID NO: 40465 - DNA, 548 bp, Oryza sativa
catcctcaaatcttcctctgaagtatatcttcaagcagcataattttgctgagaaatcaacctgagataacagcttggttgagcatatttcgttggacattatcctataatagagaacttttacggtgtttgcattccaaaaagggtaaagatccaacgctcctcaatcacaggtactatgttaaaggtatttaagtattgatataggtatttaggtactaagggtaaaaatataattttgctagtagagtgaaaagggtagaattgtcctccaaattataataggtaccgcataggtacgctctacacggtatcagcgtatcttacacagtatcagcgtatcttttacgtggtttcttgaagatttacgttgtattcgagttaagccaccgtagtgttctttgatgttctcttttgcgtagatttctctagatttacattgtattgttataatacattagtagcctaattatgtgaattttttctacatttacattttgttccaacgaacacatgaaaactcataccttaattatgataaaaattat

SEQ ID NO: 40466 - DNA, 712 bp, Oryza sativa
aacatacgtaaaatcaatctagggtttgtctcctactctgtactgtgccgtctatcgtagactactccatcccgctcgctggcgtgcaccggcaatcgggagagcaggtctccagaacctctgcattcgacgtccttcaccgggagaaggcggcaataaggtttttgggaagcgcttcgcgcgactgctccctgttcatccgcgacggctcgccttcctctccgctcgcgtgctgcgcgccttcgtcgacgcccgcaaccgcaagtagttcctgccgagcaatcggtctttccgccacctcggtatgtgttcgacatgttgcgcatatttgatctgttcatgttttactgcttagtttacatgtgtagatctaatgatgcgttcaatctagtttacgtctgcaatgacatgatttatttatggaataaattaaatcattatgtgcttataatttcaacacctgaatcactgtcaaaagaagcatcaacattaatcttgagtaagggcaacaatagctacatatgatcttgacggggtctgaacactttcaccattaaccatctgcctcctttcccaccaaatataccatcctcttgtcgaaacaatttcagaaaagcccaagtcattaagcatagaagtgattcaattgctatgattaaaaatagaagtgactagttgataccccgcgctttactccggggtatatggatga

SEQ ID NO: 40467 - DNA, 1135 bp, Oryza sativa
catcacatatctgattttgcggttggaggacgattttataatttgatgtcaagtcgagtgacattcgatgtactttttccctcacatggcgcctcgatcggtgggcccaccaccgctcgcccaaatagcaggatatgtagtttgccttagggttaacagcgagtgtaaataacaaacgtgactggcagcatgtgtcaattaatggtgatgactaggatcatctgaaattgtccaattacaagagagaccaaattagttgtatttaatcgagcatcgaatatatttttataatatatttattttgtatcagaaatgctgatatatttttatcaaacttaaataagtttgactagctagaaaaaaaattaaatgatttataatataaaatagaggaagcgctatattttagaaaggaggaagtatagtctatggttaaatcactcatcgtcttaatttttcgttgctgcaactatcagaaaccatcgcattttcagacccatttgctctagtggttttcacacacgtcataaaaattatcttaatttgataattacatattatgagagcacactcatgtgaagttagaaaccgtgtctaagccgacagtaactgttatttaaagaaattgaccgtccccatccaatatccaatattttcatcggtctccatgtatgtgtcacatcattgtagctagtacgccaaacagcacgcaagttaaaatcttgaccctaccgtatcactagctgatgaacagatattgagaccctagatacaaaatataatatactaaacaatgcgtacatggatagaatgtcctattcaacacatatgcacaaatcacacgattaattacaaaagagaaaacaaataccagttcaatctcaccctaagcaacgacgacgacgacgacccatggatatgatgaacccaaagtaaaccttcgaagcaacgacttgttcgtgtgtacttcacctactcacaaaagagctattctcccatagataaactcacaagtaacaacaaccatcctagctagactccatccttgcactccaagcaacactaatctctccctagctacaccatctctttataagcatacatatatatacataaacataaacgttagtgtgtg

SEQ ID NO: 40468 - DNA, 533 bp, Oryza sativa
tattggcagtaacattgatataaaattatcttttttgtgtcgagattatatactactcacgttggctcccttggaacctctgaattctgcaacaatttcgtaggaaatgaaacatccacccttactagttactaggatagttacaagcagtggtgttccaaacaaaatttgtgcgagaattcatgagttccaaatggagcctctcagcattatagattgtaaatcctttcatttgggtattaacaaaaagaatagggcggttgccgccatattattcatagatcaaccaaaggaggatatataaagaaaaacaaaaggtgggaagagcactgaacatctacctagatggagtatcaccctcttggattggaatggaatttgcaggcgaaagtaacaaaactcaactactgaaatggtagtagtatcatcgagttggtgcttctggtttccgcggtaaaaaaaaaaaaaactcgtgtgatcgtgtgtctggtccggtcgacgccatgtatcgatccgattttaacactcttgtc

SEQ ID NO: 40469 - DNA, 1008 bp, Oryza sativa
aaacctagagtctaaataatcaagtaaacaattacttttcaggatggtagatgtcttaactaatctaatctagtaggaagatttaccaataccagcaagagccctaagtgagaaccaatcgatagagataaatctagatactaagactagattagctaagacatatgatagcatatgaccatgataaaagaactaaaacatctaaagcgacataatagccccaatagcacaagccatcgagacgtgttacctcttgcaaagcgaactcgttgaaaagtaaaaacaaaaagggtggcaatgcgctgaagttgtattggattgtctcccgtattacaatactagggggggttcatatttataccccgagtcaaacctttctaaagataaaatacaaacaagaccatatacggcggtctctttgtaacatacccgaaattctaggacttaaaatttcttgtcaaaatagttagaggttaacttctccaatttttgagagccaaaaatttccgttttaatttaggtgatgaccaacttaaaccattgcatgattaaaatttgagaacaaaataaaaccttttcattcccaacattagactagaaatgtcatcaagcatttgagcatacatgtgcataatacatgcctaggctcgagtcccttgtgcatttggattatggtctcgcttttcataaaagggttaaaattactaaacaaacctatagttaatcttgggtgataacatgtggacttaatattaaactcaaatatcatcttctcagctcaaaagaagtttaatgtaatccctgtaacaatattaggtgcaattatgaagtgggaacacatatacaaagtaaagtaatcctaattctctaaaatattatgtgcaagttaaaaaccatggaaaaaaattagatagacaatgtttagcacaagcaattcactataatattggtacaagttaataactaagcttaataccacaaattaatcagtcaaagcaggaaactaaa

SEQ ID NO: 40470 - DNA, 666 bp, Oryza sativa
ctgcaagtcggtcatcattaggcttttacattaattgagcacaaaaaagaaagattacaaagcttggctaaaagtccacagccctaaaattttagctggcattttcttggtagaaattcaggtgggccctaacctattttcttaacccatggtggcgcagtaccaaactggactattgattggccttttacccttaaaaccaccggctggttaccaaccttgccaaatttgtaaaatcttatttaaaacaaaaacttccgattttcttggccattcccttttaccttatagcctgaatcttatcaattagtgggggattaattaaattaagcccataattctggatcgcatcaaacattcggccctaaaggcttagaaccaagggaacacttaaagcttttttattaggaagttaacgaaatatggtctgaatatatttcattcattaaattagataagaaattaactttttcaccaacacttttggttaaggaaaaattaacttggaccatcaaagccactaccagttggggacagaagatagaaattgaaatgtacaggttatcttatttaagatgtcagcgctttttaacccactagctatttggccatgttgttaaggaaaaattaacttggccaacccaaacccctaaaagtttgaggaca

SEQ ID NO: 40471 - DNA, 732 bp, Oryza sativa
aacctaattaagtcatctggagtatatgctaggaaagaactcaagaagagacacttattagtcagccactattccctggatttggccaccaaagtacagagactaactcgaatttgtgaagcaagtgtacattgaggcgcaaattatctaaaaaaattcggcacagacgtacaaaatttcacatttaaaacggggtcaaccaagtcttgatcaaactgcagaacagcacaaattaatgtaaccaccatatcgacgatgatgtctgcatatatgtacggcaatataattgagctgatcgaagtctagctagcttgcttgcattcctggtctccgattcatcgccatgcatgcttagagcaggtacaatagcaggattttaagaagataataaggagagagaagagcatcgggctatagatttgtagccagctgtagcacgaactccaagacgcagtgtgtgtataacaggtgggatcagatattaatagtgtagtatgtacctattatacgaatgagctattagactggctatagatgaattggagttagtagatggctatactattaaacttgctcttatgtcctcatcaatatcttgcaaagatactgcaagatctgtttaagttgggagaagagaggatctaggacactgtgcccttctagctagtgtacacttgtaggccccgtccgtatacgccacacactgttttcaacatttcgttacgtaactgc

SEQ ID NO: 40472 - DNA, 565 bp, Oryza sativa
agtaaatttgtggatgcagtatataggcaacgaccaagcctctccatcctcagagaacaaatcaacatggaacccggattcagagcttaaccactacctcgccaccaatcatactgagcatgatccgacgcttgatggccacgatgtcgatctccttgggtggtggaaagagaaagagcgaactcttcctgtgttagctcactttgctcgagatattcttctggttccagcctcctccgtctcttccgagcaagcattcaacgttactggaagaattattgaagaacaatggtcatgcctgacacccgagacggttaagtcaatattttgtcttaaagactggatggaagcagacgaactaacgcaacactgtctacatgatcaagagtttgccgatgcaatggaagacgcattggcggaaatttgccttaccaaagatgatggtggtgttgatctggagtaattgatggtataatgtaaaatagttgttgtactcttttttccttacggggaaccctactttagggcgtaaggtttttaacgaggcaacaactatatattcaaa

SEQ ID NO: 40473 - DNA, 549 bp, Oryza sativa
cacacgtacgtatatatacgtgtgtgtatatatataaatacgtgtgtatatatatatatatatacgcgcgtgcatatttattgcatttaaattctgatgcacacaattatgtatgtgcgggtctacttttattagaaatttagtcaggttacggctttattatctattttcgtctctcgatagtatgtatgtgtgcatcttccatgtgattaaaaacaaaagacgatacatgcatcatgtcgtgtatttatcatatatgattactatataattaaaaaggagatggagaaacgtgctacatgtgtcatctcatgtatttgtgtatatatatataattaaaaaaagagagggagagacgcgctacgtgcgtcacccccatgtattttttgggtatatatatatatatatatatatatatatatatatgatcaccaagcctcttattgtgcattttggtagtttgcagtagcgggcagatcgagtgcatggcgctcgggctagtcgtcgagaagctggcgctatggctgctcgcgtcatgcgcggatgcgg

SEQ ID NO: 40474 - DNA, 522 bp, Oryza sativa
taacttcggtatctaatgtgaaattagaaacggaatttagcgtttacacccacagtttgagtgtcaagtacatcagcgtcttcttctgctgtttagctgcttcgaagtttgcatttacatagcttgcacctactgaaaccgcaggagtgatgaagtagtttacgttcgcgccccaagctttatttggagaatcgttgtagcttgattccatgtatgaagcaccaacgctaagtgctggtgttaaataaagatcagtttttaagttataagcagtgctttcaccgtaaactatacctgcttcaaaaccaacagccatatttgtaccgtcaattgcgcctacatattttgtacgtgcagtgattgcgtcttggtcttgagcaattgtgcctgactcaagcgctgctttagcaacaccattagcaaggatattgaaagcatctaaagaatattgatcggcaacgcttgtataacctacagcaaccaagaagttaggcgctacaactgcaccaagttctaaggcat

SEQ ID NO: 40475 - DNA, 629 bp, Oryza sativa
ctgaagggtcgatcgacctcatgcctcttccccttccaatcgatctcatctcgacgcctcccgctcccggtaacggcgccggcgagccaacgacagggatcccagcctacggcgtgacgcggagcgcgcactggaggacgacgtggagcgcgaccgcgccgaggccgcagacgaggagggcgagcaggacgatggcattggtgttgaacgacacggtgactggaccgccgccgccatggccgttctcggcggccagcagagcgcgcttatcggtcgtcgccatggccggcagtggtgagcaagctacagtgtaatgtttgttcaatttattttcctgaacgtgtggttgctgatttgtagtgcgaactgtgcattcatggtgttcgatgaaatgaccaagaaagaatatatcttgttctttcttagagttgcatttgatagcacagttaggactattttgttggatagtgtattaattgctctattgctactatactacttctgcagaaatccaggagaaacacacaactagaaaatgccgaatttgatgctaagttatgaaactcttatatggattactaatgagttaagttatgtattactgattccatcgtagcagcaatcgaatt

SEQ ID NO: 40476 - DNA, 867 bp, Oryza sativa
gcgttttgatctccggcgaagccctgctgctcctcccgtcatcgccaagcttcgccgctgcctccattggattcacagctgcgaagtgaagcccggccacccctccgttgtcgccgcacatcgccggaaagtcgtcgcctccgtggacagtacctcgccgcccttcgaagctcgtcgccggccatcttccgttgccgttcgtcgtcgcataagtggtggtaagggtcactttgatcccctctcgctcccggtgccctccgtttgcgttattgtgccgtgattcgccggcaaccgccgctcccatgccgttcccagtgtagtttatccctagggtcttaatcccatctaatctaatctaatcttgtttggccctagtgtcgtcatctccatgtgttgccgccggttcaccgtcgtcatctatctctccccgattggttcggtgggacgtctatccgtgtctccttggtttagatttcaacccatcggccgcacttgccaagccgctttgtcacagccgcagccgtgcctgttgcattgttgttcgccgcgctgctgccctagcccgtgcaccgtcgctaccggagtgccgctgttgtttgctgtcaccgctgcgctagtcgtctagctgcccgttgtgccgctccctgccacagtcgtgttgctgctgctgtgcgtaactgcttgccgctagctgctgtctggccgctgtgctgtgacgtgccattgctgctgtactggtcgcagccgtgcgtcgcttaaacctagccgccgctttagcccgttgctcggtagttgagttgtctagctgtaggtgcatccctaaatcctgccggcctatagtttgccggaccccggctttaccgtgaa

SEQ ID NO: 40477 - DNA, 566 bp, Oryza sativa
ccttaattgaagccacaaattccagtccaaatccatctcttcctccgccggagacgacgaagaccagggtttaacttctcgatttgtaaaaacagcttcttatcggtttatcgaaatacgacaaaaaacgatgaatttgatcaacgccgtaaaaaagcggctactacctatcggttttcacaaatcgatacctaacagtttcacgaaaatagatcgattttttgaaattccatcggttcggcgtgctggggggcaaacgttctcacgaggaagaaaggtcggacagacacgggaaaatgcgcgatttccagccgttcgatgggttgacggcgtgatctatttcacctgggccggaaacaggtgcgcgagggattgcggcccgttatagttgggctgaaacgggagcgcgactaatgtgcgggccgtcatggtcggccttatcacctgctcgggagattgatcaaactgtccagcttcccaaaactggaagaagatagtgcaccgtggaaacctgccaacagcagcagcgaatggatctgtgcagtgctggtgcatggttgcttcat

SEQ ID NO: 40478 - DNA, 566 bp, Oryza sativa
cttatacaagaccgagcactgtatcggcgagctcgataatcagtacaagcggctcacggccattcatggagatttgaaggggattataacactggtgagtgcctcccattctgctgcattcccacctcccacctaacgacgtctacagtttaacgggatacttcaacactacaacacgcgcatcgcagactcttatgcgcgcgccgccaaaacctcgacagacagcatgggttggctggcactcaagacgaagcaggagaccgtgtcaatccacgtcattaccatccttacccttttcttcctcccggccacttttgttgcagtaagcgccggcctttttactttgtatctgtacctgtaccactatgattttcaacctcgagtctgggccctgactggatatcagaccttcttcgggagcggagtaatcgactttgagagggaaggggaggaggatgtcatggaaggtaagtggggatactgggaggtcagatggggagcgctcaagctgttcggtgcattcatcgggccactgacgggtctggtgctggcaacatgggcagtaa

SEQ ID NO: 40479 - DNA, 921 bp, Oryza sativa
cggcacctacccatagcccaacgtcctcctccctgaagccacccacgtcgctttcttcatcatcttcccctctctattgcggtttgcgacaaggcccacgagcaagaatgggattgagcgagggtggcgacggtaacctgaggcctggcggagtgcgacgatgccaacattgtcgaaggggaggcaaagcggcagcgtggagcagagcgaaggacgcccttcgcgaactcgattgttgaatcaattgaagaagggattgggcttctgcgagcgtggggttacgtcgttgtcgtggagggcagcaagttgtggacatggatgcgcctggtgctaccaatgccggagaaggagacggtgtaccggcttgtgaggggagggcaacagtagggcgatgaccgcgatagcaacccaacatggccggaaagccatgctagggtttttttttctcttcctcctaccatgcctccactttcgctccgctctgctcctagcccaccatctccctacccccaatcgagctcgtcgatgtgggccctgcatgctgactcaaccagttggatcagatcaacgagctatgtcagtgcaaatgttgaaggagacaaattataacggtttcaatagctagagggttaaaatatcttaaattgggtttgagggaaacaattttgattggatatagtagtatattttgagggagtcacagtgaacttattccccaataaaatatgtaaagattccttgaaaaatccggcacgagatcgagaggcccattaccatatggaccacatggccccgcaacgttcgaattgagaagacaaatcggccgcaaagcctcgactgcctaacggtcaaatgcctcctcgaattcaaaaccacccccgctccgcctttatatcggactcccacgctcccttcccccat

SEQ ID NO: 40480 - DNA, 648 bp, Oryza sativa
gagtcttctgtactactttttcccgtcatgtgttgacaaacttaacccagagattgggcttgtatatggagaagcacctgtgctgcttgaatctggtaatgatgagaacgcaattatgactatctttggagaaagcaagagtgaccctggtaacttgcaagggtttggtgccgaacaagttatattagttcgtgatgatgcaaccaagaaacaggttgttgaccttgttggtaaacaagctcttgttttgacaattgttgaatgtaagggccttgagttccaggtatgagccttaccacttaaatttcaattgtggttgttgataagcatttttcctgtttactgtaagaagccttttaggactgaattatgttgtattaaataaatttctaggatacttatttatttttaaaatatcattttgtgtaggacgtgctgctgtacaatttctttagctcatcacctttaagaaataaatggagagttgtgtatgactacatgaaaggcaaaaatgttatagaatcatctgaagagatgtcccactcttttttcgacaaaaacaagcattatcttctctgttcagagttgaagcagctctatgttgcaattacacgaactaggcaaaggctgtggatatgtgagaatgca

SEQ ID NO: 40481 - DNA, 790 bp, Oryza sativa
aaaaacgaaaagttgtgcttaaagtactttggataataaagtaagtcaaaaaaataaataataattctaaatttttttaataagacgagtggtcaaatagcgtaagtaaaaactataaatcccttatattatgggacggagggagtacgtgtttttaatgtccagtaacaaataccacaaattttaaatgtactatagtaaattttgccaaactaataaatatacatgtcatatagtgatttgcatcgtcgggacttctttcttatgaagctaccttatgattttcagttctgacgagcaggagcttgggacacggagacaagcttttgacagctaaaacttaattaattacttgagatttagggttatctcctaaatttctgttagattctgacaagatacagtgaatattttgaagtacaaaatgtataagcaagttcactatagtattgaacagcccattgtttcgttaatttggggaataagcgaaacggcttatttgtaaataaaaaataatttataaataaaatttttatatcgtgttcttagcgatttaaaaataaaggttgaaaaataaacttcgatgaaaaaaatctcaaaattaactctaaatttaaattttagccgataagtataagcataatctgctcctgcttgggaggatcatgatgtactactttgattgcgtcaattttactccttccgcttgagcaaacggcgatgataaatttatttcacagccctcgcagccatgcatcaacacgtaattaagtactagttgacagtgaaa

SEQ ID NO: 40482 - DNA, 739 bp, Oryza sativa
cagcacatgatgccatttgttaagtctttcagctctatggatcacattcgtgtattcttaaattctaagaatcttgtggatgaactgctgagtgtagagatggatatgggtaattttgttgaagctgctgggatagcaaagcatacaggaaacatcttattggaggccgatctgcttgaaaaggcaggttttcttgaaaatgctacacaacttatcctccttcaattatttgtgaattctctctgggcttcgcacagtacaggatggcctccaaaaaggtttgcggagaaggagcaattgcttgcaaaagccaaagaaatgtcaaggaatgtatcggagtcattctactgccttgtttgctcagaagcagatgccctttcagatgaacataagtctcttgccagcataacttataacttgattgagggcaataaatgtggaaacttgttagtcgaacttatagcttctcgcttgattcttgatgttcatcttcaggctgaagcctctggatactgttttgaatcagagccagggtctcatgatggacggcattgcaaagatatgctagttcttaatcagatatcacttgaaactctagtatacgattggaattactggagttcaattatagtcaaagtgctcaggcatcttgatcaccctaaggacgcaaaatcaaatgatttggcagcaatctgtgaagatctttgtgctaaatactttggatggagaaaagatggtg

SEQ ID NO: 40483 - DNA, 1221 bp, Oryza sativa
gccctcgttttataaagtttttcacaatgggacgagtagaaacaaacttataagctaaaccaaaactatgcttaacagattgcaagccacttcaaaatctttcttaatgtgcactctttgaatttactctgttctttttttctttttgggaatacacaagaattgtacataagagaaaaagggaaattcaccacaaacaacagatttactgcacacacaaaagggcatctagcagaacacttgggttataactatttcatgttccagctttagctctaactatgctgtcagactactagccgatgcattcttgcgccagcagcagaccactgctttgcttctgttatttatccttctgaatttttggttatggtccttctaaatgattccctccttttaagtactcttttaaagtaaaagtgatatttttaagcaaattacatctacaaatgataggttatactgtattctccaaaagaaatgaaggtgctccctttagttaagatattgaaaggaaataccagtgaaagcatagaagccatataacttttttatttttgtcctgcaatcttgatcggttttcttgcatctagcctaaccactgtggagcaagcgatcatgggtagatctggatgcgttttcttcgttaggaaaaaaaatgcagcaagctattagtgctagacttgaacttcagatggtcaaaaattctaaccatttttttgtgatgtgcacccccatcaggattttaggaaggatgtcaaaagagtaagaatctagaccgcttccaaaatttgagaacagaatatattggatcactaaaaaaattctctgaattaattaaaacctataaaatttgtctgctttagaacctataaaattttcttttaaaggtatacttctgcaaattcccttttcttctgtttatttagagtgcattgtactccctccattccataatataaggcacaactactttttaaagttgtttcataatgtttcataatataaggcgagacatgcatgcatgtcattaactagcacatcttttccactaaatgttattatttaaatcctctaccattaagatctctaattttattggatgcatgtattctatttattaggataatccaaactatgaggtgataataattatttcttggtctttgggttaagggtggttgtgccttatatttgggaatggagaaaaaatttttttta

SEQ ID NO: 40484 - DNA, 662 bp, Oryza sativa
taggagggaagtacttcaaaagcttatcaaacttggtgttggctggaggacaacaatgaagaatttgaatttcaatgtaattgatcctttccagcttgcaaaagtatacaaagtcagggacctttatcttgtttggagtaccgatatagagaaaagcgaaaggtatgttcagattataagaatttgggacctgttgtctcaccagaatgttgcaagaactgttcaacgtcttgaaaatctgttttccatgtacacggatgagtacctcgataagtgcagaagagtaaagactgaggggtatgtgcttttttgttctgccagtgtttatattcaggctctgtggatatcttttccttttgatgctctataaacagtgtaatctggtatcctcagaaaaaaatcactaatcttattgacttaatatatttaatgaatgaaatgtgcctgtacatgtcaaggattcttgatgcttgcaaatgaactaaatataatgtgtcttattttgtgcttcatttttattgtggatactaggaaactggaagtgcctgttatttgggatgccgagcatgatattattcgctatcggaaggttctggaagttgatgctcaggaagaccatgatcatgtggacatatcatatgctatggagaattcgggagtca

SEQ ID NO: 40485 - DNA, 598 bp, Oryza sativa
tttctgtttgcctttttattaaccttttaattttactaattacccttatttttggtccccatttagttcccccgttgggtcaccaggatcccccccagggttgtttttggccctgattccaataacaagtccaacaataattataataagtttaataaggactacaataattacggggaaaccggccacagggacaactttcaccaccccgtgaaggaggaaaaaggttttatgtcaaaggttgaacctagtcctaaacagtgtacacctaacttggaaaaattgggaaaatacttttaaaagtcgtttcatgatgcacacttaacatatctactcgtgtaggtaattaacgggggggtaggtaacaaggaccgttcacccggtatcataatttgctcagtggtggtaaatggtggtaatgacattacattggttccattctgcattcgtacttgctatcgcattctttattggctgaatatgccaattaaaacacggtatgcttaattactctaaaacttccaatagcattgcttgttcaaccaatgcagtgatcgtgtagcttatgtctgccgattacctggccttgctctaaatt

SEQ ID NO: 40486 - DNA, 1839 bp, Oryza sativa
aaaaaaaaaggagcctccacgttcgctctcatgacctagaaattctcacattaatcagagaaaaagaaaaggcagagtccatatagtaatacaatttagaaatagctgaaattcataattaaaaaataaggaatattaaaagaggagactagagtctatatagaaatacaatttaaaaatagttgaaattcggaattaaaaaataaggaatattagaagaggagactagagtccatatagaaatacaatttagaaatagttgaaattaggaattaagaaataaggaatattagaagaggagactagagtccatatagaaatacaattaggaaataactaaaattcggaattaaaaataagaaatattagaagtagagtatagagtccatatagaaatacaattaggaaataaccgaaattcgaaattaaaaataagaaatattagaagtagagtatagagtccatatagaaatacaattaagaaaaaaaaagaaatttggaattaaaaataaggaatattagaagtagagtataaagtttatattggaatttaaaaccaactaaaattcagaataaaaaggagcctccacgttcgctctcatggcctagaaattctcacattaatcagagaaaaaaaagcatagtccatatagaaatacaatttagaaatagctgaaattcagaattaaaaaataagaaatattagaagaggagactagagtagttattacacattagtagttttgaaaagttattgcaaaatttaaaattatgttgttattgtaatatattttaataatataatgagaaaaatatatgctattatatgagagaaaatataatgatgctagccgcgcaatctgcgcgggccaccatgctagtttatcatataatgctgagtactaagacggctctataatgcagcgtaaggaagcaaaaagggtggccttgggcaggttggacgagaatgtttgttgattcaacacaactggacagcatcctgcaacaagccaaccaccaccctggaagatagaaagtgtgatcaacgtctttgttgcaagaacatatcatggggtttgcgttgctgtttgttttgtgaggttggtgatagtttggtgtgggttttggtcacgcaatggccacgtaaatcgacgagatgcgtgtgttgtgaaaccatggtttctgcaacctccgctcgaataatttatttatgtttcttcttctatttatgtacgattcgactgtattttaaagtctgatcgtagtaagctcatcacttcatcagctgcgtgtgtgcctgtttgtaagtgtgtattttcaaagttatttgcagttgctcaatctgttagatttctaatggcaaactagttgagactagtgtcctttcaaacatatatactcactgtccaagagtgtactagtactctgaaatatagccggcaaatttgagagtaatcggaacatcaatctgatgaacgtcacactaccttgtgctcttcagctcttgggcatccaaaacttgtgtcaaaatgtccggatcatttgctattgtcctttgctcctgatcagccaccctattcagcaagatggtattcagctcttatcaataccgtgtgccctcacgtgacactgattgcaaaccaaaccatccaacgacggggacacagctagaatatttatgcaccatcacgctcagaaaagattcaccggtaaccaaatacttatagtacggattaggacagaagtacattacagccacaagcaacatgagcacacgtcttttgcttgttcttattttaggcatcagcatcgcctcactgtaactaccgatgcacgcca

SEQ ID NO: 40487 - DNA, 2437 bp, Oryza sativa
aattcctgcagcccgtcgtcgtatggagctctagtggaaaacgacccgcgtatactgaagagagcgacctcaaattgtttccaactttaagtgccatattgtttatcagtttttgcctgttagtctgggtagtggtgttctcgtgcattcatccttgcgcattgagcaattgatctgtagctttatctagattcttcacaccctcctattattgagtgggatggttgtgattggttgatagaaagatgtaagtgaagaaatagcttcattttaaaacaaagtaccatgctaaaataattatattttgagacagagatatactacttatttctcgaaatgtagcaacttttagctatatatttatgtcagaagttattatggctttggaaccgatgtaggccccattttatttagatcaagacaccaattttaccttgattttttatatcatgtttttaaactgctaaatgatgtattttgcacgaaaactttcttttagataaattcatttttaagtttcaaataattaaaactcaattaattactccctccatcctacgaagactcattttttagtttttgatataacatttgactcatcgtcttatttaaaaattttctatgattagtgtttttctcgttactagataaaacatgaatactccctcatttttagattttgacacagtcttcaagatgctacttgatcaataatatctataaaagtaaaatgttttaaataaaaagaattgcacatgatagttgtttaatgataattctagtaacaatcaattttacatgatcgatctttttttctactaatagtcaaaattaaaaatgtttgacttgacactattctaaaaattattatattttttgtacggaggatctagtactttatgtgtggttaattttttttaaaaaaattttcataaatttttcagataagacggatggatatactagcttcattattttcaatataaatgaacaccactgtagtatatgctctctccatttcaaaatagaaggcaactgaggctcttataaccactgggttacagtccctttcgcattatcatcttattgttagaatcatcctaataaatacaatgcatgtgtccaatagaattagaaattctaagagtgaagaatttaaataataataaggaataagtctacataaccccaccaactatcacagcgtgactacttaaccccctcaactatcaaaccatgtatcagacccctcatctttctaataccgtttaattaaccccctgaggtagttttgccaggtggtgtgctgagttggacaagcttcttgtgttatagcaggctgacatgtgggcatgcatgattttgtgacactcaaatgacctgaaacacttatgcttaaattctgaatgttatggcgttatttccgctagcacctgttgcttaaattctgaatgttatggcgcgctagcacctgttgctttgaattgtacactgaaatagcttttcatgatgtagcagccaattatgtttgtttcggtggaaatgaatagttcaaattatgatctaatttgtgtttgcattatgattatgtgcatgctgtcatatacttttagtgttgattttttttaagccgattcaatgtccagagtttaatcctctcacttacaagccggtctacatgtcagcctgctctaacacaggaagcttgtccagtttaacacgccaccgtggcaaaaccaccctccaaaaccaccttagggggttaattaaacaatatttaaaagatgagggggtctaatacatggtttaatagttgagggggttaagtagttatccggtgataagtaattttaaggatgctagttaattgcatatatgtcttgtattatagaacatctgaaaaaaattggggggagtaaaagttttttcagtctcatgagaatacatagaagttccaggttaatctgagaaacaattaaaaatttaaaaccaacatgtagccagtagccacaagagaattagcacgctttcggcgacaatgaccccttcacagttcacactcccaacatagcttctctcggcgctcgtctatgctgtatgcaccaccgagaaggagaacagcaagcaaaggcgcgacgacatgccgtgcagaagagcaagcacaccggccgctgcagctgcagctgatcctgctgtggctgcatggcctctcaccccactggtgctggcgctcgccgtcttctcggcgatgcctcacgtcacgctctcccggggacgggagaatcagtggccgcctctagagggaaactcgcagctgacgacgacgaagaacctgtcgtgcgacgaagtcccttatcccttcggcttaaaaggcaaatctgcccctggcttcagggtaacatgccggaaaaacgacagtgctgccatgctccgcatt

SEQ ID NO: 40488 - DNA, 1511 bp, Oryza sativa
agaacgagctcagccatggctagctctgtttcagctcaaaccagggacctctgtggagaagaagcaaaactctaggtactacgttctaaaaactacctcacacatagagcagtcataggactgcggattgattgcctgaaaatccagggacctttttgcatattgatatctcactgacaggtggaccccatgagcttaaaatctgaaaatctaaggaaaatcctctagagctttatattttcaacagaaaaacatgcaaacttgtaaaattcatacaaagtgaaatatagctcattttgagatgattcaagtttctgtgaactcatagtaggatgaactttaatatggaaacataaaacttggcacttgcagtataaatttcacctctaaaatttatctaagaaaaaactatacataaagcatgcacaaacttacaaattgcatagagaattcatttcaacttaaattgaagcaaactcaacttctacagattcaccaacttactctctaaggtaaaataaaataacaagatacacttgcttttcaccaaatgccactaaatgtatgttcaactaaataacttgttttagataagctgaactctaaaacattttataaaattcatattacttcctttttgagtaaactcaagttctgtagaatcatcaagtctaggacttcaaagatataaaataaaaatatacacttacagtgcaataaaatcccctaaatatttataaaaggaataaacaacttagagcacccttcaacttgtaaaatttctagagaattcatctttagtctaaatgtaatgaaccaagtttctatagaaccagcaagtaatgaacattaattaggtaaaataaaatgtggaaccttctatactaaatatgtcactaaactttaaatagataacttaagtgctagtcacatggtatatattggctaagcaatacatatgtataaataggcaatccatatgtataaatgtatatataaatgcactctagctctaactaaccaaaataaaacttgatggaccagagaggtcatagttccatccctaaccaccaaaaacttagcacacttagctcatatatcaatttctaggttggtatgttaagtaactaacatagaacgctcccctagcttataaaatgtgtagtagcgtaatataatctctaaaattgtgaactaagattatattggttaataaaattagtcattttatacatctcaaacaatatgaaacatgtcctggacataaaactccgaaaccatgtacacatagaagctatatacctacaacacattataacttgtaaaacacataagaaattcataataactccaaaagttgtgaaaccaaatgttttagtcttagaaaacacatctctacatccctgatatgttaaacctaataagaatggggatcctctaaagtagacctgcaggcatgcaagtgaataccaccctataccgagtaaacttctgaaattcataactcacaa

SEQ ID NO: 40489 - DNA, 645 bp, Oryza sativa
aagaaagaagaagagaagaagaagaaatagaggaggaagaaggagcatctgatagtgggtcccacataaacagtatcttttatttgattttatttcaatttcaaactttagacacccatatctcttcaaccacaaacccaatcccagaaattctttgatctaaattcatctaattccaaactctttattttgataccaaattacctattttaaacattttatttaaattgctttatttatttaaataccttttatttatttacattctgaatttaaaattgttttaaataaccttgttaaattattatattttattcaaatacctttttaatttattttatttatcttaaatacctttaaatttaaatctcttgttctatttaaaaaccccttttaaattaaattttcctataattcatctaaatacattctcgtcatttaaatatctttatgattcaaaataccatttcaaaattctttattaccctttttgaatattcaaatttctttaattaaaaacctttttgaattcaaattcctttgatttatttaaataccctctttatttctaaaccatacctataccattccatagccactaaacagccgccgtgagaactttacgctttccatggagacattcac

SEQ ID NO: 40490 - DNA, 834 bp, Oryza sativa
atttcataatgtccgcagccaatgttatagtttgaacctaagtgatgagcaactagcagatcttgcattccaaggattgtcagcaccaatcagagatagattcttttgccacgggtttgacagtctagctcatctaatgcaaacagtatcagctcacgaaagccgattgcaagacgcaaatgaagatcagttttggagttatcaagaccagacagaagataattttgaagcatgagtactcatactctaaactggggggcatgtgttaacgacgaaatttggtaagcccaaagtcatcatcggctgaaagtcaatatcggttttagagttctagaaacagccgatgggagtcgtcaagtcgccatgctatcgtgttcttggtggagtcggatcaatcgaaggaagcttatttagaagagtccaagttcaaggaggatgccgtatgacagtttatctattaattaggaatagtttgttagtttccttttatctttaggaaagtatgtttagtgtccgataaggacttgtatcaactcatgggtataaatatgtacacccggggtctatgtaatatatcaatctatcgatcaatacaactactctcggtgcatcgccaccctctttaccgaggtttttacttgtcttccggcggaaattggcacctgacacggggctgcatcggctttcgatctccggcgaaggggtaagtcctacattccattgggccctggtgaatctgtcatctacgtcggcgtcgttcacggctgcatcgctacgacttcttggatctctctggtttggttgattgatttgcctacctgatatctcaattct

SEQ ID NO: 40491 - DNA, 656 bp, Oryza sativa
gattaagcaatctagtaccaaactttgtttgacatgtgtggatattatgggtaccccatacccatacggcatggttatccgactagtcataggggataacttatatctatgtaatatgtaacagatcatgacttgggtgttacgtttccttgtatattacggaacggcctaaagtcctgatttaggaaaccgataccgtattggttaaggtttctatcttgtaatcctgccccccatcctatataaggtgggcaggaggccctctagggggcagagatatatgatgagacaacctgatcgtcagatcaatacacactcggcggattcaaatccccaaacaggagtagggtattacctctcattgagagggcctgaacctgtctaaatcctttgtctccacatccatccacttttaggtctcgtgcgctaccccgttttattattgccgaaatcatgtttcgacaacatgtgttgctaatgagatgaaactaaaatatgctttgggtcgtgttaagcacatggaggaaattgttaacaagatgaagtgatgtcttgctcaacgtgtagaaaataaaagagtgttttggatgcttgcaaaaattgtgctactctttctcaagaggttttttacttaaaaaagttctttgcaaagattt

SEQ ID NO: 40492 - DNA, 635 bp, Oryza sativa
cccacactattcattaataataatgtggtaattgatgctaattaatttagctcctggtttggaatggtatattcttggtttggagatagatctgtgcagccgggtatggttgttcaggatggttgggcctgtgcagcatgggtatgttgtacagtgttgattaatattgatgattaattgctctactgttttacaattctcaaatgtttgctaaatgctgcttttgcaaataagccctatactatgccattctttagtatccttgtgcacttgcatatttgctgtgtggcttgctgagtatgtcatatgctcaccttgcaataatcaatcaaacctcaagttgaagacaagttgcgaaggagaagatatttggcttataccccaattgagctggctgtgggagtgggagccgggaagctttcgctagaccgtatttccgctacagttttctttttccttttggaaagtatgtatcgttattattttgatggattttgattattaaattgtcagttggggtaccttggctgatttctgggacgagggtttttatgcacaaattagttccagaaaattacttagtgaattcctgggctgtgacaccaccctactccctttccgacttcaccctcttt

SEQ ID NO: 40493 - DNA, 1471 bp, Oryza sativa
cttcagctttaatttttccaaccccacacgcctgtgcctagcctgaaatttaattcagcacaacagattatatttttgtcattcaatagccatttaaatagctttgtatgatatgacctctagtaaaatatctgaacacccagtttcctgaaactagttgtgaacatagtagcagttcagaatagataaatatgctaaattgattgctaagagtaaaataggtattcgaacaaaagatggacagctacatttctcaagttttaacaagggcattttgctaaacaaaaagccatggaaaaaaataccaaaactagaatgtatactacagtgtccacctgaccacctgatagcatgactttaaaattttttgcatcttcttgctcattcaattggcatatagtattggtcgttcaatctgaagctcaaatgaccttggccaaaagcaaagtgatgcattctagacagcaacaacagagtgcactagtttttatttttcaggtgtgctcccactgcatctacaataattcctggagaatcaacaaaccaggtttctccctcacaaaaaaagaaaagaaagaagagagcccatgttcagaaatataggatctgccaattgaaatatatatttccttgattacagagcaactgataggcaagatttgcacacacacatagagagatgtgcatggaattttctgtggtttcaggttctactactacaaaccacatcacccctccttctaagcagaacatgactgatacttcaatccatacagccactcaattcatcaactagcaacaaattcatccactagataagtcacaaaatcttttctgagtgggaaaagaggagatcaagaatcagacctgcttcttagtgtccgggctgttgccctcgacctcgccctctcccgcaactggtgaatcccaaccgaggaaggagagatggcgagcgccggcaactgggcgggatggagagcgggaaggagagcggcggcggctgaaacgggatggagaccgtcggcggctgaggacgggatggacaccggcggcggctgaagcgggatgaagaccagcggcaaccgacggcgggatggagagcggcggcggctggagatatgctgctctcggatctccaccctagagccgcctcttggacctcgcgccgcctccaaaccctagcgcagcgaggagtcgaggaggccgagcgctgcggctggcttggaaaagaaaaatcgtctccgaggcgatttttctctccccgtggaattggtgtggattgggtggagaattgctccgaccccagcccaggcgaacgcatacatgggccacggaagaaaattcgacccggccgggatggcacacggggattttggcccattccccccccccctcaaacccagccgaaaagaacaaggcctgaggggggaattaatcccctttccctcctctctctttcccccttaattct

SEQ ID NO: 40494 - DNA, 864 bp, Oryza sativa
agcttcgaggagagagatcgagctattcttctcaaactccggccgccgagctccatctttaattcctctttcaccggtgagccccaagtcgattccgtgaacacatagatttcctaggacctctttaacatgggagacatgcatgcatggcagttcttgtagtaagtcaagccgacgccgttcatccgagaaggagcgccgtcgccgagccgttccgaacgccgtcgtcggcgacaaagcttcgccaacctcgtacaatactactgtgagcaccctggagcttctagagttgcatgcatgcattttatccacctagatccggcctctaacgtgacatgcatcactaccccgagacccaccgccgctcgtgccgccgtcgccattgattccggtaaccacagatcaccataagacaatcattggattcgaaaagaacccctcttccttttctcttttggtttcatgccgagatcttccaccgttcgctgccggcaagctcgagaacgagctcagccatggctagctctgtttcagctcaaaccagggacctctgtggagaagaaacaaaactctaggtactacgttctaaaaactacctcacacatagaacagtcataggactgcggattgattgcctgaaaatccagggacctttttgcatattgatatctcactgacaggtggaccccatgagcttaaaatctgaaaatctaaggaaaatcctctagagctttatattttcaacagaaaaacatgcaaacttgtaaaattcatacaaagtgaaatatagctcattttgagatgattcaagtttctgtgaactcatagtaggatgaactttaatatggaaacataaaacttggc

SEQ ID NO: 40495 - DNA, 1261 bp, Oryza sativa
agatcgccagaagattgtttgcgccaacaacgtcttgcggacgcacaggcgaaacgtgggagcctgccccacacttcggccgagtcggactgggggtatagccgtgtgacccgtcatcctcgtcagacctggtgtaacatacccgaattctaggtcttaaaaatttcttgtcaaaatagttagaaactaacttttccaatgttgagagacaaaaattttccctttaacctaggtgaggtcaacttaacttgtacttagataaaatttgaggacaaactaaaaacttttcattttcagcctaggacaaaaatgcaaacaaaaatgtgtgcatgcatatgcatttagcattagtttgatttgagtcttttatgcgcgtttggattttggtttgcatatcatgttaggttcatgaacataaataaaaggataacttcactagacaaacccatggtcattattgtgaaataattataagtacatgaaagtgaagtcaaataataacaactcagttcaagtcaagtcctaatataagtctttacaaacatttagatgcatttatataatgagaacacttatataaataaacgtcttgcgaattattgaaaataattcgtgcaaggtaaaatcatggaaaaattcatgtagtctgtaatcaacacgtacaattcactgtaattttggtcaaattttaatacttaggatgatacctcaaataaatcagtcaaaccaattaaatgatagactaattataatccttaatcggctaaaacctactctcaccataatgtgcatgaaactgcatagaagtgtataggggaaacaatttattcaaatactaggttatttataatgaataaatatattttttcagaatttatatactctatttaaatctcctaaaaattcaaacaaagttctaacgagcccattttctccaattttctgagggcaaaccacataaaatttttgagagcaactacagaaaatggaaactaggtatcttcatctacgtccagaaaattccacatgaatttatcgtgcccacaaattaaactatagattaacaagagaggagagagatttaaatcctgaaaatcgtccaaaatcgataacacccaatctcctaccctcctctctcactccagacttgttcccttcgcccttgacccactttcagcctcacaagctcgctccccctgagtacatgatgccctatgttaggtactctaacgatttctccctcaaatttactggacaattg

SEQ ID NO: 40496 - DNA, 1262 bp, Oryza sativa
cagattgggcaggatcacgatcagacaataacaagtccagcagcaaagtcattcgggaagacgtcaaagcatgtcaagggggataaattggttctcttgggaagcataacttatagttaaagtggttgacccttgcatcgaatagcagaagtacctagcaccggagaccaggaaagctaatatgagatagttaatggcaagttgtcaatcatggtatccttagtaagcgggatatcatagtctaaagcatatggtggtaagctggaaggaaacgccaagcatggtattctcatgatgacaagcatggtatcctagtaatgacaagctagtgttgacgcatgagatgaagtggtaacttgtatgaggttgactccgaagatatgaatcatgagaagttctggaacggaagcatcattaaactaccgcaacctagtctgagtcagctaaaaggtgcaccctggttcaagtcaggagaagagaagattccatccgcaacaggagatcgagccaagcagtccagagtggagaagttttgctaggcaagttcgttatagaagacgcgacggaagaagtcagacaagaggagaagaccgcccaacctatcttcatgctagcctcctcgaatctcggggacgagattcttgtaaggggggtggatttgtcacgtcctgataaattcaacccgaaataaaaatcattttccaaaaggaataatagaattaattaaaattcggaaagaaattggcaaacactaaaatacgtacaagaaaaattcaaatgtggcccggagaatttttattaaattctccttggtctaaaaggagccctcaaattttagtggaattttcagagcacaaataataattgagaagaaataaacaaagttaaaaaggttttataaaaagaaaatctctaaaagtcttcttttcccccttttcccctcttgggccggctcggaccaactccctccctctctctcctctcctccgcggcccatcggcctcctcccgcgcgcgcgccgctgacaggcgggcccgcccgccaccctcgctgacgggtggggcccacctgtcatcgccttcctcgcgccgcgcccgtcgcccgcccgtgccctagcgccgccgccgccaccgaatccgccgcatcccgccgttcccgcgcgccataatgagggggaaatcactccccgtgattccctcccccttttcccccgctttcccctctctctctccctcggattcgctcggaatctttcccctaaa

SEQ ID NO: 40497 - DNA, 1158 bp, Oryza sativa
actctagaggatcccctcgtaagctcataatctattatgaaccaaataacctagcgattgatggcgattaaaatcaagtgatcaaccaaagagacatttgtttggaccaagggtttcagatatgtcttctttggatcaaaggcatgcacccgttgtggagaaattggacacgttgctagcatgtgcctcaccctctgccctcattgtgaagaagaccatccaccaggggagtgtcccatccgcaaggtcacatgttttctgtgcgagggtacaaaccatgtgcccaaggattgccaacttagtgtgttgttgaccaagaccgcagaaatccaacgaacaaccctacgattgtctcgtcagctagtcagctccaacaacaacatcgatgatatcatccacagcaccaatgctcctcttgctccacctaactctgcaataaatcatggcaataatacctttagcactaaccattctctgcaccgacagcctcagcaaagaattgtcgtcgatggaagaagttgtgtctctccccgacctactccaggccaagcaaagggcaatcaacctccggagggcgataccaagcagaagaccgtcatccgcttcaaccagcaatcagaaggaagcttctcctgtgaatgatagcattatgcagtcctatcacatcatcacagaaccaatcaaggatgcagtcactagaacaatgccagctatatttctccagaatcaaaatgagcagccatgtttgtggttttcagttcgctacttatcatggtgtaatcgaaagtttgcagcaatcatgtaatacataaatatattcatgtttataaacagtgagcttgctatgcttatggatgattcatgttgaggatacaatgtaccgatgttaagcaccgtccctttttgtttgaggcagtgcctcgtattcatgtaatgagggagaaatgtgtaatacagacaagttccatgaggattcttttggaagatgcggatatgtgattatgtgtataattgcttactgataaagaagacctagggtctcatttcaaaggaactatgttctaaccttgagttaataaccaacctagtgatggaaaagaaaaccaattaaactgtgttgggttaaaaagccaatgagacagtagttggggataggag

SEQ ID NO: 40498 - DNA, 542 bp, Oryza sativa
ccatcggcaattaaaccctagtggcatagatacagatagcaagcaatgtatttccctgaaggtagtcagtgcagctttttgacgaaccacatcaaggtttcaccgaaaggcagcaagccaaaggacctcatcgtccccagaagcgtccgcaatccacattagagaataccacctgttagagataagccgaaagatgattgataaaagagattggcaaagatgttctctagcatgaaagaagtaggccgaaaggtgattgataaacagaaacatgctctgcatcgctcaaggaagccccctgatagtaattgcccccccccccacaacagtcaccttgtcattaaataagcaagatgacctaggtaaaagtgtttctatgaaggcaaggagtgaaatcttcaactcggtatcagatgctacacggagtgaaaagtgcaagccccggttaccaggcaacgccatgtcttgggagatgatccaatgggaaagaacacatcaaggctgaaggtgcacaggaatacgttgaatgctaaatgatgaca

SEQ ID NO: 40499 - DNA, 631 bp, Oryza sativa
acttgctttcgcgttgacaaaaaaatcttgaggaaaatttcctacctatgttctccaacgagtggcgaaaaggttggattattttttatactattatgaatagtaatgggccccgtgggccttttcaatcttgcattcggccttttactgttcggcctctgcccgatgggaatttactgtttcgtctacccttggacacgtggcgggttttgattggtctatagtcgaactgtcgcttggcgagtctatataaccctgccgcgggttaccaccttcccccccgctcttcactttttactaccgccgcgctttccttctctacctgtgctcttagcttttcaccatctctgcgctcctgcgcttgctctcttgactctttcccccccccctctcgtctttagacttctgcttttgccgcgggttcggtggctccttgcaagctcgcctaggccggtgtcacgcccggaaaaattaccttttctcgaacactagtgtattaatccccggtccacgataagccggggtacaccacataaacatgatacaaaggcacatctttattatatcgataatatttgcattaatacaaggcactttcagtttgacataaaaaataaacaacagcggacta

SEQ ID NO: 40500 - DNA, 516 bp, Oryza sativa
cagcttaagaagaaaataaaatcagggggggcttaaaagctattttgcacaaatccatatcttgtttgataaggtatgctacttcatttactgagaggcaagaattttgaaaaattcttctgtttctttctagccaaatattccaccaaagtagttagtagtgtgcctctgataccctgcatttgaactttgcttcccacatggttggttccattccaccaagtttcaacatcatggggatggggtgtagttataggggttagattttggaaatggcagattagactccaagtttgtctggtaaaaatacattcaaattcttttagataatagtgatgaataatgtaattgaacagtctgtcaattactttgttacagtttcatggcggtggtgttccaatattattgtcgatgcgatagacacgaacaccacaacacggggccggcttaggccttgtttagttggggaaaaaatttaggtaagttgtcacatcggatatacggacacacatttga

SEQ ID NO: 40501 - DNA, 663 bp, Oryza sativa
acgagttgccttgaagctttcgtcttgacgggatggggcgaggcgtgcgtcagaccgccagtcgccacctaacccttgatctgaccggtctgtgactggtcacagaccggataaaagagcgtgctgtactgcgttgcacgcagcgtgacacgcttgaccagactgcaataaatgctgttaggtgagcacagctgtgctcacttatcccatatatgtggcgcagacttctttaaggggtcgggggtggctcgaggcgaatcgagaaaaatacccgcgaaaatggcctattagtcaactagacatacgcgttatctgtcctaatgtcagggcatgtcctaagtgtgtgtgtcctgtcatgctattatcaccgacaaagaatatatgcacaaatataatactgattatctacattcctgagatgtaccaataagagctgacttttattactcccttcgcacaagattgttgcaacctaagattgtcctatgatgggtctagtctgattataccctacatcgcagcatgttatgacgaacgacgaatcattattttgtggcagtgctgcgtgaacaaatctaacgtatacacgaatgaaatttgtgcctgtctctagccgttgccatgcagcaatgcattgtttaaggaaagtcgcgttatatattc

SEQ ID NO: 40502 - DNA, 933 bp, Oryza sativa
  unsure (1)..(933): unsure at all n locations
ccgctatgtgatctccatcttgttactgacccaaaaatgacctgagtatggagacggacgacatcgcaaagacatctacagctgggggacctctagaaggggaatagctctcttaaaagcatgatggccatagctatcctcggcgcccaacagtacttcgctcacctatccacacaacatacaaaccggagcgaagctacaatagccagagacgcctactgtgcgtgctaagacacattaaatgagaagcgctcactggccactttacaggcaagaaaactggctcgccagctgacttaacgaatataacatcgctcattaagaagcgtatactgaagtactcactgttacgctacattattcaatgactcaatattctggctggttctattgccgccagcagaatctgctctctcaaaggcaattatacacctattcacaatatcatgcaagaacacactaaggaacatgctatgctatatgacaccaataggccagcaacctgttagacgctcaagatggttgcgagcctcatagacctacaccacatgacaagcatgactatactggactctgatgtcagacgtggccatagccatcagaactatgaagataccaagcctgtacccaagcatgctctatcgtgcccttacatgcgcacgctgtcgtttaccgcaacctagacagctttctcccttgcagacagcgtggccacaccaatagctcacgcatattgtctcgtcaatcggtgcttgcacgcagcgtcaagctgaactgtatgacacacctgcatgctagccttacggtgagcctatccagagatatcgcatagaatacaacccgtatgacacgaatattatcccgtgaggaccancgagacatgatagcggaccacagattctgcgagcctctagatctcatgggtgccgacaa

SEQ ID NO: 40503 - DNA, 697 bp, Oryza sativa
tcctgcagcccactccatgtatggcttggtatcggatgcgtcaattggtccgtggctataggagagaaggacttaggcggatgacataatcttttgatagtccacatgctctacatacatagatatcccatttaaaatcatacaagtgtatattatttaaatcactaaatgagtgtcatcaatgtgttaagagcgaagcacaatcatgtatataactagggcggatattacgagtgcatttaaagatgcatattagttatccaaaacctctcgactagacagctagatgtgcgtacacaccaatcaaaaacttcattacagagcgattgcttggttaatcactaatcaattgcatacattgatatagttgatgcgcatgagggataacctgaccacacacaaagaatagggggggatgggaactgaacacttatggggagatatatgcgaagagatcctagatccatattgtgaattgtacgacgagagtatcccaataaacaggtgcttaccgtctgagcttgctgcgcgagctcctgcttactgagagcaactagctaggacatatactggatcgtattaagacatgactacatatggacctatatgcatgtgtacacattttctatgatgacaagatattgtgggcatgtgtctatcaatatacatatgcatctgcataacatatatctgtata

SEQ ID NO: 40504 - DNA, 522 bp, Oryza sativa
gtttataataattaaaactcaatcaattatactttaataccacctcgttttacgtaaaaaacttaatcttcatcttcatgtttttggagaaaagaacaccactgctgctctgctacatcttcattctttgaccggttcaagggaaccgaccatgccatcggctccttccaactcctcttgatggacgacgccttcgacctcatcttcgtcgacaacagcacaggatccctggcaccctcttcccgtcacagatcgtccaggaagtcgagaaagcaattcgtaggctgagttcgattgtgagggtacagagcgatggttagtacatgatttattagtgtagctaaaatgaatttgaaagagtaaaaccagcggttcttaaacttgccgtgaggtttcagttaggtccataaatttataaaacgcacattgagatctctaaacttggtttattgtatcaacccgatccaaagtcttgcttggctgtggtcttacgtggcacgccacgtggataatgacataaaa

SEQ ID NO: 40505 - DNA, 636 bp, Oryza sativa
gcgagttaaattgttactactacatagcccaccatatatattcacgttgagtcaggtaaattttaactgtgtgattcaccaactataatgaacatgacttagcatattgagttattcattaactaaaggaaacttttttttgctcatgccttaatttttttttgttattattattatcatcattattattattattattattattattattattattattattattattatcattattaatactattatcattattattattattattccgtcacataatggttttgcaaaattcaaacgcctacttattaaacggctcctgacatattgaccacacccacccactgcccaccacctgagacagcctgattttctgctcaaggatttataaatcatttaataaattatcaatagaattcatattaaaggtccattaattcacaatgcgaagttaactgcgggaaataaaagtcactatctatatagcaagcctggatccaatctctattaaattctccatgattagatctactctccggaatgttctcagattgttgacagctcaatcactaagtctaataatacaaagaacaatgtaccactcttctaacctataaatgtatcattaaatgatct

SEQ ID NO: 40506 - DNA, 578 bp, Oryza sativa
ttcctgcagcccataaatgcgatatataatattatgactcattttatatttaaaggaactttaagcgcatcttctacttgtttatatttgaattatacattttaattacgatgaatggataaaagtacatagactcaagtagtgcgtatatacaaagaacggagcaatactgagtgtgtagagcgctgacacacccatgcatattagactatgtattataaacactatgagactctctcataacaatctcaagccatcactcggcaatctagtaaatgtaaagaaaaacatatatacaaactctgagaaaaaaacaaaacatatacccatcgatacagacttaaatttatggctctaatattatctactatattagattacatacgttagaaaaagaccggaccaaactgcttccttacatagtctcatatgtccttatgacaagcacgaactaatgtccaaagattgacctacctctatgttcacgtaatctgtaatgctattatcagcgcatcgatttatacttacatatgtattacagcatatgatctatctttagtagcactacaaagactaga

SEQ ID NO: 40507 - DNA, 576 bp, Oryza sativa
gcaccatttacagcttgaaaagtacacacattcctccaccataccattctaatcatccctttggatattcattctcacagctggagcatgccacaccaatatattctccaatgcctgctactgctagatgaacaaatgaggaactgaatagataaactagaactcactgtcacaaacgtggagaactctgtctatttaacacagacaagcagtggagcctggaatgatattgctaacatgaacaggcgaagcatcacatagagtggtacacgcatggtattcattagagaccgcgagcgcgatatgatcagaagtatgcttggtgaggatgattctctaccacgctgcaagagccacatacgttattctgccatcagtatatatcgcattccagactctggtaagactacactgttactagacgtttgcgagtctgaaacggagcataaagatagatcctatgacacactcatgctgaatcatgcttatgagacttacagactgctagatatatcacgtgatatgctctaggagatcacgcagagtcggcattctgaaccagtgactgcagaggtt

SEQ ID NO: 40508 - DNA, 610 bp, Oryza sativa
tacgagatgcatattttgttttcctcgaatctcccaagagtattacatactgatagcaaacataaaattctctcaccaacatgttctatatataatacactagctagtagagcaagattgttgtgtaagagaagctagtagagcaagattgttgtgtaagaggtttcgatttagacatcaaattaagtagcatctctccatcatgcaattctgtcacggtaagttttgcgccttgagaacaagtttcctaacattgtaatcgtgtgtttgtgtatcacgcgagctggtcgcaaaggttgatttgcatgcgtattcagaaaagattcaaaataagaaaagaaaacagtgcaaaacagggatgatatagctgaaatcacattcaggatctgcatcgattttgtctcttccatttactctgaacagaactgcaacgaatatcaaaattttcttctcttcctcttttattacttccttcggagagaacacaaaaaaaagggttaattaaatggagaattggtttgcaaatctcgtttcgacccaatgcaactcataatgagccgtacgactacaggcccaaccagatcagccggactttcatgcggcctctgtg

SEQ ID NO: 40509 - DNA, 650 bp, Oryza sativa
atatatagctaggagtgatgtactctcacattgttcacatgcttgtgtttgtaatgggcagaggcattgttatcgctgtagtgattgcgatgtgttttctacataaaaattggatgaccacatcagtgggctaagggggatggatgtaacaatggataggaaaattgccttattgaatcaaaggaaaggaagtcttcgaagctatcgaatctcgggaaattggtcgtccatattaaatttatgacattcgtatttctacatagtttatagatctagttgataaacatagagtgttcattgggcttttctatccgacttgtcaaactttttttttccagatagaaattacttttcaaactttattccacttagggtgaatataaatatatgctgattaaatcattcaaaatgtgctgacatttgatgatcatcaccactataaccccccacaaaaaaaaactagaaatgagtttatatttgcaacaatcagggcagtcgaattaatttcgtgtatctaatagtctccacaaattaaaggactaaaattcttgaagaaaaaaatatgtatgaagctcaacaatgaattttgtagtgcaaattaagcaggtcaattaggtggtactgtgatggttcacagggctgcaggaatt

SEQ ID NO: 40510 - DNA, 613 bp, Oryza sativa
atgtttacagaaatagtgctagtacgagatcgagaagcatctaaatttttgaaacatttttatgaaaatgaaacaaatttgactgaccaaataatcagaaattgatccactagcttgtaccctctagtgctgaaattgtaaaccaagagtgcagaataagatcaatgtgtgcaattaattgatgccaagtgctctgcacatgaatgattctgaagttgatgcattggctacatacatatttgcagtctggctacatgcagggtcaagagacacacagaaattaaaaccacatatatatatatatatatatatatatatatataattcagtttaatttctcatgggtcaatcgtcaaagagaaacgaagcacgtaatttgcacgcctatttttgccggcgcacgaggggaaacgatgagcagattaacttgttccaaacgaactctcataaattgttcttcttcgccctttctctaataaaataacaacaaaattgctcatctcgccaaaacgaaaacagttttgttcaaatcctcaagcgctgattcccgatcagacggctagtagttggctgagattctttttaaaaaaatttcttatagcatatggaagaa

SEQ ID NO: 40511 - DNA, 646 bp, Oryza sativa
tatagggcgaattcgagctcggtacccgaacaatttgatacaactaatactactattttcaaaattaattcccctcatgtgcattgctgtatgcattccatcttgtcaaatctgtaattaaattgaccatttatcacacaacagttccattccccacgttaattaaatttgagaacaatttgagatacaaccaataccactattttcaaattaatttccctcatgtgaattactgtatgcattccattccattccatttcattttatttccccaaccacttttgagatttgctagcagcatagtgtggtgccaccccctccctcttgtttgttggagtagttttttttttcgcagtagtccttttcttttcgcaattggttgttgcagtgattttttttttactctcttccagcatacgtatgtctagccgattgcgttgtgtatcaaaacctctatttcttactaatatattgacgtacaatccttttacgtattcgcaaaaaatctgtatttaatttgacaagttaattattaattactcactcacacaacacaggaggtgtacctggtgacacgtgaggagaaagcgaggtggtcggcgctgccgcgcgacaagtacccgaagccgatggtgttccacgacgg

SEQ ID NO: 40512 - DNA, 602 bp, Oryza sativa
cgagctcggtacccatgtttttgacctaatgtggttttatatatcctacactttgaccattgtattttatattatattgctcatgatcttgaaattgacatcattggaaaatgtttcgaatatgaatctaatcataccataatgatttttattaaggacaaagaattttgctttcagacttttgttaaattatttgaatgcaattcaggtttggagcgcgcggttgtgacttttttttaaaaaagtaacaagaaaagataaaaaaaattaaaaaaaggctaggcatggcattagaaatgcatgatgaagatgaatactgcgtacctggtaccaaaagggagactgatggcattagatcctacaagaaaccactggagaaagatgcagacaagaaccgggacaatcaggccaagaacataaccggtgtgcctgctgtccctgcagctcccggcggcgtaggcgccgccgagtcccaagatcgccgtgacggtgagcccgtacagcgggaacttgatgcgcttgaggtcaagcttctcttattacacgttgaacgtgatggcgagcagggacgcgatgaaagagatggcgttggagaaaaagaa

SEQ ID NO: 40513 - DNA, 652 bp, Oryza sativa
gacagttatatgtccgaccaacattttactgatgtactaggcgtgctacaaagagttgtggctgatcatgtagttaattgatggcttaatatttggctttaatatgaaggagaaatggaacaataattcttcgtccgaaacatatatcaaatgaaatttgctgagcagagattaaatcaatacttacatggcatgttttactgcattattatcatacttcttccttttctaatttttatattagaagtcgtttgattttttttcttagtcaagctataagtttatagaaaaatatactaataattttaataaaaagtatattattaaaatattcaacattaacttaataaaactaatttggtgctgtaaatattattaaattttttaataaatttaatcaaatctaaaaatttgaataagaaaaaaaatcaaatgatttataatataaaacagagagtacttaattattcttttttacaggaaacacagcaggagatactcctaccgtgatgcattgcaaaagacagagagtgtttacgagagactgtagggtacttaattatgtccaacagccacctaccaacacgaggggggttaaatcactgacgcatacgcaacgtactgtttgcatttcttagagggctgcaggaat

SEQ ID NO: 40514 - DNA, 854 bp, Oryza sativa
actcgagcggcacttgtcggtctcgcttaacatgcacctgttatacgaggccagccccagcaaccagtgctgctttcacaggagggcaggatctcacagccccagttgtctgtctactatggaccaagagattagtcaagtcgtgctgaggtcagatcctgctctcacaacggcgttacggacgggcagcagaaggctcgacttgaaccaatcatgacaggcgcgagttgggaactaggccgcatctatacggctcaactgagccgtctagctgctccaagaactactggctggcggtagcctgatgatcatcttcagcaactatgcgggattgttcatatagagccagggtgcgtacgggtgtacgcatgtcgccatggggaatcggtgcttaatgctcgcgtcaaggacaggccggcgttttcgcaatcgatcatatttaaactctcgcttgtacccgctaacagcgggcttgctacacgacacggatgatgacagtgcgcttggttcgactaacggagagcacggtctcacttttaaatgactggatcgaggctgccatgcgtactacagtcccaaacgaccacccggctctggtagttccagtggcgtcgattttgaggcgtcgcaccgatccaccgttggacaattacagagccgtagtccacagactacactagcattccttgcatactccctgaccatcggacgggtagtccttctgttactaaccttgtgcggatgtcactgttccacccccatactgccttgatctgcgcccggctgaccgcccgctcgtacctggggttcatgcacgggtccctaagccataaggttccctttgctcacgggct

SEQ ID NO: 40515 - DNA, 638 bp, Oryza sativa
tatccctagggtcttacttgagtctaatccatggtctgtctagcatcgccgtcttctccatgtgttgccgccggttcaccgtctgcatctatctccgatcgctttggttcggtgagacttctatccgcgtcccctcgggttagcggtcaatccctcaggccatgcatgccgccgctgctgctctaaccgtagcgcagccgctgccgcgtcacttgccggctgccctgtgcaccgtcactaccggttgtgccgttgttgcttgatgccgacgttgtgctagccgactagccaaaccaagtcgccctagtgccgccatgtggcagctgagtgccgctttaacctaaccgactgtctagccgatgctcggtagccaagttgtctagccagaggtgtatccctaaattcctaccggtctatcgttagtcgtaccggggctctaccgcgactcgtttatagccgaccggtttagttgcagccgtggctgtatcggtcgctcgctcgttcgaataaggtgattcccgagcttcgacagttcgtacgtgttgagtgcttctttagagcacagccgccggcttcgatcgccggcttaggttgatcattcgagtgatcccgtgtagcgaacaatcgactcgttgagt

SEQ ID NO: 40516 - DNA, 837 bp, Oryza sativa
  unsure (1)..(837): unsure at all n locations
tgcagccctgattgggaacgagcgtgtgtggcgaaagtagggcgtagcagagaaagagttagagctcaggcggcgaaggcaagaggaacaatggcgaaaggaagggagcaaatccttttctcgatgcttttatacccttgcaatcgctgggcctggctcctcgtttctcgcgcccanctacttcgcttccctcgtatactcgactatcatcgctccactcgtcttccgcgtgcccccacgctatccacttttaatcccaattcgcaccgcattaccggtcgcccatgaagntaggatatgcgnangttgtggacaaatcagcaaatggatctgtatacgtgccgcgccgtataattaccgcttctgccgtcccgannagcggcgttacccgtatacatccaggcgaagacaanantgctgctcaaacccagaanttcgcgcgcctgtctcnnaagtggtggttggcanngtctctgnnaatagaaccgcnctcattgatggaccaaaccnaaagttatcaaatnaaccaatnngtgcatggcattggagacccgnnttgggcatnntttgcccaaactacccggagaaaccggtcaccacncnntgtcaccnnaggcttgtagnngggtggctngtcacaacatttgacacgcttccactttgggaacagggaaattgcnntctggcataacgccgggggctaactgtcggtgatatgggaccgggagtatcatgaccagaggcttgaggcagacgcaatcgcccacgtggcctggcaccttcggtgacgtcgggcccgagggtgaggtgtccgccctcctcgtgaattcccctgag

SEQ ID NO: 40517 - DNA, 687 bp, Oryza sativa
tcctgcagccctacactgtaccagtctgtccgcgatagctgactgccctgtatacactgcttcttcttctccttcctgctcatctacatctttaaaaccagcgatgtgtgctgtggaaccatcaactggctctccttgaaatatctctatcagaaaatctaagtactcaggggtgccatggcgaaatctcttggcgtcccccttctcctgggttgacactaaatgaatatcacggatgactctaaaatcatgtaaactagctatattattgacaactgcataccttaagtttttatgccaccaagcatatgatgcaattatttctccactagcacttctaccagttgcagtttgatgcttcatgccacacccaagcactgaaataattctttagatgggagaatctatgctttatgtgcttgacagaacgccttacgatagcccttaggacatatctggcgctaagattctggtaccctctatgtgcccatgctccattaggacaatgcccatgcattatttcctcacatgctatttcacacaatgagtaagttttttcttctgaccaatttgtcttgtgatacgtatcctaggaccgacaggcatgacttaactctacttgaacagtgaacaacatatgctgtcatacatatgcttagatcacggcattgatagcactatcaatat

SEQ ID NO: 40518 - DNA, 1414 bp, Oryza sativa
cagggcagtcgaattaatttcgtgtatctaatagtctccacaaattaaaggactaaaattcttgaagaaaaaaatatgtatgaagctcaacaatgaattttgtagtgcaaattaagcaggtcaattaggtggtactgtgatggttcacatgggcaggttgatactaactcccatcgccctataatctttctgttgtacatattattgttacgaatttcgttccataatggttggaaaaatgacacatgcttccatggccacgctactaatccttctgcaattaaaccagcagggtacacatggtgtgataatctcaattaaagctagtggttcgtacagaacatgcttgcatgttgctgcagtagctagctagtgagaagaaacgtgtgcttataaggaacctgattgatatttgattatttactgttgattgagatttatttatccatgtgaaataataaaggcatgcaggttcattagtccgatgtatacaactgtgatgttttgattagtggaggaactactgtagctagctagctatgaaaggattgtcgacaaaaccaaaaagtggtatggacaaaggatttaatcaaaatcatatgtacactacgagatgttaatacggagaagactgtaaaattatccattcatccattttcgccactgcctgtcaatctacagcttaagtttgcacaattatccccattaaaaaatgtttatttcatatgtcaatattaattccagcacctgaaaattgtgactgaaccaggaataagatgttttgttctcttccgttaaacagtttcattgaatattctttatattttgtttatcatcgaccaatcgttgccgatcgacttcagttaaatagttctctcaaatcattaaatggcaatattccctatattttcttcgttattatcgactaatatgtttgaatagctctattgaaatggttaaatcctcatattctctatcatttcctttatcatcaatcaattggtgccgatcgacttcagttaaatagtcctctcaaaacattaaattgcaatactctctatattgtgttcgttattatagatcaatcagtgccgatttttatgacatcatcaatcagtgctaactcattatgacatcatcaccattaattgatcggcagagctcgatccttacctttgtccttagaaagaaaagtatggcgccgcccgtggcgacacaaagttgagttggactacatcatgctacattaacacgtgccacagaagatcctgatgatgccctctttgagcaagagagacccctctctgcatctatctatctatctcacatactcacacactgatcacaaagcaaagcaaaagcctagtcgttcatactcttcccgttcagttcttctcctcccaaatctttctgc

SEQ ID NO: 40519 - DNA, 1047 bp, Oryza sativa
tattttgctgtgaaactgcatatgtagaagtccagatacactggaagacgtgacgtcgttgtctacttggcataccggccgcctgtctgtccttgtcgatttcactgccattttgcgcgtgaaatacgcattccaattgtctgtgtaaaatacggcaagctgagtctttttctctgttcctgtatcaggagaacgcactcgaatttgttgccacgcagaagaatcatatcacttcatctctataatgtttttcttatggcaagttgcatttgtgcatgagcttagaggaagaaattgacagcctcattgatcttttcgtttatacttatgtttattaactaaaatttaaatttttaacgccttgaatttgaagttgattttgagttttttatccatcgtagtttatttttcagcttttgcttttagatcgttaataacatgtatataaaaattttattcacaaattatttttcatttgtaaatatgtcatttcgcttttttccttcaatatgccaaacgataaggctgtgagttcctttctgcacttgataattacatggaaattaatttgagtcatgtagttattttacacacagggatggaagtaatgccacatgccttgaattttccatggcttctttaatttgcaactcaaaaccttcaagaaaccgtccatactttgtatttttgcggagaaaaaacgtccatacttgttgatgaagaacttttcaattagacggtttagattactacaatcgtatgtgcgtgcgccttttttcgattcgatccacacgccactttaacacgaggatagcaactcatccctttatccatacatcaaattccattgctgagagcatccatgtaaaatcgtggtcactgttgatgatcatgtcaccaaggacatatcagccatcagcaagccatctaagctcagtggcgtgtgatcccaactttgaggataaatggcacaactcaagcctagcttttgctccatcatgctgatgtccattttggaatgccaatcttggcaactgagggcaaggg

SEQ ID NO: 40520 - DNA, 536 bp, Oryza sativa
  unsure (1)..(536): unsure at all n locations
taagggagtctaagtggactttttcccgtgaagaagtacatccccgtacgtatagatgggccgggcccggccggcccatctaaagaagcggcttcgagagagagcaccctccgtacaaggagaggtcgcgagcccccaagagaagagaaaccccacgagcccccctccacctccacgccgcagccaacccaaagcgccatggcggacgaccacgccgccgccgccgacctcgtcgacggcggacgccccgaggtgatcccctctgctccctcctcccttgtctgtctgtcctgtgagggggagttcccatctaggtgccgagccttggggggccgtgaagccctccgatggctctcgatcgatctgtgcgtagctagggctgtcgctcgtgaaggcccctagggcgtggcttctcctagggcttactagtgttctccgagggggttgttccgctggcgtggggctttaggggtggggttcgctcgatgcagattcggcggactgaatcngggggggggggggggggggaggggggg

SEQ ID NO: 40521 - DNA, 4708 bp, Oryza sativa
aatgggtcccagcaaaattttttaattctaatgccacgtagacgccacggtggaatgaataccatgtcaacaccgccacatcagtgccatgtcagcaaaaccacacttgaaaaccactgaggaagtcaaattacacggttttaatagttcagggagtcgttctgtccggttttgcggttgagggtcacggattagattcacgtcacttttaagggagtcaatgtggacttattccttttcagtatatgaaggcatgagactattaatttgaatgcggcccatctggcacattcccttgcatggcccagcaactgatctgcataccggcccaacagttcattcggcccaactatctgatgcattatatatttattcaggaagacaacgcgcatttaatttgcacatctacattccttttagaaaatcctgcacatctgaagaggaaatttattctcatatttgaataggtgtatatccaaaataaaatggcatacaataaattgtaggaaaaaaaaaggcatttaatgctggagatataaaatggaattaataaaccttacacatggaaaagcaataaattatacaaagatttgtgaaggcataaatgcaaggacacatcatcgtaagatttggttgtgcccctatataaacatgagcaaaggggcacaacaatgagcacagtgaaactgaagagggcagatacatacaaacaagagctcagagcttgtttcttcagtgatctctcctaatggcagctaccaagaggatggcttactccatctcggtggttttcatgcttcttttgatcatctcttccaccttctcatcctgctacgcaggcaagcatcgatcccaattcctcacccagaaatttactgtcattcagactaattgctatgtgtgctgtttgatttgagtggttcatgatgatctttcttttcttgaaaaaagaaaacagaattgcgcgaatggtggcttatgatgcttcaattgtgttgcatttgcagctaaagatatgaaggaccgagaagcaataatacagcgccatcgcgaagagtgtaagaaaacatgcagagaacgtcatacttactgcccgcctgagatgccatgctgctgcatgaagaacgccccggcatcatctcccagtagtgtcaagaatgaaagcggcgatgggcttgtaattaattaattaaattgattgatcatctcccatccaaatttgtaacggatcgatttgttagtttgatgctatctcaatgaataaacattcatgattttgttatattatgaaaacgtggttattactccatggttgcaaacaattaaggggcagcagagaagagcatgaaagtctgaataactgtgtgtaccgtactgtacctgacgaaacaagcaacgttttattgccttgttgcatatgcaggaaatcacgtttgtgacatgtcttgtgtctggtgtagtggtgtgctgaatctccagcaattcagcatcggaataaccactcgttctccattaacgtagaaacgaagaaagcaggcgaagacatcaggcagaatgcttgtgtttttgacatagtgtgaatcgaggacacactgaaagtctgaaactctcaataatgtagatgaatttgacaacaaatagacgctatatatacggcagcaattggaatcggaccagattaacgacttgattgatttatttagccaacaggcccaacacacatgatggactagaacatggcggaatggttcccatagcgatggctgatcgacaacttggagtggttttgtaggtttttgtgaaaaccagtgtagtggggctcaaaaagatgcgaatattagagaatgacctagaatgacctaatatcaaataattagaaggggtcaggtttcgaacctaggtcgtctagcccaccaccttgtagagctagccagaatacccctaggcgtttctccagtgttgtggggctcagccgccaccttccctctatatagagatgttttatggtgtttgtaaggtacatagaggtattgagaggtggagcaatatgggccgttgatcaacatacgggtaggtagggaacaaaattattataactgatggcatgggagtaattaactagtaaattagtggtatttttgattttgtgtgaatacctttgtttgattgaatgggtacttttgcatctatttggtgatctggtcatcgcaaggggaaaaatcaagatcgttttttttctcctcgttcaatatttctttacggtttgaaccggagatcgatcgagggagaagatatcggatgccgcggccgcctcagcctcgctaacgatgttgctgtagtgtgctctctgatcggccgcctccggcaacgatcatgacaacgacggcgtattctggcccgccgccgttgcctttacctctttagttctccatgtcactgatgctgcgcctagtctcaaggtagcatatctgctagagctagagatgaagcttttcgatcgtaacttgatctcttgcagaattaactgatattcagataagagggttctatctagttctgctatatgcatttggttcagtcagaaaagatggatcgaaccagatgtcagcacgtgaaaagatatcgaattcaagcgataaattgataaccagtttcatgcgaagatttacatagtataggctcatctacattttcattattttgtcgctactaagaaaaaaaattaaaactggtagagacagccacgggaaaagggcacgacaatatgcaaatataaaaaaatacaatgcaaataatataatggaaaattagaggcgatggagatgacttaccgcatatttggtgatgaactactgatgcggtacctatgtacctacaactaatactatagacaattctaccatttttcatcttctagcaaattatcattttaccctttctacctaagtacctatattaatacttaaatactttttgtatgataccttttattatggagcgttggatttttactatttctggaatgcaaataccgtaaaacttctcctctatacaggagcaacgctctctttacactagcagtctttgtttttttcaattctcttgtttccttgccctcgggctggccgcctgggcggttgcattgcgttgtgtaacaaaaacattgtttttcttcaaatatattgacgtgcaattcttttacatgttcgcgaaaaaagtgaaaaccagagttatagatttttttttaaaaaaagtggaatctagtttgatttaatttttttcaatttggctgtttattgagcggtttgtcaacccaagtaggctcgaaatctcaaaaatttgtgaaaaccaagcggtttgttactcaagctggtttgaaacctcaatatttcgtgaaaaccgaatggtttttgtcagttttatggaaccttgagggcaacaagcatgtatttgtacatatacaaatgttttgcagatttagcacatccaccaaaaatattattgtcgtatacaaatatatgtatagaacgatatgacagcaataaattatacaagatataaagtcatttaatgtttcttaaggaagttatgtcatttaatgttggaacatatatctaaaactacaacaataatatgtaaatggaaaaaacaataaaatgtgtaaagatttgggatgtttaatctatctaaaactacaacaataatatgtaaatggaacaaaaacaataaattgtgcaggagatggcataaatgcaagaaaccatcagtacatctccaagattaagttggttgtgcatatatataaacatgagcagagggccatggcaacgagcacagtgaacttgaagagtggaaaatcataaatacatataggaggagaacttaattatcttcttaataatggcagttgcaaggaggatggtgtcctccatctctgtggttttcttcatgcttcttctgatcgtggcagattccaccttctcatcctgctatgcattaacacgtatgcagcaaagctattaattttactctgcattttttaaaaaatatccaaactacactgaatatgttttctctgtataatttgaggggttcatgatatgcctttttcccccctcttttaatttagtttgcaattagtggctcatgaatcatggatggttgaactgaattgcgtttttgcagctagacaaacgtgcaatgacctaggagatttagcgtgcactgacgagacgtgcaagaagatatacggagacagattagaatactactgcaagccaggcgtcacccctacggtatgctgctgtatgaacgtcacagcatcagttcccagtggtgtcaagaatcaaaacggcgatacgcttcttaattagttataattgatcatgttccatgtaaagttcgtcgatatgtttggagtttggtgccaactcaataaataaacatgcatacataatttgggtttgttaataaacgcggttactgaattggctttgtgctagtattgttgcacaaagtgttcccctccagttaactactccatgattgcgtactagaggcagcagagaagagctttccaatgcaatctgaaacgtacgtgttcttttgccttgttgcttccgacgtacgttacgtgacatgttcaatgtctgaatctccagcaattcagcatgaaacacagcccgttctcgttcatgtagcaacgaag

SEQ ID NO: 40522 - DNA, 837 bp, Oryza sativa
cgtcatcgggatgagttaatatgcttcatatggactgccagacatggattgagtcctgagaaggcaattgtatctattaattaggatattttacgtaatttccttggagataagtctgggcaaaagtctgccccaaagacttatggtatcttagagtttgttagagataagagtcgtgtccgagaaggacatgttttgtaatctcgggtataaatagatctcgagccccatgtgtcacgcccggaatttctatccaaaattccaaacgcttacatgtgtgtgaaccctcgtctaggaatcagccgaggcacacaataacaaattgataatagagtacaattattactctaattaataagcgtataaaatgtcattacagaggtagatagttcctctcaatcaataaagatcttaagcagcggaaaataagataaacggcgcagacgactccactccacaggcagcttgaccagggctacacctaatcctccacaccatcagcatcattgtagaactcttcctctgatgaatgattgcaaggtgagtatatgacatactcagcaagccacgcagcaaatatgcaagtgcacaaggataccaaaggatggcatagtagggtttcatttgcaaaagcagcatttagcaaacatttgagaattttaataaaacagttaagtaataattaaacaatattaaaccaacgctatacaacataccctgttgcataggcccaaccattctgaacaaccatacccggctgtacagatcaatctccaaaccaggaatataccattccaaaccaggagctaatcaaattattaccaattatagcatctt

SEQ ID NO: 40523 - DNA, 1077 bp, Oryza sativa
gcatccatcaggcaacacttataaccttgtagctgttgccgtttattaacatctcgtggtaaacgggccgaaaaggagacttggtcgtcggaaaacccttcaccaccatgaatttctcatttttatctcgccaatccccagagggaggccgatcgcatatttttcggccgcaaacctgccaacaaggcataatggaacagtgcaaaaggagaaataccagcaaaatcaatcccacattccagtgaaaacatacgattggcgaaatactaacttttgattaataaaattaaggtcataatggccacaatacggcaacggctcccagccgaacatgtaaggcacctatatacatgagcaaactaccaaaaagcctaaaaaggcgaaggaggaaaaaaaacactagggtgaagggcctcacacctcagggtggtctcggtcttcatcgcttggctccgacggcctagggtccaccctggggttggtggcagcggcttccttatccttcgtcaatttttcaagttgttcgcgaagccgggtcttcgtgcaatccttgccgccatcctcccagaagtccttttggaaggccctcaaggccgccccggagcactgggaattctcgagccaagcccccttcaatagctcaggaaaatctttaatatggtcgcagccatgctcctgaagcaggctaagcacaaagcccgctgaaacgcgtgcgctgtagtctccgtaggcgccagccacttcaacaaccgagtcggtgttgacggtcgttatcgatcagtttcgaccgtcaatactaccaaaataggagagagctagtgatgcttacaatgcataaatgtgttagagtaataatattccactagtattaggtatactaacctttttgtagagaatgaaaataaagtggaggagaatcgacatcaacgcaaatgataaatcaatcggacgatgtcaggaaccagacttatgaataaatgggtcaagaactcagaactgacatgacaaactgggccaaaattcacaagtctacggagaagaacaacggaggaggccgccagctgaaattgggctaga

SEQ ID NO: 40524 - DNA, 3615 bp, Oryza sativa
aaaaaccctaagttgatcttcatgaaaagttagggtgacttgagtcaagactattccatttctcaattgcacgggatcgcatggtagacactataaagacccacaagtacaagtatggctttgaataatttgtttgtatgattattagtaaggaagtcataatcctattgtatagtccatagccttcactcgggacgagcaaaggttaagtgtgggggtgttgttgacggtccttaaatcataatatttgatggtcaatactttcatataataaaataaaatatggtattgttgatgcaaaaacacacactggcctgagagatctgcttaactctagtgcaggtcctaaatcttgcttttgggttcaaggtgtgccagttggtttgatcctgcaccccccaaaaatcaaagaaagaaacagagttaaatccataaacgatagccgattggccacatgccgatgacgtgtcgtttgtaacctagccgatgtaacgtgaattagatcagcaatgaaatataaagcaaaaagaatgttagatatagtcaatcggctgtagatatcaacagtatataatctatgtatcaaaatatgtttaaactaagtgattgggatagatcggatagattgccgagacagtataaatcacttaggtctaagagtactttaatataaagattatatatgttgatagcatagccgatgttgcagatctaacatgtatcggctaatactccgataccactaagatatcaaaatagacaaaatacattaaacatggattaatcaagtgttaaagtagattaacagattaataacaagcttaatatatttaattacagtgagatcttgatataaatggcaaatttagcatattaagtaaacctaaagtaaacaaaataaccaaatcaggtaagatcggctgaaaccccgatgaaacccaaatcggcaaccaataaactggctagagattgatattctaattacgacttataagatcaaacttaactgatgtagcaataactatgaaaagaagaacaatatctagaaaatcaagtcattggatgaatcatagagtggtagatatgctatattgtaggatcgaacaaggccagacaaacctaccagaggggggtgaatggtagggaaaaccaaaaacccaaaatcttttgcggaataaaagattacctcgaacgaagttgagcatcgccagtcgaaccgctcaatcaccgccgggcagaccgccgtattcttgccggtcagaccatgtgcacacctacgatcagattgctgcactcccaccggtcaggctgccgccctgcctgcggttagaccgtcgggacccagaaacactggtagatgacaaactcgaaatgtagattagaacttttcgactttattgcatcaactagtgtttacgaagtgcaactatagcactcctcaccaagatctcgaattaaacttaaaaccctaactttctctcaacttgtatctcactaaaactgatactgggagaccacaacctccctttctatttatacatgaggtaggctgtgcaaagcccacgaatctaacacaacttaggactcctatccacgtaggaaatcctctcttgcaagtatccaactcatccatttccttatctctttcaatcttcccgaattcggactctcctccaaattcgactcctctttccatatgtacacaatccacttgtataccctatgaaatcttcatcaccacgtgcattatcctctagcctttagtatcccgcgtgatctcttgatccctcgacgtctacttctcccaggtcgactccgatctatcaccggcaacactctcctgaggccttaagcaacacctgcacatgcaacaacaaagaaaccatattccgagtacaagttcatcccaacttgactcacattagtataacaacagtatccatacgcatagaaaccatctagaagtcaaatccccgaaggaaatattcaaatccgacaaaacaactcgaaaccaaaacaaactggaacctgcctgtaataccctgaaaagaaacattttagtgtcggcttcgggatggtttataatatcatggtagcatttagttaaataaataatgtcttaggagtgggccaagccaacctgggccaaagcccatgaacccaatcactcctctcccatctaaaaccctagaggaggaggggccggatttcccctcttccccctcgcggcgcctcttccccctccactcctttcctgtgcgtactttcttctccctctcctctccatcaaaccttgctgtccgtagatctgcaccttcatagcttggatcaagaagcgaagtggaaaaacggaacgaggaggaggagaagagaagaatgatgggttagatcggagtttccccgccgtttcccacgggatatgaaaggaaaaccctatgtgaggtttaccccccctgttgtatcagttgttctagggtgattttagtggtttaattcgtggtaaacaaaggttagagaagggtttttgtttgttgtggctcggtttggtagttctcctccgttggcagatttgcattgtttcggtttttttgttgtttcgggggtctaaatgatgttttctacgaaagtgtataactaggaagttgtagaaaattcatagacctatcttctgaccagagggcgcaattttatctttagttgtttaggatatatgaatttttgagtatgactgttgtttttatgtcataatctggacattagtagattgaactgcaattgggggatccaaaaaattttcaaaaagcaatacaattgttcttttcttccaaccactgtcgagagaatcacgcctttcggcgtgacatagttgtccattcgacaacagctggagccatccgtggggacctccgaccgaaacactgagagtgagtgaaaccactgatgccaccgaagaagatcgtcagtgtcacgtcccaaaacgatcctaaaatatatcctttaaattatgcctagaataattaaatttctagtgaaagcctccaaaattaaaatgtgcaaagttaaaagtcaaacaaggcttagaggatttttgtatatttcctaaaagcctaaaatgtgtaatcaaattttagtggaattttcagagcacaaataataattattaagaaataaacaaagttaaaatgattttataaaaagaaaaaccctaaaatcccttcccctctcttgggtcaaatccggcccaactccctcccccatcttttctctccccggggcccactcggcctcccccttccttcccgcgcgagcgccgctgatgtgtgggcccgtccgccaccctcgctgacgggcgggacccacccatgaacccccttcttccgccgttcccttcgcccctgcccgcgcctagcgccgccgccgccgccaaatccgcagtgcctagccgcccccgtgtgaaattgaatgggggaaatattccccccgattccctctcctttccccccattttcccctccccctcccacattcaaacagtcggatttgctccagcaaatctcggcagcgccattgatgccgaccgggactctcggctgttttcctttccctcccggcccc

SEQ ID NO: 40525 - DNA, 3665 bp, Oryza sativa
gggtttagatcaagtgttggaagtgagtaagtttgggttccaccgatttattcctcagccaggtttttcttgctgatatgccccctgcgcagttctgttttggctgcttttccggccaacataatgggttttcctgtgaaaagtctctatacaaaagttgtagataacgtggagatctatcttctgaccagatggcatgattttatatcaagtggtttaggaggtatcaatttctgaagttggctgtctgaatgtcgatgcatttatctgtagtcgaggttcagagggattttaaaggatcttaatgatggaatcagagaatcttgtacttacagaagttgtagaatatgctgtgatctacctcataaaaaaattgttagcttttatcttgtattttgttgtcagtgctcttttgaatgtttgttgcatagttttctgggcagatgcacttatctgttttgtgccatgttttaggccagctaaatggaagaattcaattttgttatctaaatgaaagttgtaactcttgttctgtagatgtcagaaatggtatatttttctatgttatgtgatgtagaattggaggtatcgaatcgttaatctatgctgcttttataggaagattatcggtgatttgctttatgttgtttggggtgggttcccagcatagaaagtgaatgtgtgattcttgaatgattatatgtgtgttgtttgaggctgagtcggtgtttattcaggtgataccacttcggaatgcaactagagttcatctcgtcatcggtaaaggcaagtaaatgtagcggtggtttgctacagctttaacctgttattttcctaccttcactttaaaattatatatcaataaccaataatcaagatagtattacaggtcgtagcaaggttttacctatctgaatcattgcttatcgttattgcactgtttatggttatactttatgctcttggttataataaccttatactggtctccatctaaggaatgtggtttcgatgttatactctggaattcatactgcatttgcatcacacttgcattgcatttgaagttatgctgtgaacctatggttgcgaccgtaccggtacatcatcgtatattgtcgtaatacgatgcagcttcacaccttgttgggtgcgaaggcaggagtacataccattgcattgcatatgcacatattgcaggatgttatgaaaactatcgatcgaagatgtctttgagaagtgttttcttctctcggagttgtgaatatatggatttgattggtgatgtcatgatgttttagtccttggatattgaacttgtctttatgtgaatcataacttggtatttaatcagctatataataaacctgtggtttaaataggttgttaaagccgtttgcttgctgagatttattctcaccccttatagtcttttcaggtacttgttgtgacatgtttgcatgaagggatgggattagctacactgttgcacaatatgatctcacttagtcatgattattgtaatatgttgataagattacttgtgtttagacataatgggttaattaaataatagagttatcgaccattgattaactttttttttcgaggctatccgtataagtcagtcagttgttgtatcatacccttgatctatatattgaggcttccgccatattgtttttaaaagagagatgctgctgaaatttctttgttttggcacttttatagggttctttagtggcatcccagacttgtgcagttttctagggtgttacaggatgtatctaggtacagccagtctctctcttgagcttatgtgtcgcctagggttagctttcatccactcctagtggtgcacagcttttcgctctcgcagcatccacacttatgcaagcaagaggagatgccctcttctttttataggcggcgtttgctccagttcgcagttgcacatttgccaataaaaaagagatgcttcctacatctctacaatattgtgccaacggatcataccttcaaggcaaaaggtcttgcacccgacgtgtgtgcatgactaaaccgctcgcctgagttggcatggtcgaggtgccttcctccgctataatccgcaacgagatggaggagaaatctacaatcaaatgtgaccatgcaactgccccaaagattccaatatatccatcatgttggcggtaagtacactcaggtatgcgaaagataaaacaaggttcaccaagcatttactcaataatatcaccatgtgaatatggcttgatcatacatgattatgtttaccttgtctattttcatatactctggtttgggtatttccatagactttttaaattaagcatggtgcttaggttaaaattgtttgctttaatcaaattagacatggagttgagattgattaatgaaccatcagagttaatatgttcatcgacattggatatatatcttctgtggactaacccctacaggaaagttttcaaactgacaggtgagtcctcaagttcaattctcattggaggtaagtcagggcccgggaaacaaatcagtaaattgctaacatgcaaaggaggagcacaccatcttttgattatgttcatgcaattttacatcagccctgtatgagattttgcttaaacaaaaatttggtgaacaaaaaaaattaaaaaaaaatgttttcaagaacaaaagaagtgtctctcaaaaaaaaataaatggcaaacttttgggctcgacgcttcttaagttttgaatacaatttctctttagcgtggatgtgaacaactaatcttgaggctatgataaaatcttttcaattatttatagtctctcgggtatttactgtccactaaccgtttgtagggaataaaatgacaatcaacagcagtgtacaataagttcaaacacatatatcacgctccttggcctcataggaaagagatgcacatggaaccaacagaacaaatgcaaaacttggtgcattcgattcggttctaagcttggtaagatatatttggtaagaatcccaaacatcttgtgtatcctcgcctcatatatccatcctgctacgatacccaccatatccattgtggccataaaataaaaaaaagataaaaaataaaaataaaataacataaaataaatttggctccttagtcttccaaccaagtgagtcatttttgcttcactcttgtctttgtttttcttttttgtgtccaacaaagagtcccatgtacaaagagaagtgtgggggtgatcttgcacatcaacgccgtaatcaaagcaagatcaccccagaagtgatgagccatgacaaaccacacaaggaaaattgacgcagtcagacccaataaggggtcaaccaaacctccagttcggctgaactacctctaacatgaatcgtcctctgttttttacagagcgcaagtttgcacattattcatttggacatccattctatcttgagtttagtttgattatcaattctaacatatcgaagataattaaactcaagctagggatggtacaattagagtttatggtctctctgaaaatgacatgcaagcctattattcttagctcattacttgttgcttgtggtgatatatccaatagggaccccatgccatctaggtaattgatgaatgagatatagt

SEQ ID NO: 40526 - DNA, 2015 bp, Oryza sativa
tgagctagtgtgttcatgcctatcgatcgtaggaatggcacatgaaactttgaagtgaaaattgtttcctttttctcttagagatgaagtgaagcaatggtacactatgtctgtcaagaaattccacggtcaatgggaggagctaaagtgcaaattttgccttgctttctttccattaactcgtataattaatcttcgattagacatcatttctttccgatagaacaagaaggaatctctcagtgcagcctgggccaggttgtcattgttaacttagtctagcccagacttgtctttgcctgaccatttgttgttacaacattttcagtatggattagacaaggagtctgttgcaaatctcgatatttccgctggaggatcgttcgcacacaagacaactgcagaacaaagagaactcttagatctcatcttagagaacgattctttctgccgaagcgaagccatccgggaggtctagattatctgtgagaaacctctgcacgtggagtcgaaacccgactcaactgccgaatcctcattctaggtgctggagccggaggaagaaaaaaattcatcctccagaaattccattccaattcagggataatcgttatgaagataatggaaacaccctgaattatttcaacaaaaagaagcctcatcccaagtatgagccgttcgagcaggcgatgtttgttttttcattcatttcttccgaatctattgtccatcttcatgaaactgaacgactctcatcatcgtcgatcaagcgtaagccttgtccttctagcctacagaacattgttcttgtttatcatcaagaaacaactatgttcttgcatgatgcatctcttgaggaggaggatcttcaggcccacagacaagcttgatgcctgcatcgactctagaggatgagagaaaacattccacaaatgaacatgaaagtttttctttcaaaattccccaggattcattctcacataaggaattcctagagtcctgtctgattagtgacgtttctctgtgcgaggaccacaaccaccttacggtcctcatttctaacatgtttagaagtgtggttctggatgcttatatttatcataaatactacaaatcttgtatttgtttgtggcactaatcttgcagcatgatgtccctatggtcgagcttgagaccataatcaaagcactgccaggagatagtccagattactacggtaagtttcttttctaataaaagcaagaacctatgtttaggattgtatacatcttcgggtattcttggtcgctaagcatttcaggttgagattaagaatgagggtcagacgatgcctaagtacacggttagctacatcaactttacactttggcgatcctcggtatgggaacactctataggagactccgacatcacacacttggtttttgatgtcttgcgacacaaaagtccaagtgtggggggaaaggccgacgagcttgtgatgacgagttccatcaatcaaggccatcttggtttaaagttggtgttagtcccaccttactaaaaaaagagataaaaaaagataaaaagaggagaaaagagagacgaaaaaaaagaaaaaaaagatgggagaagaggaagagagcaagagagctgacatgctgtgtaatgccctagaaaaaaaaagaatagcgtatagtatatattggaattccctacatttttttttggtgtttgcaattagaagaaaaacaatagttatacgctagttgggctagctttcggccagcccaaggcccagctgccccctccacacccccaagaccctaggaggtcccccccacctccccctagccgtcatttggtaccctggggcgcccacctccccctctggtcgacctcccccatgcctgccctactgcagacctgggaagaagaagaagggaaggagaagaaagggagagaaggaagcggacggaatcgaggtgaagaaggaaatgaggggtttgattgccgcttcccaaggaggcctaggt

SEQ ID NO: 40527 - DNA, 888 bp, Oryza sativa
aaatatatttatctggtattttagagcaacttccatataaaaagttttctcatgaaacccaccgttaagcagtttgaaaaacttgctactatgtgtctttgtatgtgtctttgtgtggacaaagagaagtactttagcccctgtgtacttgtgaccatacacatgcactttttagcacatgtactttgcacgagattaagacttaaaattttatctatgcacaagtactgtagcaataccgttactactgcatgctttacgttactataatttcctcggtatgttgctgccgaaagtgtagtaccaacccataagttttgcatgttatgagtttcgcaataaaataactgaattgttctatagcggaagagaagaaattataaatcggtcaccatattcctttcccactaagtttaaaattctgttttgcatgtagcccgctaatcatgaagttggaaaaaccatttcccaattacgtgacttggttaattgcattaaccaaacaatttaataaactgacaaactatgttctaaatttatttagttggatgaccgggtctgcatgctaaccggtcattgtatcgtgattacctacgctttactgcaggaattactaaacaatttttaatatatttttttcgagaatcaagctattagtaaaaagaaaaaaaaacaaaacatcaggatttatcagcacttattataaaacaaataaatgatacttacgctttaatataaagcatattgataagtatatgttaaatatcataaaaataaaaatgatagatagatttgtgaaaatattgtgcaaataatgtgaggggtgatgattggatatacttacatatcgatttgtagaattaaataaggacaattgcatctacgatt

SEQ ID NO: 40528 - DNA, 752 bp, Oryza sativa
aacggggcagggacattcgctgctgcagcggctgcatcttcttgggcccatattgcctacttgccgatgtaccatgcagtgcctagccgatgcgggtgctcattccgctgttgcagtaggcgatgtgcctcgcttgattccctaaactcttgggtgttcttgagagagcagaattcctcccacaccgcttcggttatttgagggtattcatcgaatggcgtatgattgccgggcgggttgacaaactcggtgaagagcttcgacttccaattcttccaacctttgcccatcttatggaatgccttccacttgagataatctatgtgtaaaaaaatgaatatggggcacaggggtagcagcagcaacagtaattcatcaaaaaagaacaagtgtacataaaaaaaagaacaagtgtagataatctgttcttatgcattaaaaaaagaacaagtttagaggtatttctgttctcgagcattcatcactggccatttaacataaggcaaccataggcagcagcatgagcaaacatagacagcaaggcatccaaaaaaaagcaaacatagacagcaaggcatctgaggtatttctaaaacagcagcagcaagggtatataaatcatgtatataaacaacaattcatgcaattcacctattcatagacaacaagggtatataaagaacaatttatgcaattcacctattcatagacagcgagggtatataaagaacaatttatgcaattcacctatt

SEQ ID NO: 40529 - DNA, 653 bp, Oryza sativa
actagtaaggacaatttatattcatctaataagtttctgactttcacccatttatatcatactctacaatctgtttacctgcaggctacaagcctacaccctatgggagaaagggagtgtgggactatgagggaaagggagctgccaggctatttgtgtttgtgtttatgtgcaattgtgttggatgaaaatgatgaaccttgcaggctgcagctttactagttacgcacttatgctaaatattggtgtattgaactattgaacttgaagtatggattattgtacatttgtactggactaaacctatgtttaattacaatcttttgttgaactatttcaaagttaattgcgagtttggactgtgtgcatgtggctgcctatgtcttgtaacttgtgagtgtggactgtggactatgaatatgtgataatgtgatgtcaatatgtgatgaactgatgatgtatgtcagtaactcagtatgtgttattgcgactgtggtttatgtacttgtgaaatgtgtttaatcctagacttttggtagattacttatatgtgaatgtgatttgttgctttgatattttcatgtaacaatttatcatactatcattatgcatgcttgatgttggttgttcctgagagctaggggcaataatgg

SEQ ID NO: 40530 - DNA, 645 bp, Oryza sativa
aattgccagcatatattatatcattataagtcactctataaacatatatagctaaactaaatcaatagtaaccaaacaaatcatagaagcatgtaatacattacattccaatataatgatgcatgcacagttagatatatttagttgtacgattgtgtttacgatcggtgcgtgaagccccgcatactctacatgatacattcatagatgtgtttcacagcacggaatcttattgaagaaatccataccatccaattcatgtgtttattgttaataaagaatgaggacccacatcagtcttaactacttaatatatcaccaagggtgattgaaattttctcaaagttgagatgaaaggtgtaatgctctatcattattcataatatcacaaattttgaacttatatttgcagttgtattaaataaaatagaaaaatattattagagagtaaatctaaccaattggagaaaaaagttagaaaattttgcttcttacatttcacttagattgaaaaggctactgccataacaattgcgttagataattgaaacaactaactaataggttagaaattttacctaagcaatgctgagaagaaaatttatggagaaattatacttttgaagcatgccagatattctttga

SEQ ID NO: 40531 - DNA, 806 bp, Oryza sativa
tgcattttagagcattttggatttttacctatttccgtgcataaacggtgaagaagtgaattaggtgctaacatttcccaggaacaaggcaagttttctcctcccaatctttgatcacattgaatcccatgttttgaggaatgaaaatatttgtttgcaaagttgcatatgaatttagactataacggtatttgaaacttggttatggtagctatgacctaattgctgcatttacttccttgaataattgtgatcctcactgattgtaaccttagaaatggttagagtactttcaaagtgcttaaatgggtttatacatgcttacttaatagccatacgcttagccatgcctagtagttgctaaataacttcatgatcactttttaaatgagaatttggggaatattttcactgctggatagaggtgaatatctctgatatttgtgagctaaaatgtgtaaaaatgtgatgttagacctgggcggcaagtggtatgcatatggtgttagttgcataccgatagggggagtgctcgccctagtcaattaaggaccgaactttgtgtcaccatctaaagtataccgtgcaaccacatgtgctaggaatgggacggcattagcttattaaattgtttaatgtctaaccttgcattgggaggcggtagtagtatgaactagtcggaatgatggtttataggagctacctagtgcggttgtgcctaggcgtctaagcgtgtccaatataacggttaagtgcctcgtggaagaacggatgtgttcgctgccatggcgctagggatggcgagg

SEQ ID NO: 40532 - DNA, 823 bp, Oryza sativa
cggcgacgggatggcgacggcgacggcccggcaaaggtggcgcgcggcacaggcggcgatgggatgcacgcgcagcgcggggcgggacgcgacggcgacggcgcggccgcggcgatgagatggcgatggcgacggtggcgcggcggcaggcgacgagggcgacggcgcgcggcggctagcgacgatggcgacggtgcgcggcggctcggggcgcgaggcggcaacgcgcggtgacggtggcgacagagacagggggaaaaaggaggagctgggttaggggaccccgtcgaacactttaggtgcaatgaacagtgccgttttctaattaacccgattttagtgtaatttccgtataaatttgattccacaattcttaattttgcatatatgcattttactcaatatttgtgttatcttaactaatgaattcaccctagattaatattactcatattttatttttatgtaatttatttgagttttaattagggttaattcttattccatcgtatttaaatttaattgatccaaatatggtcgcgataatattttatttatttctatcccacctaatctttattttgtatttattttaccaatttgtttttaaggtttattcctaattaactattctttactcacgattaataatcttcgatatcaaattcagataaaatagacgaataagatcggcatgatgtaattagtttaaaaagtttttgaaaatccgtatttttagagttttgattttgtcggtcgaattttcagggtgttacactttgtttcctagaggtgatctttgacccattcaaggagatgaatt

SEQ ID NO: 40533 - DNA, 597 bp, Oryza sativa
cttctgtgtgttttaatcaaattaatgattgtatagaaaccacaaagaagctggcaccatcaagaagcttgtagagaaagtactactacgtgtgtgaattaattagtgcatttaatttgttaggtatgctcgaccattgttgcaatttgcttgttttaaaaaaaatctatgtatattttcttagggcatattcaaagatagagtctgatatagtcttttagtttatttgtagactatgattttataaccattgagataacaaaggctataataattagtgaactaagataagtttttattatctttcttttctcttccccaagcaaagtttctttttataaatgctaagaattgatgttaagtcattgttaagcttagagcaagtttaatagtatagccagctactagctccaaatcatctatagtcaatttaatagttaattcatacaatagttacctatgaatatatatactatattattaatacctggtcccacctgtcatacaaacattgccatcttgaagttagtgctacagctggctataaatctgtagtctgctgctcacctctctcctcatttatctcctcgaaatatg

SEQ ID NO: 40534 - DNA, 544 bp, Oryza sativa
agttatctagactgagttgaaggtaatttccaatctattgcttcaggcaccgacccctgctggtctgccagcgtggttctggctatagctctatgatgtatctgaatgtggaagattactaggacgcgattcagggctgtcaccacctgtcgcctacctctgacaaatccatgggatacacaacaaacaaaggtaatatctaaactagacaccacgtctaagttataataaaataaagtccactattgcttggtttactaacctcttgcagagaatgagcaataaatggagaagaatcggcatcaaaaccatcgatcaatcaatcggacgatgccgagaaatagacttatagaaagatgggccatgaaaccataattgacacgatcaaattggaccaaaattcataagtctgggtgaaggagagcaagaggaggccactgaccgagtttgggctgggttcggcagaaccaaccgaagcaccattggatccaggttttggatagacggtgtggatggcttccctatggcggttggaggatattac

SEQ ID NO: 40535 - DNA, 1475 bp, Oryza sativa
taaaaatgataacttttaaatggagattaaatctagtgattaaagggaaattgaaagggaaaatgatggagaatagtttgagggagtagtgcagaattgatttttgtaatcaattggagaagggaacgcatggagagacagatcgacatgctggcgatgctagggtttggcccgacgaccaaaaaaccggctagcaacgaaaataacttatggaaaaaacccggaaaaaagaagacaagaaaaaagtggatgggaaaaaaagggaaaacggagaaaaaagatggacggaaaaaaaagggaaaaacgaaaaaaagacggactaaaaaaggcaacgaataaaaagcgggtgaaaaaaaaggaaaataaggggaaaaaagactgacaaaaaacccgaaagccttacctaaatgccagtgcgtcacactgggtaaaattttccctacatgtgcgggatgtgaatgatgccctttgacatgttgtctggatggttgcaacgttggaagaacgttcggaagaaacaatgcgattgtgtttgcacagaaagcgacggatggaaattttatgtgatgaacggaaatattgatatcttttaagtaggtaagtctaaaaaaaataaatggaattttgtggtaatttatccactttaactatgagaatatagtatgtgttgatacctgaagaaaatacgtggagttaaaccgacgacacacgtcagaattgtgaaaattggtgttattcgtttgcattttatttttcttttttgaaacctttataactttttttgttaaaatttatggtttttttctcattaaatattgaagttaagaattgatggtttttatgttaatattaaaaaagtaaaatagcaaggagatcataccaaattctgttgcacacagggtttcccaaaccgccggggacggggttaccgtgccccgacggtaagcacggttaccgcgcggtaaccgtggcaaaccatacgaaaccatgcaaaatttatcaaaatttcaaattattttttaaatttatttgaatttaaggagattaccgtggtttttctattaccactgtaaccatggtcaccggtggttttgcaaacccttgttgcacactaccagcctgaccaggtgccagctctcattttcttgacagccactctctctttctccatgtcttcctctgtctctctctccctcatctatatctatagagcaaccaaatattcagttagcaatttatgttgagcaaccgaataatcagacattatacccgcaccaatgcaattcccagaagatttagctacacagattatactattcatgaatactataaagtcggtacgcatattctaagattggaataaagcacctgaattatataaagaagattattctattgaaagtagaagttttacaaaagaagaggaaaagatacaagagactttaccgaactccttttgaaggctccgaggacta

SEQ ID NO: 40536 - DNA, 2770 bp, Oryza sativa
ctagcactatactaacactaaacttgtagagaacctttgatctttgctgggaatgaatgagaggaggagctatttataggccatgagttgcatttgggagagtggagatgctccaagcatccaaggagcatattctccttagcttcatctccttgtgacatgtgtccagcgatggtttcttcagtttaactggtcataaccgtcttgggacatggataactaccagctggtgaagaattaggctaattgggctagctactggttcagccgaactaggcccaatcagcccacaactttgcaggtggacttcttgttgattcatcaatccagtgatgtgaattattgggcttgtttactcgtgcgtattttgtgttattggcccatcttttcacaagtttgcttctcgatagctttcgagtgatcgttcgtttgctttctgtcgattctcctctatttatatgtgcttctcctgcgtatatgttagtagcatagtacatagtggaaatagacattttatttggaatttatgcattgcaagcatagctagtcttcagtaattgggaaatattgacggtcgaaattggttgataacgactgtcaacaaaccccccaagcttaaacctttgctcgtcccgagtaaaggacgaaaggaaacaaagacttggttgttgatcaggagttgctactatggtgtatatctagaatgtagaagtgcacagtttgagtactctctctcatgttaagtaaatatgcatagtggcttacccttatgcctaacatttgtggaacacacgcttctcaccaccttaggcaattgagagatagaacagatcatagagcaccattttctttttccttgctcagttttcatcccggatgggtttcaaggatttttgcaaataaaaactatgttcctcaaatgattctcttgatcactcaaagtgtatagatattttattcctcacgaaagataatgccctatttgaatcctactctaaggttgaatatgtggagcttggttgggatcaaatgaggcatacttgtattctcataaattactaagtcaaaaatctagactaaagcagatagcaaatcatacttagatcaagatcatgcaaagtgtgtggaatgtgtggtggaaaataaaatttggataaagaaaatgcttctcctttgtgcttatacttctcctccaaattatcctttgtttttcatggagagggtatggctatatattttcatcacgctccatattttgatagagcaagactttattcatcatttttttatagccacacctttctctccctttttcttttctttttgcaaaagatttttctttggagaagaatgcatgaatggagagctttatttgtcgatgatgacatggatatgagtgagatgaatgctaacttccagtgtagaagcttagcatgtgtgcatatgtgggtgtatgatcttgttcataaagtatgaaagatatctacacaagtcacaaaatttgacaaagttcaatggaactacaagtaaccaaatattatataaggttttcaagtgcaaattatatttggctgtggtaggaataaatatatcaaatgaggaactttgaaatttatcattttgaaaaacaaatcatccaaaatttaaatcaagcttggatcaagatttaagcaactctatttcactatatcatatctcacaacagcttaggcttaaatcacgcagtgtgcaactcacatctctcaggttcccggataatggttggctaatcattatttaaaacttgagagagtacttaactatgtacagatacattagagatataaagcagagcaaatattcatcatttcaatgtggagaactaggttttcttacctagcatggtaaaatctatcctatatttttggtattttatattttgcaaatttttatgtttttgagttataaatgcaaatgcaagaattgaaacatgcaagaaaggaaatatgcaagataaatgcagatacaagtcacctttgcgggggagagacttctccccccaagcttgctccttgctcatggtccagagtaagcattgaatccttgatggcggaagtaggcttgcagatcagcttgttgttgttgcatcatattgttgatatttgagaactgtgcatcaacactttgctgctactcctgcgcctggatcacgtgtccttcgagggactgttgtcccagcgagaggaactcgagcaccaccagctggaggttggaggcacgccacttgagcctgctgagttggtgtgcccccagcgcacctcatgaggcatctgccactaggaactgccggcactcggctaggcagatcctccagtgctatgacgtagggcttgggcccagccggaggcatctctagctgatttccagccactctcataagcatgaccgggtggtgagtacgttgaatcctcctgttcatctgctgccattctgcggttactcctatgtgtcgcacctgcacgggattcctctatcgtctgcaggggaatggttagtgcataacagttatacaaatgataccccgggttaggtaacaggatttcatttctacaaccgggttggaagaatactaaggtcacatctgctccatgtttcaaagtatgaccttgcactagttatgattcatttatataaacacgagagactgagatataagcaatttgatcatttgtaataaccccaagccctcttgctatacaagtgatcaaagaagtgcattttataggagcgg

SEQ ID NO: 40537 - DNA, 995 bp, Oryza sativa
gcaggtcgactctagaggatccccctcttcatcgggaacgaccaccgacatatcgatggaagacaccgacataccgacaagccttttgaccgacaccaacctcaaccttatcggtgatcaggaattacaagcctaccatatgctgaaggaccggaagttcagccacactcgggcgtacgatccggaacttctgaggaaaacaggtatggatagtgattttcatgccatttggaatgctgtaatttggcagagatttgcagtagtagatgaaccaggttctcatttgcttaatatacaatttctgtgcactttgaaagaatcagaagatggcatatcctttcttttttccgtaaagagtatacgctttcatggaaaggattaagtacacttcttggttttcacgataactgtaaaaccgatcttcagaaaggaattcccgggttcaagaaaaacagattttgggaagacatttctggtgctccaacttgcagacgtcctaggacaaatgacatccataatcctacacttagacttatgcacaaatggattgctatgactttgtgtagacccccatttttataacaggaatcaatcgtgtaaatagtaccatttccctggatcaagtagtctggtacacacgaattcatagctaaaataccaagtgcacatacacgagtgtctaatacgaattattacatcataagcccgcaggcatagtcttaaatcatcggaccgagcggtccggaatacatccaaaagcagaaatagataaggcagcggaattcaggcagcggcatgccattgccacaggcaacaaccgtactaagacctactgagcgccatcgtcttcatctccctcctggtagtaggcatagggatcctccgaggcttcatctcccgcttctgattaattttatatttgcaagggtgagtaccaaccgtactcagcaagccatcatagcaatgatgcacatgacagaggaattcaaaggatg

SEQ ID NO: 40538 - DNA, 2227 bp, Oryza sativa
cccctctgtccaccatccattgtgatcccaaggatagcttcccgccattgagtcgttatggttttctgaggacgtccacattcccgcctcttaggaagtggctccatcagcataaaaattcatcatgcaatatcccatcccacacaagttaagaatttagagtctagccaagtgtaatacatgtcccggtgctcaataaccgcgagcacggctattcgaatagatttggtttactcacactgcagtggatgtacactttacccgcactccgcgactacccaacacatgagcctcgtcccaacacatgagacacgtcacggcaaagcttttcgataacctcgcattggcagtacccgctccatgaacttaaatcctcatgcactctaggcgtccatgtttctagcagtgagaggagttctggcgctcccggggaaagagaagtctcacacgcatattaaattatggttcaagttaagttctctctctcacacactcatggcagtcctaccaatggcaacaccgatatagggcacgcctctcggccctacctcaacggctgtcccatcgtagcgcacctgcctcaatcaggggtgaaccatctatgcagggatactgcctccacttggctatctaatctgctaggtctatacccattcgagaagtacggttgtacggggggtcgtttcatgcttaacttcatggctcggtccttaattgactagggacggtactagccttttccagataccacccaaatcctccgtccgccccagtcgaaaacagttgttttaattttatttctcctttcacaaatcatgtcatcaacatcatggcaatgtggcgctcatgtctccacatgccgcatctcaattaccttcccgaaggtaattgcccaagcatatagcatttgataaatatgagtatgcatgattctacaatagcatttctaagcaattgtcatagttgactagggactcatacgtaagcatggttacaaagatttaagggtaaacaataatcaaggcatggcataatcacaagtaggatgttcattatttcatgcaatttttatttgtaaacaaaacaatttcgtaattaggatcaacatgttcgaggaatagtgatgacttgccttgctcagagtcttgcaggtctcggccttcgcttggatccgcaactccctcgggctctatagttacgtgcaaaaattgatttgaattcggttagaattcaaataaaaatccaaataaatccaaatgaaagtcgaatgtgaaagtcgattcctttttattaactttactatctgcgaactacggcaaacccaatttcgacttaaactattttgcgggcataaatattttgttgtcataagtttttaatttactcttcccgagcattatatccatataataggttagaaatttctattaagagctaaatatcggaggaaatcctagaaatattatacaatttaatttattctatgactaaacgattaaatataatatgcggctaagattcttagtaattaaattcgaatttctaccgtgaaccgatgacttatagagattaccaaaaataatctataataatctataagaattcatctaattgtttagttattaattatatctaaattactaccaattttaatctaatctgatcaagaaacatattttataattaactcggaatttcgatcgaaatactattacgctcgaagaatttccaaaaataatctatgattaaccccgaccatttttatttcctaaatcctcctaatttctcccccaatttcccttctattttctccttttcttcttttctattttcccaatttttctctcctctttttcttttactctcttttctctccctctctttctttttctctcttttctctccctctctttctttttccctgccggcctctcttttctttttcttttctttttttttccttctcttctctcctcccggctcctttctttcttcccttctcttcctctatcctctttcggctccttctcctcctctctctcgtcctgccttccgcgcccggctgaggaaaggaaaaaggcggcggcggcatggcttaccggcggcaacggcaatggcggcggcgcacggtggctgcgacggcggcggcgctcggcgactgcgacggcggcggggaacgcggctcggcccaggcgcggcgcggcagctctatgcgacgactcggcgg

SEQ ID NO: 40539 - DNA, 814 bp, Oryza sativa
agaagacgcccgctccatcacctccggagacgggtgaaaaatccatgaaatgaacgccggaggtacggtcttgcacgtcggacttgaaatgacgccgccctcgccaataggtaaattggtatgtatcctcatatttattttcaccaatttgatttctgcatcatcaaagcatgtttgaatttctcaaaatttgcatttaggtttgaattttgaggcaaatattcaaaatgaatttttcagagcaaaattttcaatcaaaatttagtttgccacgaccacactggccgttggaacccaacggttaaaagtggggccggttgggcccactaggggttcggccgaaccggccaggcaacggtcggccgccacttttggcagaccaacggctagtgggacccacatgacagtttcgaccgttgttggtgccctatataagccaaccggtcgagagagaggaatccaccccatttcaactcattttcatttcctctccaactttgctctcaaaatccatttcaagttttgcaagcttgtctcaaaatcaaacactttagttgcatacacaagttgtttcgttgaagctaaccggtgggtagaacttcttgctatcctaacccccgccgagttagtccattcttatttgtgcagaacgaggcgatggttgtcccgtctgttcaagaagggatctggctcttcatcgggaacgaccaccgacatatcgatggaagacaccgacataccgacaagcctcttgaccgacaccaacctcaaccttatcggtgatcaggaattacaagcctaccatatgctgaag

SEQ ID NO: 40540 - DNA, 1484 bp, Oryza sativa
tcggtcgtccatcccatgatgaggacaggcggccgcatactcctgcagacgttcctacgcttccggaatagactcgtccctcgtttgctggaaacttgaaattcgtccacgaagggcgttggttttgctcattggaagaatttcgaaaggaatgccgtagagcatttgtcccaggtgttgacagcagcacggttggcatagaatcactgcttcgctctcccgagaagggagaacggaaacagccttagcctgacggcgtcgggactgacgcccttgatggtgtacgtgctacaaatctccaggaactgttgcagatgagcattggcatcctcattaggcttgccacagaacgggctagcctgcgccatcgtgatgaggctagacttcaagtccacgtctcccatgttgatccgcggcccaatggccacattgtcagcagagggagcagtgaactcgcggtgagtcttgctagccatagtcttgaagattggtggcactgatacggctggtttatctgtcggtagagttttctgcggagcaacgactcgcggtcggacgctccggaagaaagcttctggattttctttgaagttttccggcaggttgaaaccagtcatgcactaccctgtttccacaacaaaagtgaaaacaaccaaggttagcctgcaaaggaaaatgattatatagaggcaaatataaaatattagttcaagtaatctctattatgaatcttccccggcacgggcgccaaaaatgcttgttggtatttcttaacgatattactacaaatataattcccagcaatggcacataaatagttctggtatattatggttacagagttcatccataagtgcacagatataccattgtagcatttcacccgagagtattccaagggtatcgtatttattttattccgtgggaagatcatgtagagagaactagactaataatttatacattgcttgtgataatcatattctaagtaggggttaagataattcaagggtagagtgacacacaagcattaatactcaatctcataatatattatctaagctaggtgggaagaaaagagaaagataatctattcctatacttctaatatacatagtatacatacatcctagttaaccgatatactagctaataccctctttccaatgccctcccgtgttgatgtagaaacacgaggcctgggagatctgcttaactccagtgcaggtccaaaaagcttgcctttaggttcgcaggcgtgccagttgatttgatactgcaatcaacaagaaataaagacaaagaaaacgcagttaaaccgtaaatgatagccgatctgccagccgccgatgacgtatcatttatctttgagccgatgtcatctttgcatctttgcatcgatccgcagtcatgaataaataaggaaggactaaatctattcgatcggctgtaattattaacaatatataatctttatgtcgata

SEQ ID NO: 40541 - DNA, 637 bp, Oryza sativa
tcatttatctttgagccgatgtcatctttgcatttttgcatcgatccgcagtcatgaataaataaggaaggactaaatctattcgatcggctgtaattattaacaatatataatctttatgtcgatatatacataaatcaagtgattgggatagatcggtcgccatgccgagatagtataaatcacttagatcgaaatatatattaacaacgaaattatatatgttcatagcatagccgatcagatagatatagcgtgtatcggctaatactccgataccactctatattaagacattaaagcgagtaaaatatatcaaacaagaagcttaacatatctaaaaagcaataagatctcaacataaagggcagatctagcatatcaattaagcacatgaaatataaggctaaaccaggtaagatcagctgaaaccccgatgctactctaatcaacaaccaagaagcaggctagaaaccatagttctaaacacgacttatgaggtcaaacacaactgatgcagccataagtatgaaaagaaagacaatatctagacaatcaagctattggaagcttcatagagtggtagatatcctatataatctaagccaacgtcgatatgtaacataatcggctgctc

SEQ ID NO: 40542 - DNA, 616 bp, Oryza sativa
gtcgtcgtcgccaatggagtgccagctgaagaagtacctggtgctgctggccaccctggtggcgacggtgacctacgcggcggggctgaacccgccgggtggctcgtggctggaggacgccggcggcggcggccggtggcagctggccggcgacgccatcctacaggacaccaactactggcgctacatcgtcttctactggttcaacgccatctccttcgcggcgtcgctggtggtggtcagcctcctcttcctcctcctgcacaagggccggccaccaccagcaccaggggaccaagctgctcacgctcacccgggcggtgatggtggtcgacctgctcgccctcatgggcgcctacgccgccgggaccagccatgacaagttcaccaccatcggcgccgccgcgctcgtctccgccaccgccgcctatgtcatcgtcttcatcgtcccaaccctcacggcgaaaacgacaccgccgccgccgtcgggatcctgatgttgatcgccatcttcgtggcgaccgacgcctatgtagctgggctcaacccacccggcggcttctggcggagcaccgaggccgccggcgacccggtgctgccgggcctccatccaatc

SEQ ID NO: 40543 - DNA, 1750 bp, Oryza sativa
aaaccatattccgagcacatgttcgtcccaacttgactcacattagtaaggaactatccaaatccgacaaaccaacccgaaaccaaagcaaatctagaacctgccagtcagaccgcggcctggccggtctgaccaccgcatgacctgcggtctaaccggtggcattcagccggtctgaccgccaggggtcaaccgtgccattacttgacaaaatcaaacatctattaatcttcgaaatcgcatcataagaaaccaatatttcacacatgaaatgtcacaaaccaccaatattttcatcacacagaagctaaatcaactccttgattttacatatataatctaagttagcgttgatatctaaccctatcggctgccttctaacaataaacgtttgtcgattgaaggttagatagcaatattgctctagattatatagaatatatggataaatcagcagcttacatagacaatattagaatgtcataaagatggaagcactaatcccgaaaacacaagccgccataacaagttttacctcgttgtcagagatcgaactgatgcagcccaactcgaaagcaaaaacttatcgaaaggaaacgaaaacgaaacaagggcaatgcgcccagaatggtaatgaactgatcggtcattgattacacgggtttgggcttacttttatacccaaagtacatgatatgtccttgtcggacacaactcctaactctattacaacttaggatacgaacaagtcgctaaggcagactcttaatgacttcaaagtataaggaaattacataaaatatcctaattaatagatacaattgccttctcaggactcagtccgtgcgtggcaatccatatgaagcatatcaacccgatccgacaacgtttccaatgccatattgccggaatcggctccatcggttaccttgtctgactcgaactctgccgatttaggtcgcagccgattcagatttcagccgatgcgcactctgtttccgaaaccgctaatcccttttattccacttcggttttatctttatctccgatgtttgatttaccaaatttggttgttaacacatgccccccaagtccgaaatatttccgggtgttaacgtaatgttgcggattttccaaatcttatctctagaaaaatctaggcttgccttttttgaccgttaccacaccactttaaatattaatcgtcacccccgagaaaattcacaccgttacttccgttttctccgctcaagccacatctgtctcttctctctccggcgatcccctcgatgcgcttggcgattccataggcgatctcatcacagcgacaacctccgttccggcgatgtcgacctctgctggtccatcaagcgccccatcggctgagttccctgaggtaagtttcggtcgtctagatccctttcttttgcagtagattggttctttccttgctcaattcgccttccttttcttttcttctgtagcaatcctctcatcaaatcgcaatcccgagtttaacttaccccaatcagtacttcctcggtcccatcggcaatctagatccaacatagttcatcaatgccgaacccaagaaaatcccttttaggctagccagccccaatctaggaatctggaaaaacaccatcaagtcatggccatcaactgtgaaaagttggacggcttggtataagagggtatcggctagcaagcaaggccattgggaagaaattgggatagcacaagctttagc

SEQ ID NO: 40544 - DNA, 739 bp, Oryza sativa
ggaagtttggcgctctcttcgatttctacctcaacgagtgtagctttccatgaggaccggaagctactcactcttatattaaatctctaagctaagtggaaagagtattgaaaagaatctattcctatacttctagtatacatagtgtacatacatcctaagtaatatgattaactagctaataccccctttccgatgccatcctggtagttcaagaagccacccctgactgccgagttcctttggacagcccttcatgaccatacaaccggggctaaatacggaggagtaccctccccagggaatgaacttaggattttatacacgcgcggaggaatacccgcactgagctgtcaccatcagcggcccacattcatccgcagcatataaccccaaataatgatacccagtaatctaagcaccacgcctaaactaccaaatattactctaatatcaccatcgtgacatagagtatttgcatatgcaaacattatacccgtaccaatgcatctcctagataagctagcagtataatcataatatctcggacatagtgtaaagctggtatttatataatcggaaagtattacaattccatagtcgtatacagaagaatattctaaattaaatactagtcttacaaaagaacaaaggaaagtacctagagccataccggaactcttccgaagacttccggactccgcctactattctgttcttactccactagcttgagagc

SEQ ID NO: 40545 - DNA, 577 bp, Oryza sativa
atatggtcatgtatgtgtttgcaagcatggaaaaacaagagatgttgaaaaacgaattgagaaaattaatagaattgctcatcgggcctagaaaaccagagcctaaaatgtcaggcaaaaataaatcaacaactttctcatacctttctgttagcttcaacgtggatactctgttgtggttgccgcaaaaaaattttccgattaatcttaactgattgttatggataggagacaaaggggattagaatgagggtttacggtgagaaagaaaatgcagaagatgaaaagtcacgactgtgtatagagtaatatcgagaagaggaatcgacgccggaatacggagcttcggctggagttgggcttttaaaaggcccaacaatcacagcccactaagtaaacagctcacgctcacagatgacgctgtcgactagtcgtacgatagtcgcacaaattcgtcgtgtgtatagcattttcgattttcaatagcacatatttgcacggattatatgggaattacaagaacgacctcgcgatactttggaaacgtatagtcctgctgtgagaaagcttcagtcgt

SEQ ID NO: 40546 - DNA, 782 bp, Oryza sativa
atatccatttaaagaacatataaacttcaaatgggcataacttggccatttgaactcggaattggaccgttcaagtctctaatttttccttaagaagtcaagaacccatttttgtgctttgtttctgcttattatgtggaatttattagcgtaaaagccttttcttttccgttggtcgtgtagacgctgcagctttggaagatccgctctttgtggaagttgaagccggcgtttgggaaagtgagcaaggcaagtcacatcatccttgaacatattgaatcccagtttataaaattattttgatttaaattattgcattatcgctttatttaaattcccgcgttatcacggttttactaagccatgcctatttacctttgttatgaccgtattattgttgttattgttattattaccttgtccaccctagattaaacaaaaccccaactagtggatactctactcatggtaccactagtatgattttaggtagatgcttcgctgtttaattagacaatattaggtggttttataactttagacttggggaattctcatatcacttggacactttggaattgttggtttattgtggaattggattcacaccgccccctctattcaaaatccccaaaatggttttaggctgggctcagggtgcatggttttgatagtagcacctcggccatataaggcccggtcttcgggcctctgttgcaaagcacaaccgtactttcaaatgtctagtgggtaagccttagtttgtggctcaggggatcctc

SEQ ID NO: 40547 - DNA, 666 bp, Oryza sativa
atccacatgtattccggtggatggactatatccaggttcgaaataaaactttatttattttgtactatcatactttgttagtatcttttttcatactacctccgtgccataatataagcacatctagcatttgaaatttgttccaaaatataagcacgtctagagtactaattcactcaccaaccaccctaatttatgaggggcatcatagtcttttctgcttaaccttagtctttgctagaaaacctagatttgcttatattttggaatggaagtagtagtttgttgctatatgttgtcaacatgaagtacatgtgcccttcattctggataaaataaccaaacgcatatagtttttttaccgtttctcttgacagtcccctatgttgctttctgtggtataccagcactgaggtgaatgcacataccatgttttttttccttgtttgttgcctggtcttattaccagtttgttcatactttataccttaataatcagacccatattaccattttattttacatcttatgtgagtacttactgattgacgcagaacatcgttgattttggcacaacagtacaaaaggttaacttgaccaaatctgtcttcgatccaccttctgtaagtaaagatcctttcccaatgtgggctagaagtattacat

SEQ ID NO: 40548 - DNA, 986 bp, Oryza sativa
agagaaaaagaaagagaggagagaaaaagagggaaaatagaaaagaagaaacggagaaaatagaagggaaattgggggagaaattaggaggatttaggaaataaaaatggtcggggttaatcatagattattttcggaaattcctcgagcgtaatagtatttcggtcgaaattccgagttaattataaaaatatgtttcttaaacagattagattaaaattggtagtaatttagatataattaataactaaacaattagatgaattcttatagattattatagattatttttggtaatctctataagtcatcggttcacggtagaaattcggatttaattactaggaatcttagccgtgtattatatttaatcgtttagtcatagactgaattaaattgtataatatttctaggatttcgtccgatatttagctcgtaatagaaatttctaacctattatatggatataatgctcgggaagagtaaattaaaaacttatgacaacaaaataattatacccgcaaaatagtttaatcgaaaattgggtttgccgtagttgacagatagtaaagttaataaaaaggaatcgactttcgcatttgactttcatttggatttatttggatttttatttgaattctaaccgaattcaaatcaatttttgcacgtaaccatagagcccgagggagttgcggatccaagcgaaggccaagacccgcaagactttgagcaaggcaagtcatcactattccttgaacatgttgatcccaattgcaaaattgttttgtttacaaataaaattgcatgcaatgattatgccatgccttgattattgtttacccttaaaatccttgtaaccataattacgtatgagtccctagtcaattatgacaattgcttagaaatgccattctagaatcatgcatactcatatttatcaaatgctatatgcttggtcaattacctttgggaaggtaattgagatg

SEQ ID NO: 40549 - DNA, 715 bp, Oryza sativa
gttagattatttaggctataatttttatggtttttgttgaataattaactttgcaattttactatttctggtgttacaatgttaaaattttattttcgggtgctcagaacggcttggctatgtgcagcattgagaagaatatcttagagagcattgatctccaaactttcattaatgatttcgcttcgagaaatgcgcgaagaaactctttttataagggatataggatatctgtggtctcctattaagctattcatactactttgtttctatggtgttatttttgttgtcaattataccatcgatattatttatcgagaataaattgctatatcaaactgcttgatttattgtttaccatgttagaaatatttatttgtgtcactatatggtatatgcgttttatagaactccttatgggcctatagtgtcaagttcgcctagggcctcccaaatctccggaccggccctaggcggaggagtcatttacggaggatgaaaccgtccgcgcaatgcgcgatctctgtggagatggtgatgggtgcattacgcgatgggtttgtggtccagtccgttggatattacgcgtgcctgtcatatacgtttgttgtgccagaaaacaagagcaccattactgatttttttaaggacttgtttagttggggaaaaattttaggtttggttatcacatcggatatacagacacacatttgaa

SEQ ID NO: 40550 - DNA, 655 bp, Oryza sativa
  unsure (1)..(655): unsure at all n locations
tgcacggaaagatttttcataaatatacccgtcccncggggtaaggacgagagactaaatgttagttcacaaaaaacacgggaccgacgatcacacggtatggtcacgcggtactgtagaattgtcgcgcgacaccgcggcggtcccccggctcaaaaacgcgccaccgtggtggccaacggtagcgcacggcaccgagacggtcccgtggctcaaaaacgtgacaccaacacggtcccgcaattccattgcacggaaccagctctgtgaacagtagcaaagtcggtgtctctattgtgctaaacagtgtcaaacagcattatatatgcccaccttacgcatgccacggccggtgccgcgcgaccatcccgcgagaccgttggttccgcgattttgcgttgcggcatacattcggtctcgtgttttcaccctgtgggatagatatatttatgcaaagtcttaccgtgcaagtatatacgtaaagttattaaaaataataagtatattcgcaattctttttcttaggctgctagctacccttcatcctcattcctgcaactgcctttccgcttgtcgtcgtgccaagttcctggattaaccggtttaaccctatatatgattaatggcaaataaagaagggttaattggatccatg

SEQ ID NO: 40551 - DNA, 1064 bp, Oryza sativa
ggattatgcaggtcgagatacgtcggtccatcaaagcaagcgacgaacaagtcagtactccctccgtcaagttacttttcatgcactaatctcacacgtaacaataatacgaaaccaataaaatactgcaatactactattttatcaaatcataatacaactatttctcactttatctacttctattattattattattatttacttttacaaactccgatacaataattatctttaaaaaaattatttaggataaatgagaggagcctaaaaatatggccccattcaaaacaaagaaaaaaacataggaattccaaaggattttatatcctatgggatataatcctgcgtgaccttttgaaacgaagtattgattcataccaatttatttggaattcctatggaatggattattgtagaggaattttggaggaaaattagcatgaggcactactacaaaaaggacatgtagagacatcccgtaagagacggttaagcaagtcgtccctattaaagcccatctcctacattgcctcttacgtagatacactaattagagacaggataatagaccgtctctacgatcacattaatctatttggtaaattttgaagttgactgagagaaaaaataaatcctagacatggccgtctctacatcacataaaaaccgtctctaggggctgcttctactgcagtgaggtcttacctcatattttcttcttcctatgtcttgaattcctatattttccttgtgtgactatatgcaaacggtagttttgaaactttcccgtgttttcgaatcccgtatatgaatctaatgaatatggcattctattcttatatttcttctattcccatgttttgataatcgtatatttgaaagggacggaggaagtagctagctagcttaattaatttggtcacgtgtagggtaatacacttccaagagaacatccacttcacaagagatctcctactttcgttggccctagctagcttagctggaaatgttagaccatatattgcggaggttttaggattatacgatgttgatgtaggagt

SEQ ID NO: 40552 - DNA, 779 bp, Oryza sativa
aaaaaagattttaagtaaaatataatttaaaaataactgaaacccgaaattaaaaataagcaatattgaaagaaagagtccatatcaaaatctaaaataaaattaattaaaattcaaaataaacattcgctgtgccgacttgtattaaacattccagaaggattatgcaggtcgagactcgagatacgtcggcccgtcaaagcgagcgacggacaagtcagtactccgtccgtcaagtttacttttcatgcactactctcacacgtgacaatacgaaaccaatacaagtctgaaataccactattttatcaaatcgtaatacaactattttttactttatcttcttctgatacaattattctttactttcacaaactccgataccataattattttaaaataaatttattttggataaatgagaggagcctaaaaatatggcgcgctttgaaacaaagaaaaaacatagtatttccaatggatttatatcctatggaaaataatactataagacccttggaaacaaaatattgattcttatcaattcaagattcctatggaattttggaggaaaattagtacgacgtcttacctcatatcttcttcttcatgtgtcttgaattcctcatttttcccgcgtaactatcaaatggtagttttgaaactttcatatgttttcaaatcccataggaatccaatgaacattacattttaaacctacattttttctatttctgtttttgacaatctagcgtttcaaaggaacggagaaagtagct

SEQ ID NO: 40553 - DNA, 824 bp, Oryza sativa
gctgtatatggagtattctttcaaaattcctaattttttatttttcaatttcagttgtttcaaaactatattcttacttgaactctcttagtttttaatttcagatcttattttattttttattttgaattttaattaatattgtattgggttcttatatggactctttatttgataattacatatttttaatttcgaatttcagttatttttaaattttattcctacttaaaatcttctatttttttttatctccaattaatgtgggaatttgtagccccaataactatcgtgatacctacttttataattttcttaatagtatactacatagagataatagtatcaacaagcatgagtgtcgtcatctggagtagtgtttaaggcaaaatatcttttgaacaaacatagtacgggtctagggcaaaatatctaactgaaatcagtattcataataaaactctagtgaaaaccatcgtcgtcctccactcctccccagtccacactatatatagaacagtcatacatatatatatcacaaatttggcttctacctttcgtttggtcgatatgcaggtcatccaagtagatccaagcggtgtttggacagggtctgagctgtttaattgtcatcctaacagatcgatcatcagctgtttaatcaacgcctcagctgctatctgatcgattaatttgtatatttttgtcgtcatacagatcgaccgcttgcatggggtgcagctgttgccgatcgagctagctctgctgcatgcggtccgcccacgcctagaattaatgtgcagcgagaagtagctctactcttc

SEQ ID NO: 40554 - DNA, 3736 bp, Oryza sativa
acgctcaagaggaagggaacataggggagaggaggggctccagggagtagaggggccatgggaaagcgggagcgagtgcaatgagagggagggaggcaggagagaaggggtgccaaggagaagaggggctgtgggagagggggagcgcgtgcagcgaggaagagatttggggggggggagaaggaagggaggcaagagaggaggggcgccaaggagaacaggagccatgggggagcaggagaatgtgcagcaagggagagatgggaggtgccggtagggggggaggcgaaggcagaagcagaggtgcttgggagggaggggatcggacggacgaaagagaaggcggaagctttacgtacatagattaattagcggaaaaaattcgaattactcccgaactatcacaagcaaccgaattacccctaaactaaataccaaacattttacagtcaactattcgagccagacaaatatttatttgactccatccattcttattttggtcctacgaggcagcaagtagtcaacaacttttttaaaaaagaatcgggggaccaacctatcagattccctcccctctcacctctctctatcttagcttcctcattccccaccttctctctccctcttctcccctagctcaagagtgcggtggtggctggcccgtcaagctcgccggttgtgcctccatctcgttagcacaataagcatactgccattgtgacactctcccacacgagctcgcccgatgcctgacggtggagcttgcgcagaggtggagcccaacctcgcgtgtaggcggcgacaagactggcgatgtctcaagctttcttgctctcaaggaggctggtgagcttggctcctcctcggccttcgatgtgatgaaactcgcagtcaccgcagctcctcctcgatcttcgcgggcacgcggctcctcctcagcctctgttggcgttcacgtgttgaggctctagtaatatagaacatcaccaatgggacaaattataggtgccgaaaattgtaaaatcaacatctatagacattttcccacctccacaggatggaaaaatataaaccaatacctttaaccaactatgtataccagttccagagaaaactggaccaatactttatgtgcttattttgtaaaaataccaacaactttaatatattataggtgtcggttaaaccagaatatataatatattttaggtgccggtctgttaaaaatccagcacccttaaaattcgagtcacgccaatggttgggagcgagctaaaccagctcctttcgcatccttatcctctcacgcccctcgcttccttgtcctctcatgcccgcgcacctcgtctcatcgctctctcaccgctcattctctcgtcgcctcctccccttgccctccccttccccctcttggtatttgttacgcacacagataaattcacaagagtattccaagcgtatcgaacagaaagaacgtgtgtatctcagaaacaggattaaccatcacaacaactaaatgataggcttaggacagagaatattcctatggatttaaccaaggtaaaactctatcgaatgctttgggcaccggcccttccctagtctactgacaggctgagttcggccttgaactctattatgactgtcaccacctgctgcctacctcactttctgtgaagcacacaataaatgaagctaacctctaccctaaacactacgtctaagctaagcaaagaagcaaccttttcgtttggtttttgtttaagtcataagtcactcatacactattaatccaaaggctaggttggagaagtttttttatcttatgtgcggtacatgtataaccacaccattaaacttaatactttatatccattggcttataagttatataaaccaaaaaaactgacttaaaaaccgaagccaataataagtctaagcctaaacaaagagactcttaaaaaaaaccaagttaatatggatttactttttttatttattagtgatttcataatgactttatcacttttttgactaactatacttcaccacccagctgccacattatcaaaacttgactggtgtagtctaaagataaagtacggatcatgttgagagtttgcaaagtattactaaatgatttcacaagtgaatttcaaaccaagatcacgtagtttcattacaacggaacccctcatatatgatgggcggtaacccacatctgtaacgggtatatgtcccatctattctcatttgtcagtgacaaagaaaaccttatctatgatggattccataagtcatctatacgtataagttatgtaccgtcactactagtcatgattttttttaattttaaagacaccaaaaatccctaaaagaattttaaattttactaggtatctagtcgtggtcacgcatcactaaccataaatctacgatctttcccgattgagctttgagcctacttggtgtaattccaaaacttcctcttgtataaaagatatcaatacaaactatcggtagtcaaaactaaattggtgctttttgtcttgaatgaagcaagcagcttctctcatgaattcatgttttaaaacggtgaattaaaaaaagctagctactacatgtctacatctactaggaacagtagtattattactagcagacagataatagctttattgaaaagcattgataaggtcttgagacttgagtaggtcaagcacgatgacaagtatatattgacccataaaaatatctttctacatgcaatgcatcctgtgctaatcaaaccctaccaagctattcgagctcgagctcactaggtttgcgaacctcaacctatgcttaagtttggcttgtctgtagcattcgagtcgtgctcaaattaagctgtaacaaatcaaactcaaacagattgacagccctatctgtagctaccacacttgttagaaatgtcctgtcatctttgatgacgggtcacaactaacacccattatagatggattcacttctaatcttctatgactggtatccacatatgcatatatcaaacgtacgggctacttttagatccgtccgttagatattagccatttgaaatcggtaatattgatccatcacaaatgacctgctgtgcgttcacgaatatgtgagtgtttaggaacaaatatggaatttttgtcccgatatgtacttaatttagtctttcacctttgatacatattgataatcaggggtgctattcccttttatttaggataaacaaattagagcacagttgataattggaaatatgaatgaaacattgatcggtattttctttgtcacaattcagcgacaactttattttattatttataacaattggtagcaatatgtgaactatatttagaaaagagcacctgttgtaataaaaaagctaataagcgcgcttctcggatgaatacttcttcggattttacattaaagagcacatgagctgtggttttcaattctcattggatcatcctatatccaggtttctataggctattgtgtgggtgatgctataacgtgaaaaacaatacgggaattcctgatcatagcgcgcggtttccgattttcaatctgaagtttcaattcctatagcgtacgtttctaattgtcccgtactgtttccactagaaattcatcccaatacactataaaaacgattatttttttacaagaagccctttagattgcaaagagaccg

SEQ ID NO: 40555 - DNA, 1002 bp, Oryza sativa
ggggccaccccacatggattcggcaacagcgtcaggtgccggcaaccaggagctgtctttagcggctcgcccctcgcggatctggcaccgacgacgacggcggcgaccgggaacgggcggcgacggcccgttctcggccgcgtggatctagcaccgggggtctttctcgtgtggatctagtgctggtgacacaacagagggaggtgggaccatcggatccgatggcactaacgacgatggcggcgggcggcggatccgaatgacgatggtggcgggcctaggttcacccggtttctatttttatttttattttttctcgccgaatttatttttgtatgcagccggtataggaaaccgcgtgaaaaaaatggaattttggcatgcggttggccacatgaaaaaaaaaatattttcgcagaccttttggttggttgggatggccgtatgcaaagatcgcttttgaccgtttgtagaaatggtttatgtactactgatatattcatcacaaatttgtattgacagttatgaaaatttgttttacagttgtcacaaatattaaaattttgtttcctaactctgtggagttgtaaaacgtaacacgactggaaaacgaagctggcatggcacacgtgtgaaataattagtgtacgtaaagctcacgacgagtcgatcaagaattgaattgactttgactttagtactccctcccaaaatatagcaatctaaaaccggatggaacgtattctagtactacgaatctggacatgtctcatgtctaaatttatagtactaggatatgtctaatccggttctaggttgctatattctgagacggagggagtacagtacagtagtacgttactccaggtctgttgtcgtgtcttctaactgactttgacttgatttctaactgactttgacttgatttctcttagagaaacagtacgttccatctggggcttgaaaagtagagtgctttaatacaactaggtggcccccgca

SEQ ID NO: 40556 - DNA, 505 bp, Oryza sativa
tttcctaggacttagggctaaaagagaatggagagtggagatgggaagaggcgtgaggcgtcagcgattagaggccggcccgacgtgccggcagccagccggccaggcgcccgccgcctgacaactcggtgaggcggcgaagtgcttgtgcctccccggtctgctctgcgcggagggaatatcagagaggagtagacgtgtcgtgtcgcggttaggttgtgcagtcaggagtcgcgcaagactcacgaaaaaaaaggagaaacaaagcggaggagacgcgcgtcgcggcctggcagcgccctcactcctggcctagcaacgcaaccgcgcctcccttcttcctaggctgcgcttgctcactgggctaggctgcccgcagggggaggggggaaggggtggtaatcacgccctgtcagccttaaccctaggcggtcgcacaaccgacctaggcccagggctggacctaccttcgcccactcgttgacgccacccgcaaccaccacca

SEQ ID NO: 40557 - DNA, 1632 bp, Oryza sativa
ttttccgttgggccagcccaccctgcacacgctccttaaattcttggaaaaaagttaatcatattgccaagaggctaatatgacaaatgatgtttttataaagttttgaacttactcagttaatcataggctaatcctgttttttacacctaacatatcttcacagcaatcaagcaaatcgaccagctcggtacgctagaataccatgtaccttgaattgggtttcctgattgaattgtacttgtttaaacgaacatttaggcgcatctctatctcaacattgtaaatctccttttcttcgtatgctgattcagtgaccaatttacatcaattttatgcacatagaaaattttatagtgtgcccactgcaacgcatggggtatgaactggttgatataatgatcttgggtatgattatgcccttgaggggcctcctacctgccttatgtaggtcgggggcaagattatagataaaacctaactaaacctggtatctatttgacaatattccggagtcagagctataggccgtatcccttaatactcagggaaacgtaatactcaaggcttaatcctttacatattctagagatataaactatctcatataatcagtcgataaactaatcgtatgggtatatgatacccgtaatctccacagtagcccatgagcccttcacactcgaaaatacggtcgcatcggctactttgataatactgtcttaaatcaatttgttaaattctatagacagccgattggtcatgtttagggtttattattctttgatatatccagtccataccgatttggtctaactccatcgactgagaccatcaacgatatgctatcggcctatcgatcgatcggctatcgatcgactgattctgcttttgtcctttcttgctgattgcaggatcaaatcagctggtatgccctagacacactcaaggctaaccttgacctgcactggagttaagcagatctcctaggccgccgtgttttcacatcaacaagcttttggcacatctagtgggacaaagttttgttattcaaccatgtcgtcactgtctgacattggtaaagaaaatgttatacctgctaaggttgaagatctgtctgaagagcaaaaggcagagatggagcagaagatgcaagaactgaagaaggcatatattaattctttttctatgactcggcaagggaaagttattcaaaagtacaagtgccaaatgccgaagttagaaggagaaggagcatctggtgccaaaggagagcagaaagaagatgataataataaaaaacagttgatgactttataggatcgtcttgatttagctgtgcaccatgctctcatcaaccaatctggaatcttggtcaccacattgtcaaatttgatcaactcagtggttgatgggtcgattgctgagtagaagacaagaggaccagtatatttaccaagtggtgttttttttcccaaatatagagaaatcaagactagtcttgggaaagccgagtgcttcgatcatcttcaccacattctcccaagtgcttttaccaaatcataagactgtgaaaggctgaaaaaattttatgagataataaagaatatatactcagatacatcgactaga

SEQ ID NO: 40558 - DNA, 940 bp, Oryza sativa
aagtgtgcttgcgggtggccggcagcttcaggcacatcgacgactgtcagaaatcctggccggcgatggctgcaatgcggcggagaggtgaatctttggccacgacaaattttgagttgcatttctttgatttctttcccaatcccctttccttccctttcaagcagcagggtgcacgatgctatttatggatctgggaggatctcctcagggagtatgtcgaggagatagtggcatactgccacgccggcgagtttgatagcctatgggagacatgtgacgagttgcggtggcagttgttagatgtgcagggtcgcaacatcgagttgtgtagtatcttggaagcaaaagaggcgcaattgcagctctatagagatgagttgaatcagtcaaagagggaggttgcagagatgaagcacaagatggaatcagagaaggccatgctccaatgggttctgtatatgctaatgtttatctgtgttctttgtgtgtcagtagttgtagggaagaactatcttggatagttaattactgtgaatgtgcaatatgtaattgtaaatgacttgtgtaatgaatcctagtttcagtttgagcaaatgtgagtaattgtgcatttgtaattggcccgtgcatttgtagttgtagatttttagcaaatgtgagcaaagctgataaaatgggacttatgagacatgattttcatacatgattttcagcagcatatgtgagcaaacatgattttcatgtccaaatttcagttcaactaaaaactatcaaaacttggcaatgtgagaatgttagcagtaaaacaacaaatttgctggtattttctgggttttccagtagagaaacacaaatttatctaatttccagcagaccaacccaaatcacatatgtcgagcaagttcatgaatataaggtcatatatggaccaacacaa

SEQ ID NO: 40559 - DNA, 882 bp, Oryza sativa
  unsure (1)..(882): unsure at all n locations
gctaagggtgttggcaagacacaagaaggaagaacgcgccgaatatcaggcaagaaagttggctagggcgcagcgtgcaaaggatgcggggtcggaagcggcaaggaagggcaagtacccttggtgcacccagtagtgcaatggaagttgttaccgaaatttcaattccttaagacatgtaatagtgatactttgagacgttatcgcgttgaactatacgcgtgtaataatgatacttaatagccttttgcgttgacagtgttgcgattcatcggaatctttactctaagacattgtattcggtttgaattccctaaggcttgtgatagtgaaactttagaacatttcccgttgaaatattccggtgattcataagagtatcctatttgacatagtggacaagatcttttaattagagatttttagtgctagctagtaatatcatgtctttgtgtatatagatagggtattgtcacgcccagaaattcccgaatagaattccaaccagaatgtgcattaaaacccctgtccaggacaggccagaccagggtacacaaacgacaatattgacatacagatccacgtcttacaaacaaaaagttntacataaatacatcggaaattaaagggatgacttgaactaagtcttacttggatagcagcgggcaacaccattccacaggcatgctcgacggcacggacgaagtctactcctccgagtagccaccatctgacgcatactcgaactctggggttgggagatagagcaagactgagtactacccactgtactcagcaagtcataccggaacggagggatgatgcagaatataaccaaagacccgggtccattgcgccaggaccgatgactagcatatctat

SEQ ID NO: 40560 - DNA, 539 bp, Oryza sativa
tttggaaaatctagcacgaactaaattgcagtcatgcatatctaagtttctaaacacaagcggtacacattgaacttatgttagcacaattattgttgtttcaagaggtcctacatgtcatgtttcgcttaacatagattagacccaatgaatccattagatttttaggtatatactacttttgttttttcaaatagataacactgttgactttttatcacacatttgaccattcagtttatctaaaaaatttacgtaattatatattttttttgttgtgagttgttttatcacttaaagtactttaagcataatttatattttatacatttgtataaaatttttgaataagatgaatggtcgaccatgtattcaaaagttaacagcatcatctatttaaaaaatggagagagtgagtatatgggcctgtttggcacagctccaactccagagctggagctcaaccaaacagtttcagctccaccaaaattgggagtggagttgggtggagttctctcacaaaatgtactagagttgtg

SEQ ID NO: 40561 - DNA, 695 bp, Oryza sativa
aattcctgcagccccaatatttggtaatttaaatagtgtttagtgtctatttggtttaaagccaaattggcatgagtaagaaaataagccatttcaatagtgaacttaggctattttggctttaatccaaacacaactttgccttaccaaaattagtcatgccaaaacttaacaaaatttggcattgacaaaatttgataaggtctatttaggccacaaaccaaaccaacccaacatatagatgtttggtttgctaccaatttatatccacgctgctaaaagtactatactatcaatttgttagtgtcaaaaattaccaagattttagcgctaccaaaatattgattgggcaaaattggtaacaatccaaacaaacccgtctgcaacttgcgtagagtgtatatggagtactgttatacttgtgcaacttgtaattagactttggtgtgcgtattggaatatagggtcgctacttgtttggggtctatacgaattggtgagttcagcatttccggcacttgaagtgactatgatctaatccactgcaaccaagtcctcggtaggatttggtcgtcaatggcatcttgtgtgagaggttgagcttttgaagcaacccagtgtgtgtgaggaggaagcctagccacttaaaaggcataaacaacaaaatacatgtcaataatgaaatactggggaaa

SEQ ID NO: 40562 - DNA, 685 bp, Oryza sativa
cttgttattttggattaaaatatgccgaattatgaccaaattttcaacatcaactgagctcacatatctatgatccccacgattgttgcagtctcaaaacacaaagattacatgtgcccatgaaacaccaaccgaggtctacctctattttagcaaactgattgatcacatgtacaagaagttggcaaaagggaatccaaagcatttcacagctgctggacgcttggcactcatttcttcaatttaataatttccatgcagaacctggggggcaaagcaaaaggtaaaaaacctgaacatttctccatgattatacgtgggattcttctcagcatcccaaaatcgaaaccaattttgtggtgcttggtacacacggtttgggacttctttgagccacaaggttgaggcttaattcagagctgcccacagtttctccgtttcggtttattcagcggccatcccaaaaaggaacggtttcagttcatcacacactactcgacagccgacagtcactctcggagaagaaaggccgtgaacatgttggatagtactacttcgactaattgaccatttgctgctgccatgagaggaggacaaatcaaacggacagagtgtgacaagtcactctaaagataacagaattctaagtactagctttgctactgtatttgggcaacatggaaag

SEQ ID NO: 40563 - DNA, 556 bp, Oryza sativa
ccgtcaataaactctttggaccgccggtcagcgtacatccattgccgatccatctacggtgagtcaaaaaaaccgcacacaaataattattcttacaataatgacagtcatacaataattataagatatctttattcatacaaaaatcataaaatattacaccaaataattcttaaaaactatttgtaaagttttaaactaattttaatgtgttttacttcttttaattttcattttagtttgttttctattatttaagattaactttcactagagttttccttctcaactattttataaaaccttgtttagcaaatgaactaaatttctatatattctttcttccccacacacattttctctctcatcaacttacaactaaattttggagacaaaaaaaagtgtgcaaaacataggtgcaaatgtagtatgacaaaaaaaaacattggaggatgaagttgcaaaccttttaggcacctccgatttgtatgtaatcaccaaaataaattcaatagaaattttggcatgacctcccctcttttttgaagtaattttg

SEQ ID NO: 40564 - DNA, 6944 bp, Oryza sativa
tccaataacaaatgtatccatagggtgtacatgtctcatcacttcactttccaaaaacgtatcatatgaattacttgcttcaaactgtagataaacttcttgatcaatctaatctatgtacctttccaaccatttgcctgctcttaatatacaagggtggcgtgtttcgatatggacatctccattcaaaatcaacatcgaaggtgatcttcgctgaatttgctactcgtacaagtgcaatcttctcgtacgaccatggttcaatctgtgggaagccgttgtctgaaactgttcactctgttacgtgatgtaggagtatgtgcctgtgtgtatcttctgttgtattgaaagaaatttccttgtactgtaccatacgacactttattcttcagataaagccagtattgcaaaggacctccacaattaattttacaggaaatcgatacccctcgttgtgtactttttcttaattgatcccatcacactagctcgttcgtttgactacctatgtaaccttgtactcacgctcctgcaaacaccatgttatctttgacattggctcattctctaaactaaagcttttatcactattgcacaccaggggatagagaacacataattattggatcatattttgcatactgtgtacgtaacagaagcgatcattgcccattttgattaaataattattaaattttgtgtcagctagatatgtgtacgacaaatagtatgagacagattggtagtagagtatttgatacacctggtggaactacaatattacgaaatcactttacttgtttgattttcggatatgtaaacgattttaaatgagtgtcgtacatatcttgttgagcttcacaattttaatagtacatatagaacgttatgaagaaaatatacatatgagtgacaccatttttcagagactgatacaacttaaggcgatcgtctctaaaatttaatttttcataagctttcgcttgagagttagcatcatcagaagtgggcgtccataccgacccataccgttattacatcggcaccaaggggaatcgttactagctcatcctagtctcatgtaacacatggaaggagcgtaacaatggagtattcaagagcgaggaaacagcgctacctgggatcatcaatcgcatcatagataagctttgcgagaatcctaattagcgcatacgcatgaggaggttaagtcgcgcacgttttctggcctctacgcagacgtgtgttttcctttttttcgcaacgaagcaatctcagataaaaacattctattttttcggcacaacaaatctgccgcatgtgcggaaggcttagagaaaaatatgattaacttaatttttatacgtaattagttcctactagttgccaacccgcgcgttgcacgggttactgttaacgatattaccgtgacattcaaattttgaatgatatatatcactcagattaaaataattttagtaattttaacataaatcttactttaatctttattactaaattggtagtcgttactaaatataaattttttacttagttcggagtctgaattatcattcctctattatggtttataaaacccaagttcaaaatcaatattaatacccttaataattgtaagatgcttcattagagtttattattctttataaaataaaaattagaaactataatattattggactacaaatctaaccactattacaactcaccctcctatgtttaaacaaaatatgttctttcgtagtttatggttgaataatgaacttttattaaataaatttacagatgatagagtttttcatatttaaataaaaatattcaaacatggaaaaaaaatctagtaaaatgatactttttataaaattgatgtgaaaaaagctaaatttttttccataacattgtattttcttatttttataattccaaaattaaaaattagataatgtgaaagttgattggggcgataaaaagtcgacaaatttaacatgcatatgctccatgcataatcatgatgtaataaaactaaataaagacttgatctggctaagtgtaagtcaacagagtttgttcccttcttctatgtcgctattatagcagattgaacgtgtgtgtaaaaaagtaggaaaaaaattgttgagtcacaccattagggcatgtacaaaggcattaattagtgggctctctttattgctatgtaagcatatttgattaggtggaagagagagaaaatagaaaggagatgcatcgatgttttgcatgccatcggcttgacatcggctctcatcgagataaacacgagcacacgagataaacaacgaaccgttgtatggtccatcttcaagaaaagtcgcttatttagattcaaagtgcagaaaatcacgtaatcattgctactagaatttaattactgcatatcagtggagagacgataaaaaaagccagcctttgtagaattactgttttattctgacatagcatatctatgagcccatagtgggctcaaccgttgaacgtgcccttagaacatccacaatggttatctataggctctctacaagagatccatgttagcatattttcctacttggaaaagattaaatgaagagagagagcaaaactatctacgtactaacctagagataatctatacagaaaaacgaggcaatgtattagagagctatagatacccatgtagacatattattgaggtggtttactattaatctagtctattactgagatgtacatgttttatagagagcaccttactttactattgcgggtgctcttatagcagcaccgtatatatggctctgggacttgataggcgttagcgttccatcaaacgggctgacattaattgtagaaaaataaaggcactacaaatctttaatcttttgagaagtccatgcaaacacaccgagttagctcttctccagatatcaactgcttgcatcgacaacaggccatgcctcttgccgcaagctaagattgttgactttgccgtagctgctctagagtgctgagattaaaatttactttaccggatcgtgtattcgtgatcgaataatttgtcttggtccatccatgagattcagcaaggcaatcggtatggttggtggtcacaaatcaaaaaaggaaaaaaaaaaccccgaacatatatatacatgatacacgtgggttaataaagacatttgaacgtatatttttgtagcagaaagtatatttactcaccaggattggatggctaaatcaaattactgtagagtttagttggaactgatcaatcgacctcatcgtcttaagtgcacagagaattaacatgcatgttaatttagatgcataagagcacccgcaatggtaaagtaaggtgctctctataaaatatgtacatctcagcaatagactagattaataataaaccacctcaatagtatgtctatataggtatctatagctctctcatgcattgactcatttttctctatagactatctctaggttagtagatagctttgctctctctcttcatttaatatcttccaagtagaaaaatatgctgacatggatctcttgtagagagcctatagataaccattgcgggtgcgctaaggtagacggctatatcagccaccagagaaacttgaaatcgatcatgtactttccgcactggctgccggtacgtaccaaaattagctagcttgcatgtgcctgcccttttgatcaatcagtgcccaaggttttgctttttgggcagatgcgcttcccgatgaactacttcggtctagccatccttgcactctttgccgatccagatgaagagagtacgaaggagatgcgacccccttgatcgattattaggataggtttcgtcgctaaacgccgccgatctaaacgaagagcgcacgaaggagatgccgccgtcttgtttaattagagattagagatatggtgggggtcagatccataaggagaccgaacgggctttaattggcccacagtgtaaatagatctattagataaattatttacatgatgtacggtcaggatgatacaatcgacacaatagatggttaagatttttctgattaacgtgagagctcgtagaaagtgcccaattagtataggtatagatagatagataaattaggccaatcaagataaaccttttgttctagaacattattttccttttttactacaaatttgcaaactttaaactcaaatttggaactttcaaatcaaattttgaaaacttttaacttgatttcgaaaactttcaacttggttttgaaaaaatttaactcgagatttgaaaactttcaagggaagatctaaaaactttcaactcggattttcaacttgagattgaaaactttcaagtctaaatttgcaaactttttaagtgaagatttgaaaactttcaagtcaagatttaaaaactttcaactcaaaaatttgaaaaaacgtgtgctgaagattaaagaaaaaaaatcaggaaaaagcgaaaaaggaatatcagggaaaataaactggcgcggggagggagagccagctggcgcacgcgccagttagccatcccctaaaatttggttttggtcggctacaggggaaaagagtctcttggccataatgcgcacgagaatagtagcccaaacgatcctgtctaatacaaccaaacgtagtgtggacatgcttagcatgacactctttgtcactacttttcggatttgctttctggcacatacgcgtgagcaaacgaaatcacgcgtgtttcaaatccacgcgttttgactttttctctttttttttctttttcccaccggatccccgcaagcgcacacgccagcgcgcgttttctcctctcccgtaattaatcgagtggctgcgcgtgttttctattctcccgtaacgtaacggagttagtttaggataatgacgataattaaggaaatatttccaactaagatttagaaactttcaacataaatttgaaaactttcaactcaaatttaaaaacttttaactcaaatttgaaaactttcatttcaaaatttgaaaattttaactcagatttgaaaagtttcaataatttagaaactttcaactcaaatttgaaaactttcaaattaagttttgaaaacttttaacttaaatttgaaaactttcaagtcaagatttgaaaattttcaactctagatttgaaactttcttcagattggaaaactttcaagttaatatttaaaaactttcgactcaaatatttcgaaaacacgtgtactaatgattaaaaaaagctaggaaaataatatgaaaaaaagaaaaacgtgcgaggggggaagaaaaaaaaggaaaaagtgaaaagatgggaaaaaacacgaaaaaatagccaaaaaaaataaaattgcgtgcctcccccacctcttttctctctttttctttttactccatacatgggccatcctcaaacacctcgcctgcacaggcaacaaggtgtcgttcgagtgaatgcagacggcaacgggattggcggtgcctaggcagaagaaggcggtggcagtgatgatctcaaggaagacgagggggaggagcaagaagactatggcatcgtcgtgtttgtgtcagtgtgaaggcgcagcacgctagaagctagcccagcacaatcaatccatcactcgcgtacttgctaggctagctcctagcatgctaacggcctcacgtacgtctcgctaccccgaaattctaaccctaccccgaggtgtgtcgatatgaggtcgcgagatgcctagtttgcacacgtttgcgaactagtgattctttgacccgggccagtaactaagcacgtacatctcaccttgccgctgatagctcactagagcgaaacgtatgctggagcatggattcggtaagagcaagtataatagtaggctataagcaggctaaatgctgaggtggaggagagaaaagaggatagagaggagaagtgggctgtaaacttgcagccggcttggacacaggaaccaagaaactatgtgagaaagataagtgggcctgtattaattacaaagagctaactattatatgggtaggctgagagaaagctataaaaaaccttatagccactggtggagaaaccatctttcgtcggtcggccgatttccacaatagtcccggatgcaataaaaaccggggctaaagatgatctttagcccggttcaaaaggaaaacgggcatatttgatctttagtcccggtttgtgttaccaaccgggactaaagatcatctttagtcccggttcgaatgctgtcaggacctgtcaggcccccccgggatctttagtcccggttggtaacaccaaccgggactaaagatcttaactttagtcccggttggtattactaaagatcccggtgatctttagccccagttggtgttaccaaccgggactaaagatcttaactttagtcccggttggtaataccaaccgggactaatgatcccggtgatctttagccccggttggtgctaccaaccgggactaaagtcccacccctatatatatgtcttcttcctccttcagctgcccgagcaagcttcaaaattacttcaaaaaagaggggaggtcatgccaaaatttctattgaatttattttggtgattacatacaaatcggaggtgcctaaaaggtttgcaacttcatcctccaatgtttttttttgtcatactacatttgcacctatgttttgcacacttttttttgtctccaaaatttagttgtaagttgatgagagagaaaatgtgtgtggggaagaaagaatatatagaaatttagttcatttgctaaacaaggttttataaaatagttgagaaggaaaactctagtgaaagttaatcttaaataatagaaaacaaactaaaatgaa

SEQ ID NO: 40565 - DNA, 711 bp, Oryza sativa
atttttacaaaggtaaatttattttcacataccaacttgtaccatccaagaatttcaccatggaaaatttttgtggaaaatttaaaactttgtgaattcaaaagtttttgttaccatagaagcatattaaagcatatactcccttaaataaaaaaaacacatagtttttttggccaaatcaaactaagtccaaaagtaaaagtttcaaatcttgtggtaaaaatttttaatccaaaaattttgctttgaccataaactaaaatcctaatcttctcgggtttggcattttcaacctaactaaaaaaatatatttaagttaaatataaaataaatggaaaggtaggtatcaaaatacacaaacctaaatagagataaaaagaacttgcttgtatatgcatattattcttttaagattgtttttggatattcttggtgcatctcataataggttgcatatgcatgctttgtctaaagaaaattcctaaaaataaatgaagcaacaataaatcccaaaaaaatctcataaatactaaacaacaccataagctcccagaaattttagttttaatttatcacatcaattggtaacacaaataaatccttgaactcagctaaaaaatctggaaacagcataccaattagcctaatttgcaccttcaccaaaattaaaccataactcgtcttgcaaaatctctaggttgcaaaatgtaa

SEQ ID NO: 40566 - DNA, 558 bp, Oryza sativa
gcatggctaagcaattatacctatatagcacttagctgaaccaaaccaatacataaggtccaagctattcaatttattacccataggaaaataaagtcattgtcggccattaattaactgggaatggctcaccacccgacgacattcgaaaataatgcataagttgaaatgaaacattagctttaaacctgttcaacatgctaaaagcattgtttgggatctgtgtgacttgccttgagcttcttcaaacacttgtgaaccttcctcaacgtaaacgctctccttcggaacgtcggaaactaaagcaaataaacaaaatcaacaaaacagtacaaaaacaagcataaacagtacatgtggatatttttaacatgcagatcttgattttagatgaatttagcaacttgaaccactcgaatccgagttacgatgatttagttatgaatttccgaagtttaatcgatttgcaactaatagaaaaaactaataaaaaggatttatgacgtcatcgatgacatcatcgctggccatggcacggcttcacgcgaccactggcga

SEQ ID NO: 40567 - DNA, 889 bp, Oryza sativa
gaccaaaataaaagttatagatattgatgagttgtacaacttttatgttgatgactttttcagttgaaatcatttagtatttgaaaataatattgtttgaagttgtcataatttgaaattcaaattcaaattagtgaaacagagtcatataccaaaatgaccaaaacaaaagttatagatattgatgatttatacaactttgttgttgatgactttttcagttgaaattatttagtatttgaaaatgttgtttcaagtagtcataatttgaaattcaaattcaaattactgaaacagagtcatatagcaaaatgaccaaaataaaagttgtagatattgatgatttatataactttgttgttgatgactttttcagttgaaatcatttagtatttgaaaatgttgtttgaacttgtcataatttgaaattcaaattcaaattcaaattattgaaacatagtcatatagcaaaatgaccaaaacaaaagttgtagatattgatgatttatacaactttgttattgatgactttttcagttcaaatcatttagtatttgaaaatgttgtttgaacttgccataattggaaattcaaattcaaattatttaaatagagtcatatagcaaaatgaccaaaagaaaagttgtagatattgatgatttatacatttttgttgttgatgactttttcagttgaaatcatttagtatttgaaaatgttgtttgaagttatcataatttgaaattcaaattttatataggttaattaaactcagatggagaaataaccgaaataaaattggtatatctcgataagttatacaactttgttttcataaaagttaatttagtatgataaaattcgattcgaatgtttaatattttgaaat

SEQ ID NO: 40568 - DNA, 659 bp, Oryza sativa
cagtaacacttttacttttgtgcagtaacaagtgtatgattagtatctgagacttttaaccgatatatttttgtttcaattcctgaattactgcaattcaccacaatattacggtcaaaagtgcaataacgtcatatacatgcagtaacgctatattggagggaggaaaccaattttcttaagaagagggaggaaaaatggttcttgaggaggggagtacgtagatgcattttgaagtttaatcctccacatgcagtaacacgataacatcatggtggaaacggttttaaaaaataatacatatcttgtgagatattgcttttcaaagattgacattttgaactttagccctccacatgcagtaacagaatgtgtaatttacagtaacaggggtatatacatgcagtaacatggttttaccaaatgtataaaattattcaaaacactcctacataattcagaccttgctcaaagccacctacaaactttacctatggcccacctattcgaacttcatctcgtaaaaatgacatagtaacactgcatttatcatgcagtaacatatctacttggaagtggtaacatgcacctattatgtagtaacgcttctacttttgtgtagtaacaagtatacggttagcatgtgaggctttaaccca

SEQ ID NO: 40569 - DNA, 506 bp, Oryza sativa
cctcacaagtgaggggaggtgggtatttatacccacagcacaaatctgcccgttggagtgcaataaaagggattttcggaacttccgaaaattccagatctgaggaaaatcgaagtcaacgcaattttcggaacttccgaaaaatattttcggaactttcgaaaatttccagaacgcttctgtgtattttcggaacttccgaaaattattttcggaacttccgaaaatttccagaacgcccaaacacggttcggtgtattttcggaacttccgaaaatttccagaacgctccaaaagagaaatgcttcgaagtaaaattgattttgagcacacgcatcactccttatatgtctatgcatcatcccccttaatagtatggctttcctacgacacaatgcgaggaaaaagatacaatataccatttgatcattgccgcattgcatcacgatgtcgcattcacgggatatgcattgtattacaacacgttgaggacttaacaaccttca

SEQ ID NO: 40570 - DNA, 547 bp, Oryza sativa
aaagtttatgcattgatgatgtgaaatgcaaatattttggaattatacatgagaacatagggactatgcagacaacataatcaagcatgctgtcatgttgcctggctgcccattaagaaactagtgtttttacggtagtctttactgttactgatagtattctaccatcggtaaaaaaacctgccaccactaatattgtcggtaaaaaaattgcttattatgtaaggaaaggagcaagcctagatgcatgggtgagtcgtgatgcctaattctaccaggctccatcaaatattaaagtataatcgtcggacaaatcgacaaagataagaaagagtcatctgtcaaccaaacgagaaaaactgatcatctatctaccagacaaaccataaaaggagactgtctctgtgcttggcctcaaatttcaggcaaagcaaaacacctgctaatctgtcagtcaaatgcgaaaatgatatcaccattcgtcacaaaaagtgtggctgtaatcaagcccaaactctctgacagaaagctcgatcagaaatacaca

SEQ ID NO: 40571 - DNA, 650 bp, Oryza sativa
agactggctaactctaaaaccatgggtcaccgtctgtctagcgtctaggtgaacactagatgtaattatcgattataattggtagttttttcactatatttataatcaaaatagtttactaatatcttatatccaaatctattcgattttatatggattaaaaataacagtcaaaagtcatgtgcctcggtccaaggtttatatgagtaacattaccgatgaaaactagatgattttttgcaaaaaaaaaaagagaaattcctgggtcgtcttggaaaaaaaaccactcaatttcttagtcaatttcaaaagaatccaagttggattttaaacttccaacaaaatttagttggatttcttcgatagtcaacagtttttcatgaaatctagaaaaacaacccgccttcattccatggttagaaatggttcggttttgtgaacctgcctcagttaaaagtcataaccgatactaacttttctatagggagtaacacactctttaacaaaatatttggccgcaatttctatcagcttttcaagactcgagccattggcgacatctttaccgtcgaattgagatagagataacgaagtaggtcggttattctttctcaaaaaaggaaaagatatatacacgtcagaattcccgg

SEQ ID NO: 40572 - DNA, 1037 bp, Oryza sativa
catcaactaaacactactacatttacatgttttacaaattagtttttatatattttttaatattatgtagtctaatattcgtttgaatcaagtaaataacatatatccaaataaatatgtacattttacttatagcaaagcatatgtatttttctagtaagttttaaaaacgtcatctaccggagggagtatgattttactcccatacctcctaaaaacttgttgggcactgttcatatcatagtgttaacctctcttattttagcagtagcttataaatattaaaaaaatacttatactgtcagagtatgttgcgcgtgcttaagtatagccatacgatttcgtttgaaaaattgataattaaaaaactaataagagttaaaattaaaaatcttatgggtagggaaaggaacatctgggagaagctagaagctgtctggagtgctggactgttagtcaatgcgcaagatgattgatcagttcagaataacccaattttagttgaatcaatcgatcgtgcccatgctgtcatcaacgaaagattgatgcacgcgacaagcaggcgacacgcccctcgcgagcgagttccatagttatacgtcaatgtcggatccattaaaaggtggcaaaaatgagcaggcgtaagctgatggacgcgtgccgatacattccccagtgatgatctgggaaagaaaaccgaacaaccacggagaattcatgccattcatttggcatttttctatacaaatctgtgggctgagtgtgattagcgatcgctgtcatgcagagacgtgaatagctcttcaaaatacagtactcgttgttctatacgtactgtgcttgtttggacaatttgttagctcaacggcttatctaccagactaccaccaaagtttgtaatgatctgcttttaatgcttttattatacgtccatgtcggatacattacaaggtgtggcgaagtttgatagtttttttgaccgttttgacctaggcgcaaaaacactgacgaagtgacaacatgtttcgcttagtaaa

SEQ ID NO: 40573 - DNA, 721 bp, Oryza sativa
ctgcaatccataaaccacagtaggctggcacgtgggccatccacctatttattttctcggtttttattttctaatggaaatcatgctgtgtcattgacaagtggggccgacccttttgattaggggtaaaccgctccctttaatcaccgatgggtcccgcttgtcattgacagtaaacataatattgattttaattatattttctaatcatccggacccacgcgtcatagaatcggctaatcatcattagggagaggattactgtgcgctaactactatgtgggtcccacatggtttctctctctctcgttcttttctttcttccccgtcgtcttctacctctcgctcgcgacggagcagaggagcggcgtccgtgcggcgcggcggcccgagccggaacgactcggcgcacggtggggcgagcggcgcatcaccagatacccgccggcggcggcggcgaagcgcggcgactgcccggcgcgcggcgcgacggcgcgcagcggcgccgagatcccaaaagcggcggcggcacaatggaggccaatatgagcgcaaccaatgacgatttaaccatctagggtcctcatggagtatgtagaagcaaaaacctagcctaagttacattagaacgaggcccctccacgatgagctcggccatggtgcggtggcggccggagtcggcacggctacggcggcgcacaccccaaatcgagggggccgc

SEQ ID NO: 40574 - DNA, 741 bp, Oryza sativa
aatttttaagctagcatagctcactcattttagctcgaaattgaatgagacttgaacctaaatttatctaaaatcaagatctatctgatggtaccattttcttaatatgttttgtactgtgtgaattttggtgaatttatttgaattctaattgaattcaaatccgatctttcgcacgtatacttagattccgagggaattgttgagtcgattgaggagcagggacagcaagactgcgatcaaggcaagtcatcactaatctttgagcatgttgaacctattgcgaaaattatgttgatttgaataaaattgcatgctatatatgaatatgaatgtcctacttgttatatatgctatgccttgatattgattatctgtatgcccattgtaaaccctgctatcgtgtgtacttagtcaatattggacaaatgcttagtcatgctacactagaatcatgcattctcatatttatcaagtgctatatgcttaggcaactaccttagggaatgtagttgagatgcggtatgtggagacatgagcgccacattgccatgacattgatgacatgatttgtgaaaggagaaataaaactaaacaactgtttccgactggggcggctggatgacttgggtggagtccggtaaaggctagtgccgtccttggtcagttaaggactgagccatgaagttaagcatggaacgaccaccgtacaaccgtacttctcgtgtgggtatagaccta

SEQ ID NO: 40575 - DNA, 601 bp, Oryza sativa
cagattctcggcggttagcggtagtagaaatatggagggatattattgtcacagaaaaaatagatgcggagggtataatcgtcatttagctatgactaaactttttatcttttttggctttttttaatgaaatatgagcgatgtcagtgtaatggatgatcatatatcgatttagctgggaaaaacataaatgataatgtaactcctaaacattgtattattaaattactaatttacccctaataatactgatagcataatactaccagcagagagcaccagaatatcgtaaaaaaatggttgggagggtctagaaagataaatgtgttagtgcaatttgcagatagtttttcacagcaacatgtttctttctttgaagaaaacgtgacaaaactgctgagcagatcgtgtgcacgcaagtcaaactgacaagctgttattttttacatgaaaactgacatgaacgggttcacattctagagccaaaacctttttttcgttacccatgtgtccaaaccaccaatgcccctctctgattccttaaaaaaaaaaaagttctgagatccccttgaaaatactcgtggtccatccatcttcagcc

SEQ ID NO: 40576 - DNA, 1074 bp, Oryza sativa
taatctgtgaccctaaaccataaaaccggatatctcgaccccctaactcttaaaaccggtgcaatttgacaccctcggcggttttggagggcggtttcgctaacgtggcgcctacatggcagtattgactcggtcttctttccatgtggcgttgacgtggcgcttaaggtggcattacaaataaaaaaatatgtgtgggacccatttgtcattctcacacaaaaataaattgtgggacccactgacatgtgaggcctacatgtcatcctctctatcttcttcatcctccccctatctctctttttctctctgcgagcgtgggacgggggccattggcggcggcggacgggcgggagcttacggtagcggcgggagggtgggcgggcgagggccggatgtaacatcctaaaaatccttaataataatcactaaaattttgaactcttaaaaaaaaacttttgcatcatgctggtgttattcgtttctctgttgtaaaatgtattatttaagttaaatattgtgagaagacaaatatattgatatgacaagacaaatactaaaaccttaaatatgggaaaatagaaacatatgttggaattagaaaaattaattattaatatatggtgcaataaatcacaagattggaagtgttgaaatataggtaactatctaaaaaaaaggagattaaaccatctaaaaattattcacacaaaaaggtctaggaaaagccctaattgtgatttttctcgggccgctactgttcattgcgcgccaggtgttcgatttgtgtctaacctgaccaaacgcctgacgacgccctctccaaccgctgctgtgccgcgcgcctgccttcccgacccgtgcgccgcaccgggtcgcgccacgccgcgtgggcctgccgccgttcgagccgtcaaaaacccgccccaaagctgcgccgccacgagtgcccgcgtcatcccgtcccctcgcgcgttgaattcgggattgagtgataatggccgccacgacgaccccgcgtcaccctagggcatagtcctgcgccttccctatcgtaggccgttatcactgtcc

SEQ ID NO: 40577 - DNA, 1586 bp, Oryza sativa
aataaagttatatctacaggtggacgggattctccggataaaagttcttacctaagacttgatgggcgacggcggcctgtgatatctatgaagacgtcgtataggagatcatgttgatttccttgctcgcctccattcagggggtgtgtggcgacgttcttagatgttctcgtcgggttacatgagaagcgagtagatcttctctctcgcccttctctctacaacgtccaaaagtttgaaagcaatattatgctgtttgaaagcaatattatgctggagaagagcgaggcgataggtatgttcctcttcgaagggctgacgacgatcgggtacgcttagcgatgatcggttagcattagtcctatcctcaattccgttattggagtcgccaacgtgtaatggtgtgtttttctttctttctttcctgatcgtagcctcccagataataatcttcgtatttctccttgctatatcagcatgaaactttgcactatcttaggtgatggttgtttcaatatatatatatatatatatatatatatatatatatatatatatatatatatatatatatatatatatatgcatatgacttcaaatcactggtggagaaaaccttattagtcccggttcgtaaccccctgtagtttccggtttttaaaccaagactaccaatccgggactaaagatagcgagatcgctatctttcgtcccgggtgaaatagccgggactaaagatcgatctactttttttatatttgcatggccctgttgctgcatggtttatatatataatatgcatatatatgtttcaatacactaattttggttttcacttacatatacacgggcattttttagtatgattttagtaagattcatacatttacttgtctatataaaacattaatttttcaggattgtgtgcgctagtcacgaaaaaggtgcatggatttttcaggatcagattgaagcttcgggcgtggggtctgctttgttgaatcataatatagttcacgtaatcacgcctcgacaaatttatgataggtacagtaaacacaggcactcgtgcgcgttcctgggatgatgatggaccggggttgcagcttggtcgctgttgtacaacaccagagaaagcttcttccctgcgtgccattgccattgcagctggagaaacgtagtagtacagtgttgatagactctccgtgcaaccagaaagtatggctggtgctaccaattcagcaggctggcacagccttaccatgtactaggccgacaggacatgccagctgccggcagcgacgtcgtcgtgcgcaagagctcatgttcatcaccgaattgcttgccgctaaccttccgggaagaaggcggcgtgtgcagatgacgtaaggcagcacatggtcgatggttccgtcgctctcccactcgtgtacagccctttggaaactggaacgagcacatgctttccacacacacaacgacagagacacttctttggcctgtctgctgaaggaagcggacaacttacctgtttcgtgttctcaatatatatatatatatatatatatatatatatatatatatat

SEQ ID NO: 40578 - DNA, 951 bp, Oryza sativa
agagctcaacgtcgtctcatgcgccttcaccgtacgcggcagtagcggtagcggagcactgaaccgcgcgcggcctccttctcacggcggcggcggcggcggaagcaacgctgctacggcgatgatgtggaggcgcgaggtgggagacgaagagaggcgcgagggcgatgccggcgaagcggcatcgggcaccgggcgcaggaaagcgagggggctcaggtcagacgcggcgttccatggagcgtgccgccgtgtcgcggccaggcgccgacgcttcggtttggtctgcatggataaggctcggtcatcggttggtagatttaggtcggctgggccgctgggatgtgaggcggtgggcagcccgcagccgcagggtcgggtcggcctccatgtcacctggcctccataccacctgtctcaattatagccggagtccaaatttcgtccttcagttggtaaaagagattcattccctaacaatttatatcagtgctggttattttggctccctaacaatttcgacggtggtttcattccaacaccgtccatagaggtcgagacgattcacgattgtcccacactcccactcctattgaaacagtacatatactgtgggagtagtagtgcctcccaatacgccattctttacccatacaggcatactctcgtgtgcatgctatgccttgctactctggctagcactcgcgtgccgaagagtaacaccgagccgacacaccagtttgagttgaggtatgtgagttctgccgcggcagtatggcaacgccggcgccgagccgacgcgcacgcgcccgtgctgcttatccttttgcgggcgctgctgggttccgtgattggttgtctccgtggtctttcataaactgctacagttttctcatgtcctgatccagtgagctaaatattgggccttctgtacatcagtacgtccagttc

SEQ ID NO: 40579 - DNA, 598 bp, Oryza sativa
agacaggttccgtccgcaagaaagaaaaacgctgcagtcccaattaacacaaagtggtatagtggttttcaatcgtgcaatagtagccaattatttgacaagatgtttcagagatggcaaagggcaagaggagatccatctatagcctcaaatgtaccatcaccaaaaaaagctcagttcagcctcggatgatcagaaagaaaaaaaaatatcagtcgagatctcctgattttaagcacaaaaatttcggacatcttgctttgacaatgagtggctgcatctctcactttcagagaaacctatcaccctttttttttctttggccaaagaatggacagacaccccaagaaaccgaaagagaaagaaccaaaaaaaaaatcatcagaataacattgcacagcatcacatcttcatcttgagatacacacagggagaaatggtcaagggagccaatgagtttggtgaggaaggcttttcaccagctgcagagttttttactgtggatggatccccacttgggttggcatctactactcctactacctgtggactgctcgtcgcagcagcagcagctgcagctgggggggggggggggggg

SEQ ID NO: 40580 - DNA, 4374 bp, Oryza sativa
agaaatactaaaatacagatagagatagttgattgtacttcatcttggtctattgtaaaaattgtccgatgtactggacgcattcatcaccaagtccaatttaaagatgagagtctaaggattcgatcgcatatagtactgcatttcagtattttcactataagaattgcgtaacgcgtgactgatggcgatgtgtaaacctaatcgatagactagctatactagctaacaacgcgtgatttttggagatttttgccggcctttcacaattaatcaatctcaacacagacatatatagagagagtgttatatacgaacgtacgatttatcgtcctttttataaaaaaaagattttttatgctgtttgtacgagctggattaattctaatactactagtacctcaaacatatctgcatgcggatcgatcagccatgtactaggaaaaaataaataaataattgcatataaattaggatttggttgtactacctttgtcttacatgttggccccgtgcattcctccatgttgtccaagaattattttttccagttacagagctaactagactataccaatgaagattgccggccttgatatataaatgagctcttaattttttaaagtatactatacacagttatttaaaatcaaccaaagcctatcatatatatatggagctcacaaaaaagagaaatattttcacaaaaaaagagaatataatatatatctggtgagaaaaaaggatgggaaactgacctttgttcaaaacaaaattgtataaactgaaaaatggtccttaattagttcgatcgttccactgcggtccatatatacatatatacatgaaagggcatgtagcctagtggttgcagtgacctgagtagtaccccaaggtactgagttcaaatcttcataggagcgaatttcagatttggttgtttgcggggctaagttcctaatttaaatggccgtatatatccggttagatgtagagctgggtaaaaaactatccttctctaaaaaaaataaaaaaatatatacatgaggtcgcatgattagcaatttgtactacaaacgttaacatgtaagcgaatattttgtaaagtaattaattcttttgaagaattatcccatcgtatcataaatcaataacttattaatattttctgcaaggagagacaatgactttttaatattagattgatcaaattaatgagatctaattgcgacggggaaatttgaccacgtttttataagagaatgcataccattaaagtcatttgaaatccacaaggtaggatacgaacatgagagtcccaacaaaacgaagtggggatgttggacattatgtttaaaaaaatagtttaaactattgagttggtccctgtagagaagataccatatcaaaagggatatatagaattaattaaaataagatggaatcttgattagctcgttcaagtcttctacgaatggaccgcatacgacagaaatcatcttttttgagaggctctgataaaagagtcatatttttttacgctaaatgtatggccatcccacttgattaattatgttctgaatacaaatcaaattcaattgtaaagcatattattattatcatctatataaacactctcccatatggagaggcaacacatactacagtggtggacccagaaaaattatactggccatacctattctagcgatcacttcaccatatattttttaaaagaaaacacccaattatgatggaagaattttagcagattttagtcggatttttcaaaatactattcaaatgtggtccataatttatgaaaaatctataaaattcagaataatcaattccatgacctaatctatttagctgttcttctttttcccccaatgtttctcttcttctagtcctttcatcttcccctgatttgatttcttaatgattacaagatcaagacaaaccgtgatcattgttatattctattttctgagaggattctatttttatgttctttgattgcatactatatcctagtgttttttcaaaaaaaaaatgggtatgccggtgctaacccggtacaccccttaggtccgcccctgcgtgctaaacacaactattatgatggttctgtatagattcccatcaacttttgctttatctagctgtttatatatgttggttgaaatggaatatattttttatgtattttttctgattatagtgctttcttttcatatatgtagggttcaccaattaagctatgacattttttttattttaagctagagtaattttctcatgggtgaagactattttacccccccccccccccccattcctatcaactacaccgttcaaactagtctggaattcagaccttagctgtatgaaattagacatcacgtacccccacccacaaactatcaagtgggagtgtgtgggactacatacacttaggtcaagctatgaacaatagaaccaaactttttatcatctgcttttacttatgtactccctcagttcctaaatatagttaagtaggagggtttttgaaaggattcttaaggactggtgtgcaaggtctaaaatacctcccattatagtcttgggcaatgtgaagtgcatggccactctggtttgaaggatccggctcctctgcctttaggtgctaaaggcatgagcatagtaatatgtgccttgcgcaacagtgtggaacatatatttgcagttatttactgtttatgtgctactgtactggactgtagtgattgatctcgttcgttcactgtaaatcggacgactgaaaatattctaaaggcacaacactgtgcttccctggttgaggtgatgtgaacaactaggggtagtatgggaaatttagtgtacaatgtcacattttcatatcctagttagccatacttgtaaaagtttcgaatctgaaaggtagctatatttcgagatggagggaggcactcaattagtaagatacataaaatatatttttgatggcaattcaaaaaaattaaattaattgtagtggatctcagggtggagagatggggacggtggccgtgcgactggaagaggatggctcgatgtatcctagacagcaggtcagcgactccccaagttccaatcggcttggtttgttgttttgagtctttcaacacatcggctcagcactaaagaagggtttggctgcagcgggagagcaaacacgcgtcagcccttggggtggatagcgagccagctcggctcagctcggtcaagctcgttaggataacgagctagctcggctcggctcgttatcgtaacgagctagaaacccagctcggctcagctcgtttggaagctcgagctagctcgttaggctcgcgagccaacccatccaaaccatccagttggcagatgagaaggttggagttggggtcgatgtggaggtcctttcagatgacactgtggagaaggccgagcggcaggagaccccgaacgccatcgcgtcgtcttcccctcccgccaccgcggcgagcaactggagcttgtggcggaggaggagcttgaagaagatgttgtagatcttcacgccgacgcccggcatcgcctcacctcacctcacctcgcctcttgcctatatcccacggcgacgacgatggcgcggctcgggcggagccctaggctgtgcgggtgcggcggcggggtggggaggaagatgcggacggagagggaggagttggggtgcggcggcggggtggggaggtccttggaggcgacgccatccgccgcggagaaggccgggttcgacggcgccgtggcaggagaccccgaacgccaccgcgtagtcttccccgcgcgacggctggcggtggcagcgtgaagcactgtggtgccgtgcaacggctggtggcggcaacgtgaaagaggatcgagtgagagagtcagagagatgccgtgtgggtgctagggttttcctctcctcaaccgagttgggcttttgctgttcgagttgtgttgtctgttgggcttctccgcggctcgttaagactcacgagctagctcgttatttctaacgagctttaaagccagctcggctcattacgaaatttaaatgagtcgagccaagcttgtcacgagccgcacgagttaacgagtcacgagcttttgtccaccctagtcagccctctacgcagtgtcgcacatgaggcgtggtgcggtgcaaagaattttcttctggcaaaaactcaaacttaaacactacatacttcacagttcacgcagtcaaccagccatagcttgcaaaaagctgcctccagcagcaatactccccaaccacaagggaaagggatcctctgacttgcagttgagtgagaggat

SEQ ID NO: 40581 - DNA, 612 bp, Oryza sativa
tcaatgaacaatcctttcaaagctctaaaaggtatgctccaaacagtaaacactcgccaaatttgacattctttgtagctcttctccctattgtgatggtccaaatataaatgataggctaagaagaacaactttcctaccatttttggcgttatagtactatatgcatctctaaatatacgacacttttgactttattaaattccgatgtttatgaaactttaaccataaccatatgtttctgttagaaataatgataatattcaaatatatattacctttgtttatgtattaattacttcccgtatgtgttatatctcgttaccttctgaaatagcgtaaattaaaatttttgaatcagtatatttaatattttatttagtaacaaattctccttcttagtaacttctctagcaaggtaaatgtgtgaattccacctttatcaccagttaattcttttttatatagttacagcttactaaatgctctatccgtttcacaatgtaagtcattctaacattttccacatttatattgatgttaacgaatctagacatactccctccgtttcaaaatgtttgacaccgttgactttttagcacatgtttgacc

SEQ ID NO: 40582 - DNA, 587 bp, Oryza sativa
taattggggtggtagtataaatagatttgaacccttcgatcaaatgaaattaacggttcagattaatttctactatcagtagagagcattgtagtgaggctcacatattgcttcacttcaaataaaatcaatagtactatgactataatatgagtatcatgtacaaaactagttaatggcaaagtgtgagtgtggcaagtggtgaccaatgaaggagaaatgggaataagaatgagctattacatatatagatacaaattttaacctaaacttattaaaatattaaacacctatgtaaaatctaaacattttgtgggtccctaaattaaaggtagtccctcttcttgacccgctaggctagaaggtctgtccctgaacctctttggcctgagttcgtccttgtcaatccttagcaatgcccaatgatcttagctaggaagggacagcgactaggtatgggcaggatagaaagcagagaaagacatgagggtatttgcactctattgaaagtttgatggcattcaactttggaaattcggtggaatatacccactagtgcatgcctatgaataacgtggattaattaa

SEQ ID NO: 40583 - DNA, 737 bp, Oryza sativa
gtgctgttttgccatgttatacatgctggcgtgaaaaaaaaaagattctaaaaaaagttgggaagaatttgtttttaaaattaactaaaaaaattaaaaagataacgtctcgtcacctcgcccccaggcctcgccgccgggcgcgcccacactgcgctgcgctgcgccacacatgtgatgctgccgcttgcgtgcgtgcgcgccgtgcagcgcctcggttattccgcgcgtttctcctcccccttcccctctcccccgcgaggcgccggcgcatgcagtgcacctcgatcgttgcggtaatcgcgtgtgattgattgactgatttgctcgtcggatttgcggctcctttttgtgcgtgttagtttcggtttgtggcgtaaaccatgtgagggcttcgctttttcttgttttcgtttggtggagggtacatcgtgcgtatgcttggactggagcgttgatttgattaacttaacatggtttcctaggttataactttgtcgactagtccattagtgaagtggttatacgagcaggttaaatagcaggctatatgccaactatcgagaagaaagaagagagagatgagcagcgggttacaggtctgtagccagctgcagtacgagcttcaaaacgaaatgtatctatgataggtgtgactatatactaatagtttagtatacttttatatgttactattgtataaattggctattaaattgattacagatgatttggag

SEQ ID NO: 40584 - DNA, 709 bp, Oryza sativa
cttatcgctttaggattatcccaattcaagcattttaatctctttgaataatattttctgtaaactcatatagttttacaccataagatttatatttttaaattcaccatgagaaatacttttatgcgtataattcacatgttattgaatcacacgaataaaaattaatggttataaatatatttgatttaggataaattaaaatgataactataaataatttgaaacgtatggtgtagctaacttagacatgcatggcagcagctggatgttgttgctataacatgtttgaaggcatagccagaattttcttgcctaagagcatgttggtgcagtactggcttcatcttcatctctcttgaagttggggcctaaccaaacaatttcagttccatctaaaatagtagtggagctaggtttagactgttctataactttactacatacctaacttttggagttaaatttaggaattggagttctaccaaacggaacttaaattcaactagtgtaatttacatatttttatctttatctcatactatatttggaggttttgaaatatatggtatgttcagattgtactcaaaataaactttatcaaaatttgacaataccaaaattttgacaatttagcaatattgccaggttttggcaggacttcttatatatttatcagagtttgataaaaaagcagggctgcaggaat

SEQ ID NO: 40585 - DNA, 3929 bp, Oryza sativa
ggttgtggtacataaatagctaaataagtctatttaaggtccctattctttgggcagtgacatttatatgtctatttttagtccctatactttgtgtgccgggcctggcctatcggcccatcgtgccgggctggcccgaccgtgccgggccagcccagcgtgccgatagggagtcctaggtcgggccgggccgacccaaggccaaaaagccgtgccgtgggccgggccttcgggcctcgggccttatggccatctataggagcctgcatgatccgtgaaccaacctctctcccatcacccacatgttagtgcccccctcctgttgagcacatacactgaagcagaagatcagaccacacaaaaatgctggccatggcttccgatgactttttcgagggctgtcgccagacatatcgctcctacccgccggaggagagcgtgcggagttcccatcgccgcctccgcccccacggagtttgcctgccgagaccgtccaagatggcggcccttggtatcccgtcgaggacagcggcgggaagagcttgccatggagacgccgcttgaggagcccccgtgctcggtctcctcccacccttccgctcgtcttcatcgtaggggctaccatggccaagaaggccatggcgcaaccatccccatcgatctgctctgctctgccccttctatcaagttgggctcctagtgacaaaacaaaacgggaggaggtggtagtgtagccccatgcatatgcatgcttaatggcatgatggaacatgcaggatgcagcattcgctagtattttctgtgtgctgttgaggaagatagcaactcaactcatgaactgatggtgttaccagaggcaaggcaagcgtaaattaagtagtcaagtccagggagatactcctaattgctttgtatgatagatgaagaggtcaagttcagacttaagggtttttgcgaggtggtgatagcacagtcctatctatctgtaacagctcaagattgatatctgtaacggctcagccaaccgttactaagcatcagtaaaagatgtggctaatcatctgtaacggctggaggcccattacggatgaagacttgtctgtaatgggcaagattagtagccattacagatgagagaaacaccccttgagggtgccccctctcatatgtaacagctactaatagtcgttacaaatgtcaacatattttttttaaaaaaaaatcaaattcagctgtcccaggcaatgcaagcatcctaatgcaatgatttacaatcactttgcacgaagtctggatgaactcatgacacttcctgaacttaaacttgaacatgaaaagcatcacaaataaaaaatcacctaaaaaaccacaaacatttagaagtcagctgcctccacgaactcaagaagacaagaacgtgcgagccagcgcatcgtcaccacaccatcatgagccatcgtcccaccatccaccaccaccatgagctaggggaggcgccacgatctagagggaggagactcaccagcgtcagatccccgtggctatgtgctcgtcgtcatcgtccacctcccattcgccaccatcgccaaccctcctctcgtcgatcaggatcgaagttgatgctagagcattccgtcgaacacctagtgggcatcagggtcactgctctaatgccatgattagagcgcccttctgagcacttagcagccatcggagcacgcacctcaatgttttggacggatcaaccatctccattaatcgatcaacctactcatccattctacgctaagcatccttcattccccttgtaacatatatagtgcttcatcccagttgatcttctcctgactcatcacaagagaagaacgtcttcctcgaacatctccaatgggcttgacatttagtcaaacagttggcggaagctgctcggatgaacactttcccaacccgatccctcatccttttggcatggttgcctccccaacacctccatgataaaaatcccagtaaccgaatggctctgataccagtttgtttataaccctttgctccaattcaaaacacatcaatattcattacatctctcaagtgtttgggtgtggaattgaagaagaagctaggaatacagttcatgtagctctaaaagctattccctccatccctaatgtttgacgccgttgactttttaaaacatgtttggccgttcgtcttattcaaaaaaatttaagtaactattaattctttttctatcatttgattcattgttaaatatacttttatatatacatatagttttacatatttcacaaaagtttttgaataagacgaatggtcaaacatgtttaaaaaaaatcaacagcgtcaaacatttaggaaatgagggattaatatagaaagctggaggtaggaagaagatagggaggaagtacatcaacaagggtgcccaccggcagggagacgactgcacgtcggacgtccgacataataaaaaaaatcggacgtcgcgcccagctcagcatctgtcacacgcaagagcgtccatctcagtctctgtcacatgcgcaattatactggacgaagagatatggcgtagccagttacttgtagctacatgcatgcttagtagggtagtacaagctagtagggtaagtataagacttttttttgccaacttttaaaatagtttatcttttaaattatttctccaatttacgatccgattacatcctttaattcgttgcaattaaatctttaaaacaagaccacacatgcatatatttcgatgaaaaaaatattttaacttttttaatggttttctttgaaatgttgcacatgttatatttaaatgtttcagctagtatacatatgttgtttcattagttaatttgcaaattttgtacgttgttttccttaaatgtttcactgagtatttaataatgtttcaatagttatagtttaatactcattagtcatataaaaatatttgaacaatatcaagttttttgtaaatctcatatgacttttcttgttttgctctttaagactcaatgtttcatattggtggttaatggtgttgcagtcgatattttataatgttacatttctctagaatattttatacaactgaaacaatttttttaaggggtgaaacaacatttattttttttatgaaaatataatcgcgtgatatcttgttataaagatataattgtaatgaatacaatggtgtaatcggattaaagaacaaataattattttagatacaagttgtgatccaattgcaccgttgaatttgttgcagtgaaatctttacaaagagatctcttatgattatattttgtataaataaagcatatatatttgtattactaattgaaacatttctatattataaatagaacattgatttgtaaccgctaaaacattacaaaatacatgttgaaatatcgaaagaacaacacgtgcaacaacctaaatgacctagtgaaacatctgctaaaacatccaaataataccacatgcaacatttcaaatgaactagtaaaatactttgaggcattcaaataacaccacgtgcaatattttgaatgagctagtgaaatacgttctgaaacatcacaaaaataccttctgaaacatccaaagaacacgacatggaacattccaaatgcaatagggaaacatcacaaaatacctagttaaacatcacaaaataccaagaaaaacatcaaaataatacaatgcaacacttcaaaatgcctagtgaaacattagctacaatatcacaaaatacctcctgaaacattcaaagaacaccacgtgtaacattaaaaaaatgataccatgaaacatcagccgaagaaatcacaaaatacctcctggaacattaaaaaacaccctgtgcaacatttcaaaatgacctagcgaaa

SEQ ID NO: 40586 - DNA, 1330 bp, Oryza sativa
aagacacaagcccaaattaattaagctgacctatatcaatacatgttgacgctgattcttttgcagcctgttaatttcaactgttccatgccgtccgcatcctccacaagaatccttcatgggacacgttctgatgactcctcgccgccgccgccggcgtcaccgcccagctggtgaccatgatcatcatcgtgttagctgatcttgcggcggaccagaggaagaagaagaagagcggaagcatggcgccccttctgatcgtgctgctgctgattgcggttgctgctgctacaggatgtgcagctgcagatgcgagaggctcacgctgcagcaacgatcccaacttacccaggaggatccgtgcttgcggccccccgtcaattaagcctcacaactagtatacatacgctactgtgagctcgatgcagcacaatatatactactaaaataaagcttgtgctgctcatatatactatataagtaccaatctcgatcgcgtctatcatctaaggatattagtggcccactggcgcgcctaaaacaaattaatactttgttaattaatgcctcatactaccttgcatcgatagaagcttaatttctcacatttaaataaggtatggcacttggatgatatgtaattcctgcattatttcagtcctcttagttttctccattctcaacgtggatgtgctgcattattgtatgtgcatcatcaacctaaattcggaattctagtagctagtgccgaacgtctcgaataatggtacaatacacacaccgacaacatcaaataatggttcatgtatataagatcgaaatggttataatatgaaatggggagtgttatcgtaatcgaagccatcctaaacatatggatctaaattaatttgtaacctgcattttggagaagctacctgatgaaatgttcagagcactgaatatactttctacagcaaaacaatagaggaacaactcaactcaaaagggcacgattttgcgcacaaacacatgctcagctcaatatatatcattaactccaatgtaagatccgcaagagaatagtctaatgggaggtaaaggtaccactaaaattaaagtatttatgtggttccttaaaaaaataatcttaacgaaagataaccttataaagagaaaatggaggggaaacaagcaatgttgttttttaatacacaagagaccatccaacatctctttctttgactgtcatgttccacgttttgcttgacgatgtgtcttctttgcttcaatatcccacctccttacaatgcaaaagatattattggtaacttgctaagggggctgcagg

SEQ ID NO: 40587 - DNA, 2641 bp, Oryza sativa
cagcccgattacatgaaagaaacgatatatgcagtaacaaactacctaacagaagcatatctataacaaaccaagtttgttactgcatggatgaggatcggcaaagcctgatctggatcggccaagcctgatccgagcttatctagctaactaacatagcaaaccctaggaatcgccttttttaacgaggaggacccatatgcatggattcgagctcctggtagcttcatattacgaatcacccctcaactttcgtatgccatgcacctcttctagccactaaatagctaggaagagcacgtcacagaacttttgcaaagaaagagagaatgaaaagaagaagaaaaaaaacagtaaagtttcctttccaaagccatggcctttccttttccttttggctctcatgtgtgatattataccatttcctctttttttttctctctctctttagccatggaaagagggagatggagacgagaaaaatgtaaaaggggaagggagcaaatgggaggcgttgggtgtgacgaattttgggaggaatttagcctgtcctgcgcgtgcgtgcgcatggagacgcggtacaactggacggtgctgcttgtgctggcctggggctaagctcctctcgtggttggctgcgagtggatccatccaaagcgacggaccactcgtgagcactgaaatgtatgggttttttgtggttactggctagtgagcaagtgatgagagatcgacctcgcgatccagttgtgattgtgcacttttgtgcacattcttcccgggttcaaacatgtgttcttgttttggtactttggcattggtttttaatttgtttggcttgaagacaaatcaagggaccaaatggggtttgatgttgtcgttttgtttgttatcgtggtgtgtgtaaatgggctgtgtattttttctttacctctagagaggaacaaagagagaaaaagtctcatttttccacgcgtttactttccgaactgttaaagaatgtttttttaaaaaattgataggaaaattattttaaaaaattatattaatccactttgatgtttaaaataattaatactcaattaattattttcttgtcaccttgataggctataatgtgtcaccttgttttgttttgtgtatcttgtcaatcttctcctttcctatcatctcaaacactctcaatagaggcgcattcatgcatgaggtttaaaaagttgctagtaagttaaaatgtttagttacttcaggaaaaatgttttactctattttttatgcatgaagcaaattattggttttggtcacactatcgaaaccagcttctagcctggctgggcagctgcctaggctcgatggccatatgcgccatatagctgttcctgtctgctagaaattattgtgaaaatagaaataagctagtaggtgatgtcccattgtctaggctggtcatggcacagaataattaagagtttgcaaggaagagaatagtgaactattattatcaatcccctatatatacgtcaccatcacgttatatacagggatatactcttgatcctcatacttcattgccaaatgtatgctaatttttatcaacaataacaacgaacacacgggttggcgtctagtgtgtgttaatagctggtcgtgatgtttttttttaactataccaatcctaaaaagtatggttgtttttatgtgaattacagtgatattgttctttttttaaaattctaaaatgagggtaggggtttcaccaatcctcagttcatacatttgcatattcaaaatgatatttatacgctaatactgacagtatccaattaccaaattaataaggtagtatattgcttaaaaagtttcttatttgaatagtgaactaggcatgggctttgttagtactttaaattttaggagacatgggtttgtctagtcaccttccattactccttcgaggctttttacttactcgttccgtttcatattaaaaatcattttgaattttttatgataattttttttcaagtttaataaagcttataaaaaagtgtagcaatatttttaacccaaaataaacatattatcaaaacatattaattgttcattttaatgaaactaatttgataggctaaactttttataattaaacttaaaaaatactagaaagaaagtcaaaacgacttaaaatataaatataaactaaggaaagaattaacaaaatgttgtcaactgcttttaccacaggggatcaaggatgcaagtacttcttgtgcgatcaataaaatatctgaattatcttaaaaagatatttgtaaaatttcactactatagaatctctttctatatgcggcaaaaagtgatttttgcatgtggtcagcgcaaacgcatgcgccaaaagatctatgaaaatcagatattgcattggcatgcggacagcgcaaccgcatgcagtcactataccggccacatgcaaaaataatttcggcaaaaaaataaaaataaaaacccaaatcgtcaaagctctagcccgccgctatcgttggccggatccccgccacccgccatcgtcgtcatcatcggatccaccacccctactgcccttcgtcattgtcgctagcattggatctacgtggggcggcgg

SEQ ID NO: 40588 - DNA, 539 bp, Oryza sativa
catatctcttatcttctaaaaccagtgtaaatattgagagtgattttgaatgattggcgctgatgtggcactaaataaaaactcatgtggaacccgcatgttagtgaaccaaccactctcccatcacccacatcacatgtcagtggcccctcccattgagcacaacaatgttgcccatggcttacgaatatcagggtttacattaccggttgacaattaaatttcgagccccatcggtatcacggttttcgataaatttcgaccaaatctattgtttaacctttgaaattccaatcaaaacttaattttgagccgtgtagaaacgtcgaaattttgcggaattcgaccggttttcgtcggaattataaaccctgcttacgatgacttcttcaagggctgccgctagtcgtcgctcctgcccaccgaagcagagcgtgcagagttcccatcgctgcctctgcccccgcagagtttgcctgccgagaccgtccaagatggcggcccttggtatcccgtcgaggacagcggcgggaagagct

SEQ ID NO: 40589 - DNA, 694 bp, Oryza sativa
cctaggcaacctagatcaacatattggcagtgatacacaacaagcacacaatagatcctagatttacagtgttaaaattatcacatcatcaatacagtcaaatataatcattatcctgcatagcatgcaatctaacacaaagcatcaaccaaatctaacagtttgaactttaaccatcagtgagaacttaaacatggctaagttatataaggttatcagaatttttcaataaccatcaaagaaatatttaatatttttatatgcattcatgatctgtactgaaaacaaatcctacataaactatgaacatatctcaaaggtggaaaatagtctaatacccaggtaatgtacctaggccatgaaagattttcccataactggtggttctttcaaaaaaaaaagaattgttcctgcgatcagtattttttagtagaaacatgtaaggatgaaactactctgcaggtgtcctctaagttatcatggcaaattgcagcatgaatgcacacaaatacatgagaacattgcagaacaaaaatgtggaaaagaaacataaaaataatgcaaactgaaagacaggaaagacttacgtcggtaagagatacttgatgaactgaattaaatctgttttggggatttccaagtcagcagattttagttgatccttcagctcgtccatgagcaaatttgcatccct

SEQ ID NO: 40590 - DNA, 513 bp, Oryza sativa
ttggaagaaaatagaaggaaaaacgcatctggtaaagaaacaatgaaaaaaaagtggcaaccgggactgccgcttttcttctttttagtaccgggactaaagatcaacttttgtcccggttattttacccgggaataaagatatctatctttagtctcgaatttggactcccggttgtataaccgggagaacaggcacttacgaaccagaggtaaagatgacttgtgcagcggtgcatcatcttaaggatttgtaccgcctttttctaattttattttgcagcacttttttaaagtacaaggaggtaatgcaaatcaatattagaaagaatggtgtactttctcaagaattgtgaaaatacttattgtatagaagtaagactaaagttttcatatcctataagttcgtttagaaagggatcgcataataggaatacaattcccttagaagggagcatcccacaacaatagcatctctttttaatcaacggtaatgtggcatctgtaggaagaa

SEQ ID NO: 40591 - DNA, 541 bp, Oryza sativa
ccccccccccctttttatctgtttcgacgcctgatgttttgacacgttttgttttcgcagtgctgactcttgctcaggccgacaccgaagcccgtaggatgatcggcgatgtgtcggtcactgagtacagccaactgctcacgcggcaggtggccggttgggcgaatcgggtgtatgatggtgatcttccaccccgggcaaaacccttcaaggccgatggcgacgaggggacgtccaggaagcatatgcgcgggcaagtgaagctggcccccgcctcctccgactttgatgccgatgaggaagataatgtcgaagaccatgacggcgaagaggaaggggaggacgaaggggaggcggaagttgcggccgaaaaggctgtggacgaggacaagctttatctaaatcacgagcgatcctaaccgttcaatcgaattcgatgactcttagcacacctgtaccgacttgggccgtggcctgccacatgggcccaacgcacttaacaggccagccacaacgtccttctaattatgggcctaattgg

SEQ ID NO: 40592 - DNA, 704 bp, Oryza sativa
taatataatctatgcgaataattgcattcatagatttacaataaatatacttgtgttgttttatttaaatattttttatgaatatattattataaacatgaatggcaacaaacctatatggattggagactttgtctgacaagttaaaaaaatcacaaatagtttatagtttattttgcaatagttaagatcgtaaatggatatatatggtaaaaccaacatttcaaagtaaatgcatttctgaaagacattaaattaactcgctctccaagctaacaaatccggcctcgtttttccttcaggaatgaacaaacctaccccgcttaagacatttttttaatctcctttactctttacttataaaataagggaagggctggtgcaacactactagaaatctcattttcggcgtcgtaggggataaatttcgcaggcgtgcacgtaattcggagccaaaaccccgccggcaaaaatggtacctggggtggagggggcggtccgcctgcaaagatggatctatgtaggcttcttcctccccgagccctgttcattctccccgacgtttctctctcctaaagtgacttaaatataggggggaggttttgaacttcaaatcttggggggatttttctacggtacttagatctactcatttccacactaggaatgcattttttttaagcttttaaacctttaatttgcga

SEQ ID NO: 40593 - DNA, 3353 bp, Oryza sativa
gccttagctaatctaatctagtaatacaatttagccgataccggcagaaaccctaaagcgagagacaaccgatagagctaaattgggatactaaggtggtgtttgaatttcctgaagataaagatgaagatgaagataaagattaagtgtttcacgtaaaacgatgtggtaataacgtgtgattaattgagttttaattattataaacttgaaaaatggattagtctgatattttagagcaactttcatatataaagttttcgcacgaaacacgtcgtttagcagtttgaaaagcgtgcaacgagtatccaaaatttaatcctgtgcatgcagaagaaacgaacagggctttaagactagattaactgaaacatatgataaataggcaggcaaatatattaatcaaatcagagcaatccaagaagtccaatgtactgatgctgaacggcgccaatgtaaccaacacaattgcctgggccggtggaatattggacttaccccttctgctctgataaaaagtaaaaaaggtaaaaggtagcgatgcgccgaattgtatttgatcatggagatagtttacaatgactctgggtacatatatttatacccatggggaaatactagtccttacaggacaagaaagaaacatttctaaaaaaataaaaggaaaacataaagtacttatgggacacttgaactcggtcacttctgtataagctattaattttcttaaccgaatatagcaggaatccgactattggcggcgtgataattctcttaggggcttaccaaatttcactgttaacaacggcccattaatgaaataaattggaaatgaattataaaagaaagtgaacactcactccatgaattattagtgacggcggccgataaaagaaagtgaaccttcactcatattgaaataaaaaaaatattagttttaagacggcgggcaaaaaaagaaagtgaaccttcactcatagtatgttgaaataaaaaagtgaaacatcttctcagtctctatgggggcaattaacttaaaataaaattaaaacgaatcatcaccttaagcatcatgttgcaatgaaatttaaacattgtctcaagctcaattagtgaaataaactgaaaagcatttattatgggtaaaataaacttaaaatcatttgatatgggaaatacaaataactaaaacatcacctcaagctacaatcatctcaagcatatgttgaaataaggttttatatattttcatacaacccgtcactaattacaagtaatatgagaagagatgatgctattaatatttagctgaaatatgaatggaaagggaatcttccaaaaaggttgtcatccaagtgagatcaaaatagtttgcaatggtggtagcacgcaaaatattgtcaagatctcctaaagatagttatagaagtatttgaattgttattttatatgaataatatatatgaatagctcatagtccatattgccgatgagttagatgccctctgtattaatctatgcagttttttctaatatcccatcaactaattttcagttcttttgatatatgactagccgctatcctttgcatatataggtataccgttgcattgctagctcaatagagagcgaccacaaccttatatacacacacccgtttatatatacacccgtttacctaaaccatgtcatgactcatgcaactcagattgttgatcatgcgattgtgcggagatcacggtgtcacgcaaatgaaaaaacctcatcaacgcgaaaggcccgaaggatgaaagtcggaatatatatattttctacgtctctcatatcaggggaaggctggacccgtacgtgacactctgcttgattgtctgctccctctcgcgacactagccgtcctatgcaataaaatggatcggtatgcatgcttagcttgagcagataaattacacatcttcagttcctaagaaactattggattatcctttggaactcaagttgctatgctgggtaagaggagtagatatcctttgggtgtgctacaacattctcgccggtcatttaatgttacgatagaggagcatgatactatgcttttagagttggtagtcaaggctcttttattccgttttattctgttttgtgggtgacagtatatatatgcttacttgttagaatctagtaagtgattgttttaagtgtatcagttggtttctttcttaggttaggaaggtagggattttccccgttacctactatcttactccctccgccccataatataaaagattttggtttttttgactatacaattgatgcataaccaaaatctcttatattatggggcggaggtaatattattcagttaaaaaaacttgttggttgtgtgtcatatggcaaaagtggaggatgtaatatattttcattactggaaaaaattgcccgtgcgttgcaacgggtgaatgctattttaatcttattattattcactgtgaaattctctatgagaattcgcttggatatatgtttttctataacatcatgccaagttagcatgcaagttttttttacagatatttcttatacgattccttctgtatttccaatagcgaacgaatttaaaacccgacttaaatatggatctgtatttccaaaaacaaatgaacttaaaaaccgtctcatacatggatgacgtaccaaagtaccaataaaaatgttttaagattggaaaaaaatgtacatggtccccataacaacaagctgagctctctagatgataccgcaccgttgttgcttaatttaactcacgtgattatttttataaaaaaatagctggtttaaaacaatagtaaaaaataaatttatcaactgcacctaatatccgtcctcgtaaatataactcaaatgaacaaaaaaaaaatcatttcaggctatcatagggaagtgaggtatatgatatttatttctctgtctttatttatttaatacataaaagtatgtaaataaattgcgtcaatatcaatcaatttagaactcatctttttagcaacagtttttcaagatttgcttttaaaaaaagagagcccttaaaactttaattaaaaaacaaaaacaccatactttttaatttacaattaatttgttagacatgttttatacataaactaaagctccattagatagtatgggttgcgaagtgaacataactcaactggttaggttctttgtagtggaaccagcccacccgggttcaaatcctagatttgacataggtgctcgcatttacggctaattattctttcagtggtagggttcaaattctagatttgacacgggtgctcgcatttacggctaat

SEQ ID NO: 40594 - DNA, 2013 bp, Oryza sativa
ggtttctttggttctttctttaggttagggatataggatttgaggtcctattccaagagcttgtatagcaataggagctactgctctcttaaacattttaattttattttttattagatagattgtgtagtaatcataagatctaaaaaaataaactagtatattagctaaaaactaaaaacataacataacttgttcaaattctcactatatagatactctatattattcgtgtaaaaagaactcttgaactataaattaagtgcttactccctccatttaaaaaaaaacttaactttggaggagatgtgacccttatgacaacaaatttatactaccatttatctagattcgttgtcataggaggggaccttctaggttaagttttttttagacggaggaagtatatgataaggttttgactccatctctcttaaaattgtagcccaaccaaatgtttaagcaatatctgaaggagataaagtgggctgaagtgatatgaaaaataaattataggggaaaaatagggtttggattgctccatactttactctagacttcactgttagagttagatttagaagttaaaatcatgtcaaacatgtctaaaagtattcaccgcttccaacaaagacattagatcacagaccaaatggcctctatgtgaggaccgagaaagtgactttcggagacagataacccagtttcaatagagttcatcggcagtgatgtgtattaggggacattctttttttctctgagtgtagataaagtactatcgctcgtacttcctaatttaggattcataatttcgactaaattaaagggtgtgcatatcaataaaataaactgcgattgaatttgactaataatatttcttataaaattattgtaaactccacatgttaaaaggagcctaaaagccatcaacgtaacaataggggggtaaagatactgctcgcaccgaccgttgcttagttcaactggtgcgacgaccatcatttattacccagtgtgcaggctacagagttatttttttccgaatcacttgctcgctagattatccgttagagcaagtttaatagtaccgctatcaactgacgataaaaatgtacatgtcatccggagatagaaaataaagatgatatgtataatagtaggctgctaatctacctacacacttctctaggtagttaactttttctattttttaatctaacttgctactctctatcctatcccgtgtgttctgctaatggggccatagctatactattggagaaaaacaaccacaatattgaatatgcataatttcttgtgctatagctcggcgtttgcagaagcgcccgttgccctctccctctagctttctctctcctccacgaatgaatttggatgacgtggcactcttatcgcccgctgagtgtgccttattagagcacccgcaatggtaaagtaaggtgctatctataaaacatgtacatctcagcaatagactagattaatagtaaaccatctcaatagtatgtctacatggggatctatagctctctaatacattgtctcatttttctctatagactatctccaggttagtagatagctttattctctctcttcatttaatctcttccaagtaggaaaatatgctgatatgaatctcttatagagagcttatagataataattatgggtgtccttaaacttgctcttaaccatgcatggttaacgctccctcattccacggcttgacatgattcatgtcagcaccccatcaaatattgaatgcaagcgaaaagttccgcgcattttttattagttattagtacttggttgtctaaaatttttctaaaatatttcattcctcacggatccgcattgataattaattgatggataagaatttttttaaaataaagcacaaaacagtatgaaatttcatattgatatgttcaggaaaaagtaaaaggctataattagaaaaaaaaaaagaagccacccaccacatgctag

SEQ ID NO: 40595 - DNA, 859 bp, Oryza sativa
ctaccatgattcctgggtattcccgggaatacccaacttatttttttttatcaaaaagcaagtatacttctagtatatacacatgtacacatattagtgcacctaaatcctcaattcttcgatccatacacagcccaaccggcctcttgcaacgcctcctaccaacccgacccactccgtcatgacccatttatcatacatcagttgacccatttagccaccactcttctagacggccccctctcactctccctccgtgacccatccctccctggctcggctccttcgcgccgctccccatacctaggcggcggcgcggcgaggaggtaaccggcagcgggagctggaccgtgctaccgtggagggcggcggccggcgcccgccactccgccaagctcaggcggtcaggccggttgggtggccggcggccgcgaggggcaggggcggccagtggctcagcgcttagacgggaatacccaactttgaaatcctggatccgccactgtctattttgctacttcacacaccgtcacaaaatgtcacaccaacgccactacaccgccattgcttgaaactcctaattattagttatatgacggcatcgccattgcttgacactcccaattattaattatatgacaccccattgcttgacactctcaattattagttatatgatggcggccaataaaagaaagtgaacattcattccacgaattattactttatattgcggcggccaataaaagaaagtgaaccttcactccacggctgtcgacgaaaaatctgcacttggctaccccgccattgcttgacactcctaattattagttatatgatggcaccgccattgtttgac

SEQ ID NO: 40596 - DNA, 611 bp, Oryza sativa
aaaggggatggttttatgatgtcggtatggttagtgatgttgtttttgttatggtttaacagagcagcgtcggctcatgcagatcaggtccaaaacgtgctatctgaggttttgagaggcataggcgcaaatgaggcacgatacagttgccgtgctgtagcagatggctatgttgggtttgctgaggcaactgtttatggtgcaagaggagttggagagccttttgttgttcgtgcacagggtatttcagctataagaccatgcgatgcggaagaaagcgctgcacatgctttaatttctgttatcaagaaagaatgtagtgtggagttcgatgatacaaactggtttgacatgaatcactatcatgttgagacagagcgactgaagagagctcttgggtgagctaggaagaaatgcaatactcttgcaaagaaggcacggttgctggaaatcggctgggatagagctttagattcattgggttctgtctaccaaatatgtgatgacatatgttcttctgttctaggaggtcctgatgctgatgatcttagccatcctgaggttggagtattataccatgtgcaccgtcttagtgaatatgctgaatcttt

SEQ ID NO: 40597 - DNA, 678 bp, Oryza sativa
tgctcaaaggagatgaataataacttgccttgctccaacgcaaataaatccgagataggcaacctgattatccgattctcgaaataccaaaggttgccatccaaaataaaatagactctactaagaaagacgaagaaccaatttcaataaaatccatagaatagcaagaaagagataaacagttaggagggctagggtttagggtatagtctatctcttttatagggtatatggattactgtgctaatatcttatgcggaggttctagagagttggaggctagaggggattaagcaactactatcgcttatatttcatatgtgggtttgattagtaggaggatgggaagtaactagtttggataatggtattggttaaaagggtatgtggttggtattcattggcggtagctaggtttaggtcgtatggaaactaaggtctagttgtcctcgagtcgatactgaaataggatagcatatcagctcggctctataattttatgtgtaggttctggtaggtggagagtaggtggtggagagtatggtggataggcgatactggtgggtgtggaatttggatgacaactggaatttgactgggaaggtattagttagggtttggttatatgctagtcaatgctagagcataacgactagatttggtaccttctctagccgg

SEQ ID NO: 40598 - DNA, 675 bp, Oryza sativa
aggcggctcaggttgggccggcggaagagagaggaaggaaaggaaggaatgggccgaaaatggcccaagctgaggaggaggattttattactttcccaattaaaataatcacttaaatgatctttgaattattaaaaatacttccaatgctcaaataatttcaagaaaaatcctgaaaatacttggacactcaaagtacttaaaaaaattacaattagaccatttaatgattaatttaatatgtgggtaattactgaaatgctctttgtatgattaaaaattaggaattgagctccgaaaaatccgagaaaattccagagagtataattaaccatggagaatttaataaaaattaaatccatccatgctttatatttaggaaattttatttcccacatttaacttcacttgtaaattaatgaacatttaatataaattctattattaatttattaaacaatttataaatcctgaaacgaaaatcaggatgtgacaatctatgtaaccgcaatgcaaatagttgtatcatgttcaaattgtactactatttcttcatgttacataattctcctagtttaagtccatataatgtttctacgacccagactgcgataagcctatataaattatccgagtactaatacgtcgaataaggtacaaaataatacctcactt

SEQ ID NO: 40599 - DNA, 680 bp, Oryza sativa
gccgatccctcctctccccatctcctcctcctcttcctccgcgagcttggggtgggattggattggattggatttgcagggagggagaaggaatgcggcaacaagtggcgtggaacttagaccagaaacgcgagagatacggggaggggcggaggcttacacaccgccagggtgcgacggctttaaaagggggagaggaagggaggtggtggtggtggtggggatgggtggtggtagcccgtagccgcgtcccgtcccgtcgcgcgggcgtcggattacgtgtgtggcgagatcccgcccgccgccgcgatcgtctgcggcgagcggaccccgtgatggcccgtaaccatcgccgaaccgccaacgggcgctttccacatgggctcccggatctgtggaatcagcggtttgctcccaaaaatatcgccatcttctgtgttgcggtctctccctctctctagtcagcccagctcacgcaggcccagccacagtaaccacttattttaattgtggataaactgtgaactgaaatactgaccaaattcctaaaaactagtacatcactgtttcgaaataagattatttttattcgctcctgtttattctaaaataagtttatttttaaacaatcgttgtattagagtttataaaagcatggggcaaagcatgggctgcaggaa

SEQ ID NO: 40600 - DNA, 637 bp, Oryza sativa
tagtagaataacttcgtagccatttcttcaatgaggctcctttctgttgcattttggtttactagactattgcacgttgagtagcatcaccatctaccacatgctcctactccctcatgtcaatatatttaaagtttgagacaacaaaatcatattaaatcactcactaattttatgtcctaaaagctatgtaaaagtgaccatagggagcatctgttaggcggagctgtgtggcacattgattctaggcttctagcatatctattgtcgtcagattatgctaagtgccccaaccactgattaggaggaaaaaaatatgcggaagttttaaaattttgattgggataacaaccgtcacaaaagataaacaagtctcttgaattgataatggggaatacccactgaaaaaacatcaaatatgtgaatacccgtgaaaaccggatttaaaagttctctaaattcatgaaaaaaaattactagaaatagttgtaggcgtaaaatacattcacaccaaatcaaagttcaaactcaactttgttagaagtaacaaaagagacaaaatttggatgaatgacaatgtagaaaagattaagacaaatgaatttgcttgagaaaagaaataaatgaattgccaatg

SEQ ID NO: 40601 - DNA, 1265 bp, Oryza sativa
  unsure (1)..(1265): unsure at all n locations
aaaagttttacaagttttacacatgcgttgcatgatagattgatcgatatgcgtgggggcgactgggcgacgagtacatagcatgtcaccttgcatcggcagttcggcacggcatgcaatgcccaacatctgctcttatgttctgtactcgtgtgggcataccttgcagagcaggtgtgtaatgagatagatcaatcgtccatgatcagcgttgttgtgtctctaatgttttctctgatcactgcgaacatttggcacagctctattgcaaatttggaaagtggaaaatgcaagttccgtaagttgcaagtcatataattcagtgcaatgagaaagaacggtttgtaagttgcaagtcatataagtcatatataagttgcaagtcatatagttccggtttctatctgatctgtttgtgctcaacattcagagcgcacggtttcgtcgacgtgttacatgcatgttccgatgttctgtgatggtcaaatttgcagctaaagttgagcgcattgttgatgttcctgcttgattcatttcttgtttccgtctgcggccatggaggcatgcatgcatagacgcgaagcacaactggtacatacatgaccatgcattctatcaagagagctccagaaatacacattccattgcaatctttctcatggngagaatagatggagaagggaagatggncctaaagttatatattgaacatcagaagtgatagagctgcatgttcagcaatacatcttctagatctcaaaatgcacataagccccaggctcgctcaaccatacgagctggctggcaataacttgcgctaaatttcatgagctcatacatattgtttgtcgagacctaagggaatcgaaatgtgatgcatattgacatattgtcaggcaagagctaaagataatctgttgctatcctaggaccatcagttatgatcaactgatgctgatggtgaggccggtctgagagcgttactgccattctccattgtagaatcatccacaaactggctcgtgccatgtagttgctgctcgccaatttgaatgacgatatgatgtgttctccttgctacgctgggtattctggtactgacctcctgtttgcctccctgcagcatacacctgttgattgttctggttctggtgatgaactgttgtttgccgctgcgtgttatatgcctggggatgattattgttctggtaatgcactgcaatttgccggttggtagtatacccatgtggactctgacctgacct

SEQ ID NO: 40602 - DNA, 515 bp, Oryza sativa
aaacataattaaacaaatgagctaatccctcctttttgtggggctacttaattactttgctccattaaactatattttatccccattaaaataatgctactgtcactgaaagcatatttaagatttagatgccatgcacatttttcattcgttactttttgtaactcatgagatacgagctttaccagtaatcttacattgattgcagttttcctctatcggcaccctttcgggtgatgtgatatccacttacacgggccagttcaaacgaatagaggagaacccaagttggatggccagatcatacagcttatttgtaaggatttccttttatggttgcattcagcagtcttattgaaatttggactatttactaacacaatctcgttcgttcattatctccttttcaggtcaaagatccaattgagagacctgataatgccgctacagcggttgatttgaaaggccttgagcggattgctggggccttcaccgctgctaatcgtaagtttgcg

SEQ ID NO: 40603 - DNA, 709 bp, Oryza sativa
ggcaccgcagcggcggcgcaagttggcggctcggctgggtgttgggccggcttggactgaggaaaggaaaagaaggaaagggagaattcggcccaaacgtagaaggaagaaagtctaatttttcctggggctgaataatttgatttagaggagaatttttatttggaaggaatttgaatagaagattttgaaaggaaaatatatttggagataatttgaatagggaaggttgaaaggaaattatatttggatctaatttccaaaagagatatttctaatttgagtgcaatatttttggaagtggaatatggtggaatttaatgcactcaaatgagaggggaattaacaatataattcctcaatatatatatatgtttggaggagaatggttggaggtaaaataaataggatttgaatcctaaatttgatagtagaagtatttgaagaattatttgtggctaatagggaaagttgagtgaagaatataaattggtattttcttagcacaagagcaattattcacaatatttgcaataatactattcttgtgccgaagaggaaatcaagcccaggaattaaatcagtggctagatcaaaaggaagaatttggatcaagaatcaaaggatgggtttaagatcaaaggatgggttaataattaattccaataaaattggaattactttggttaatttaggtgggctgcaggaa

SEQ ID NO: 40604 - DNA, 630 bp, Oryza sativa
ctcataactgatgttgtaaattttttttcaatttttttcaaataagacggacgattagagttggatgaaaaaacatggttgcacttaaaatggaacggagggagtattaattggtttctcttggaccgataattagaatacatatcgtagtgactctaacttgtgacttgtatgctgcaacttagggctgtttggttgagtgccaacctttgccaaacttgtggcaatgaagcttgaccaattaggtctgtgtttggttcatgccacaagtgagttatgctacaattttttagcaagttggtccacttgtcattgagcgttttttttttgccataacttgccacaattgtggccaacaaatttttagccataaaatgtgtggcatgccacactttgctaaatattttgtggtatactatggaattcatccaaacaacctctttttactatcggagtcgatcgatctgatgatagctataatatgtgcgtaataagatgagagagatgatccagtcaataagtcagggctcatggcctgtcaactgcatgagccgcatgtcagcaatgactccacggaatgcgctgcctgagcttgacgaggaagtgctcgtagtcctccttggcggcacg

SEQ ID NO: 40605 - DNA, 694 bp, Oryza sativa
cgcggagcggaagcgcgggcagtgacaccacggggcggccggcggcggatgctgagagtgtgtccccatgcgttcggcatctcgcgctgcgcggggcggcgggggtcaaaactacaccgtgtgcgatgtggacaaaaaaggtttctccgttttctcctttaggccggagattcccccggccgaatccggcgaatcggcaaaagcggccacatgcggccaacagttggtgcacgttattgtcaaaaaccagtccttacgcaagacgccacgaggtcaacccggagaggaactacatgaatgaataacaaagacgtgattgaaacaaatacggagtagtacgtggttaggacctctattatcgagtaatgatactcgttaggacaagagacaattgaagcaagtagacgcaaaaacgtactcctcctagaggtcacgctagtactccctccattccataatataaggcaccctttgatcaaagaaaattcataggaattttaaagaattttatttctatagaaatttttactatatagccctgtgaatcaaatgaatgaatgaatcctatagaatcctatgaaattcctatggaatgcctcttcccatgcaagttttggagaaaatttagcatgaggtaaaacctcatgttaagaattctttgagtctttatatctcctcaaattcctgtgttttt

SEQ ID NO: 40606 - DNA, 681 bp, Oryza sativa
ttcctgcagccctaagaaaattggtggagaaaccggttaacttgggcggtttttatataaaccgaggattaaaatctcgagaagattgaccgattaacttgggcagtttttatataaaccagggattaaaatcggagaaaccggttaacttgagcggtttttatataaaccggagattaaaatcccaagaaaattggtggagatgaggattcaacctcaagtcataggattgagagcaccacacggtagccatgccaccatcgtaccgcttgtgctattatataaacatttattctatattactaatcaaaccgtggttggaccggacaaaccagtggtccgaccactaaaccagtgaaccgagagctcaatcggttcatttatcggtccggtcttaataactatggtcccaacgcctcccaccgctcaccgctcgctacccctagtagccaatttggatgagaatcagagggagaagagagagggtgagggagagaatatgacaggtggtcccacctttttttagaaaaaaaatgccaactaaactaccatgtataaccaaaaccactccggattgaattagacagtagttcgcccggtatatattaatagttgaggatgaaagatatctgtttttcgagtctaagggggtaattcgtactcacccaatattttatgggg

SEQ ID NO: 40607 - DNA, 933 bp, Oryza sativa
gattctcgccatgtttgtagagcatacggacatccatatcatggctcaaaagataaggaaatagcacaatcatactatgcctgtggcacgcctttggtgctatggaaaaaaatagtattcctgaacaaagctagaattgacctgtttctcacagagaaaaaatgttgcaagaaatctttcgtgaataaggtgcaaatcaaagcaaaaggcatggctgaatacctactaccaacaataattcagggtgactatcaaatgtctgttagcctgctaagtaatttgactaatttcagtgaggaacatgagtatcaaactaacgcctcggtacaagaaaaaatgatgatgccaaaggacaaatagacaaacaagtagcatgggataaatgatgccagaggcgaagcatacaaatgacatgatccagtattattcagaggagcgctaatacgaattctaagggaacatgatgctgctgatcaagcaggttcattacattgaataggagctcaagagactcaaacaccatacattagataagcgtaaattcgtgaaaaaataatgttcagtgagagtgactggcactaacgtaagctgactgcatctaaatttcgccgtcccagagctcctcatgggtcttataaacgctgtggggataaacaatgacgtcgcccctgagaagcctaacctgaacatcatagaacacgagcatgagaaattactggtgcactgctatgagttagtagaaggggttcaagataatgagatacttgattgatgccttgatggcaaataaaatagctcatggcataagatgtacaaaattgtcctgtaaggccagtggttgcgacataaaaaccaaacaagatcacgtgacaatagatgaatataattatagcacatgtaatgagaaatgagacaggcaacataataaccaga

SEQ ID NO: 40608 - DNA, 710 bp, Oryza sativa
ttcctgcagcccttttttccactttactaagtcattgtacttagtatcttgctaaatacttatattttaaggattaggcggcatcggaggcttaggcgtcgggcagtaggagaaagcaacagccggtgctgtgatttcgatcgggcctaacaggtgcgagctgcgcggacagggccaacgccataatgaggaggatgacgacgtcaatgcagctgttcttggcagcggtgcccatggcgccgatgagtgaggagctatcgccacctcccttaccagcggtgaagggagataggaaaataaggacatgttcagattgtagccaaaataaatcttaccaaattttggcattgtcaattttagcaggatttcttatggacaaagtatttgttaaatttagcagcaaactaaatgtagacattttttaagtaactttgacaaaaaaaaatggtatggttgaaaatgacatcaatctaaacagaccccaagaaaagaggggagaaagaagattaatctaacgggtgggtcccacttataggaaagaaaaaaaagatgaaaaatgtgacggtagtggcacggttctaattttataaaatttcaatgacatgactacgatttgaataaacgaattgtaatgacatttatctgaaataacatatttgtaagggaaaagtctgaattacccttgaactattgtgtgcgtatgaattact

SEQ ID NO: 40609 - DNA, 601 bp, Oryza sativa
gtgaagagagacaattggtatatacaaaactcatagctatagagaggaaagaagaaaaaaaatcattttttttgccaatgtacttgaactcaccctccgtcgagcaaagaatgtaattctaaaatttgtccaacaaagagtgcagaaactcatatgagaaaatttgtcagttttgccaacgtacaaaactcacgaaaaaacaattacaaaactcagcaaaaaaaagttatcaattttgcccgtgcacaaaactcaatcagtaaaatatttatcagttttgccaataaactcgccctatgtccaacaaagaatgtaattctaaaatttaaaatttgtcctacaaagcagtggcgaagccaccgcccagataccacaggcagccgccccgctcgctgtcaaacgttccattgaatttttagctcttgaaaggattgaccatagaactggatatagtttgagttttgctcagggttaaaaatctttctggctcagctatactatagagactgcagaaacttataggagaattttaactcagcaataaattttgaaagagtgcaaaaactcatacaaaatttcaacttagcaaaaaaaaaaaaga

SEQ ID NO: 40610 - DNA, 581 bp, Oryza sativa
tcgcacgtgtgacaaagcgtagtgtctaagacatctaaggtgatcacaaccgctgtagcgctaccgctttgccacatatcaaatcatatatgaagatgattaattttgttaataacataaaaataaaattaaaggtgatgcagcgagagaataattaagcaccatgggttgtgtttttctcaacactaattagctctgtttaagttgaaaccgagagttgattacataataattataatgtatttgtgttatgtcgtatttggattttgtactatttatccgtacaggtgaaaggaatcattatgttataaatgtgagtgcaatattgacgaatatcaatagaactcttagtacgacaagggtgataaagggagtttaaggccctctctttttttcccgattccatattttggattttttttgcacgctttccaagtttctaaatggtgtcttctttaaacaacattataactttttagaagtcaattcattcgtttataccctcaaatagctatcacataaattatataattcatcaatttcagctatcctaaaccttaagtactacatatttttttcat

SEQ ID NO: 40611 - DNA, 650 bp, Oryza sativa
ggggatagagaagattgggaagatacgtaaaacgaggtgagctattagcgtatgattaattgattattaattattttaaattttaaaaatggattaatatgattttttaaagcaactttcctataaaaaatttttacaaaaatacaccgtttagtagtttaggaagcgtgcgcatagaatacgatgtccctttctcacccaatccatcccctagaacgaacgcaccctaagttttactccgacaatctgatcgatggtttgtcagtagattaaaacaatataattatggtcttgttatcaaattatttttagggcatctgacggcgaagagcgacgtgtacggcttcggcgtggtgctgctggagctgctgtcggggaggaagtcggtggacaagagccggccggcgcgggattaatgtgggggaatcagtactcaaattcatcaataccaggtttccagcactgccatctcctaattcacttaacatctcatagtgacttggatcaggaaccatgatctcatcataactagccttgcaaaccttattccaacaattcccataaaccatcctatcccatatcactgtcctccaaccaacaaagcttttaaaccagatatcaagatcaggagcattttctttggagggtgg

SEQ ID NO: 40612 - DNA, 1092 bp, Oryza sativa
tatgataacgagaatgatacagacaaaattaatggtttgatcagcaatttctggcaatggccttcaactacttccagcctgctttaaattggcgcagcaaatgttaagccatgatggccgtgctgtcacacagtctctacggagagaagaattgacttgatgatagatcaaaaggctaaggttgcggcattaagcaaaagccaaatgctaagctaagaaaatggtttgaaaaataaatgccaaacctgatatttgttttaatgaaaaagaatactggaccttttggcctgtatgcacgaggatgcagaaactagagatataaaacacttcttcatcatcttgataatataaccatgcgaagatgatcattcatatgagtgatggccaccatagcatgatgtatcgaatctgaacgatgagagaatatatggatcgtgccgatgatgtcccactggcaaatctgataaacctgcaatagtatgggagtggattctaatccctcaaggggatatcgggatatcccctcgtatacctttttctttcaaatttgatgcaaatagttgtgaaaaattctgaaaaaaaatgataatatagagtataatgatagtcataatgcatggccgtgttaagccttaaataaggaacatggctccgtccaaatgagcatcccatatttttcgaccaaaaaatgagagagaatctcgtatggccggttggctgtatgggagatctctagtgcagtaagaacattcatggttgcaaccatccaggaaataaatgtgacaccatgcccccatgtggtagcattaagcccttcctctgatagccatgtgagcttgtttgtagcagaggtgatggatctcccaatagactggtcacttttggtcactgaacgctcaagtgaaatattaagattgtgtttagttcacactaaaattggaagtttggttgaaattggaacgatgtgacggaaaagttgaaaatttgtgtgtgtaggaaagttttgatgtgatggaaaagttggaagtttgaagaaatattttggaactaaacacggcgtaactgtttgtgaacaggaatgaatttttcatg

SEQ ID NO: 40613 - DNA, 633 bp, Oryza sativa
tttacgatgaaaggacagatgctgctttgttagtatcggatcgaacagaaagttgtgctggttactgttgcggatcgatgtcaattaagcttgataaggattggcatggcccgcggatgacgccttacgaaagctctccctctataaaaacttttaggacagtcccaacccataacactagatatggtttcaactctacatcatcaagaaactagtactagacactactcttctaatgcaaacaccactattccgtacttcaatttaatgctacttatctcacatgatgtcttggatgttgtgtaaaaatcatgtctcatacaagatatggtttccttctctttcctcatttattcacttgccacattattttttgttctacgtggcaacttatttaattatatggacaccatactagttattgggttgaaaatccctaatattaggaacagtcttatcctgaaactgataggtgcttaaggtcccgtgaagcaaaccactttgatttgtctgcgaattttgaagtcaatgattcccttttgtatactacctccgtcccacaataagtacaatcatgagttttcgcgcccaactttaatcgcccgtcttatttaaaattttttataattagca

SEQ ID NO: 40614 - DNA, 571 bp, Oryza sativa
ctcttttcaagcagtaagcagtgaagtaatcgatgtgaacacagcaagtaggacattgcactaaaaccgtaacaagtgttcttcaattcaattgttatgctagctagtaggccattactgagcaccatgatcgaagcgatttcccaaattttaaggacagtggtatgcgacgacgctacccatggaagctgtaagcacagaagggtggagatatccggtggctggacttactatggcgtgcggcaagcggagcacttgtacttggacggcgcctccttgcacacgtcgcagctcccaccagccatctccagccacctcccctagcccctagggattcctccaggcgcgacctgcacccccagacccgtctcaggtgtcctgtggctgctgcgggagcggcgaaaggagaggaaagggggaggggacgcgctgaccttttaggtgctttcagctcgtgcggctaggctcgctccacggcgcgcgacgggcgccctcggccggcggcgagcggaagagggcggcggcgccgcggcggcaaaggtaacgggatatgcgagtggaggaatgggtg

SEQ ID NO: 40615 - DNA, 708 bp, Oryza sativa
ttacaaccaatccacacacacaccaacaaacaaaacaaagctatgcaacatgccgacgaccatggacaaatcttatatccgataccggaccagcgggtccttgaactgaagccgcccattatacaccctccacgcaaggtcctcgagtaaaaacgagtgaaatctccacccatccccatcatcgccggctccatccacctcgtcgtcgccgccctcttctccggcatccgtgaccgggaccaatggcgagatgacactgtccaaggggagagtgatcagcacggtgactgacaagcggtcagcctcggcgccgtgccctgctccgggtgcagaagaaacggggcgagccatccctctcactttcttcagctttccattgctccacacctagcacgcgtgccataaaaaacaagaggcattaaggcaaattcaagcaagttgttactgctttgatgctgctcaaagagtaaaggaaacaacagacatgacatgatggtcactttgtggtttctcttcaaaagccgagatctttgactcttttttaaggtcctttggtggattccaaaccgagctgtgaggcagtgatgcaccggttgatgcagacatggggcctaaatgggtccaaattgagtggtgacgcacagcctatactttagaatttgatgccttcgcaaaataaaaatggatgctttttagtacgggctgcag

SEQ ID NO: 40616 - DNA, 782 bp, Oryza sativa
aattcctgcagcccatgtggcgcaaactgctaagctacttctgaacacattatgggtatgttcagctgccggggctgcggctgcactgcagccaaccggaacattccggtaagcacaaacacagcagcagccgcagctgcagtcctggcctgccaagttaaggatcctcatggattaaaatatacattgacttgcaattaatttgccatttcccttcttttgttaccaaagtagtatatatgagtacaaatatacaatggcatttactttatcgctatacgcctaaactttgcctttattttttcctttctgcttttacagctgtttacctgttattctttccctgtatggatttctctaactagtgctatgtgatgatgtacttatgcagtgcttgttcaatgaatggagaggcatctttgggtggacctttgatctgcatgctctctttttcaaatcaattaaggagcagattataacatcatttagatgggtataccatctgtactttgtaagctggttattgtttgaataatcttggcctcaaatgttaaccatacctttccttttgcaaggttccatttgttcttgtagatcctgaaaacatgactggaatggtccatgtgaagttagacagggcaatgcaaccattacctcttacaactgtgtatcataaacttaccccagtcgactcaactccttacacattgtttcagactattattggcaatggttacccagtaagttcctggctgtatattggaccttttttttgtatggaa

SEQ ID NO: 40617 - DNA, 1121 bp, Oryza sativa
cctctcatcgcgctatctctctctctcggtaaacccctggcctcggttagtatctgaagtggatttctcgcttggtctactggcggggttcgctcgatactcctcctcgagttagggtttggcgaatacgaccaaccccgcggatcgcggttggatggcgactagagcggccgcgctgctctgagaatgcaatgtacctttcaagggttcggtattttagttccttgcttgataattgctactactgcgacaatctcgcggttcgtttgcgaagaaatataaagagggtgccttgctgtggctgtgcacttctctctccttctttgttttcacccgaaagttgtgattttggtgtggggttttgatgtagagaaattgatgagtaccacgggtattgccagccaaatattaattgcggaatgtggggaatggggaaagggtgttgccttcgacgtggattcgcctgctgcgacacataagcatgcatatattcgtagagtggagcggaattctgctagcattctgtagttacccagttacgttaactactgtagtgctaatgttagagttaaatgatttatatgatgaagtgatgaagtatacttttggcctgccgacttcgtctggggtttaatttacacaaaacttcaataccttgtaaactacacacccaaatatcatgcatgcaaatcacatcctaggggtggtattgcgggtgttttggttgatgtggcatgcaggtgaacgtgggggcatgatgatttagggaaagaaaattatgtgggcctttttctctttcctagatggggtgtggtatgggtgggagtactgccatgtgttaaagaaattgatgatgtggtagccacatgacccaatggccaacacctctagtaacctctttgggtgtattctgcgctggaaactggtggagggatgaaaatatattaaattgcagggtgtacattaaactagagcaaagttaagaaacaattgtagggtgtacgtaggtcgttgcactgttggtttggacttatggagcaaatattttacaatttacattagaaaaccaggacaaccattattcttgtaactgtaatgggtttgaatgcggttatatctgg

SEQ ID NO: 40618 - DNA, 707 bp, Oryza sativa
aaaattacatatgtaatttagggacttacaatgtaaatacatgccaactactttttgatgaaaaatatggcgccataaatatagctacacccctaaaaaattgatatgcacgctgttctctctcgttctctctcaattgaaactaaaataaaaataaaatacaaaattacagtcctatataactaaaattacatttgtaaattcagttgatatgacatgtaagtgcactgtaattttgataacaatgttgtgtaagtaaatatttatttgttatttttttaatatataaaattacaatcctatataactaaaattacatttgtaaattcagttgatatggcatgtaagtgcattgtaattttgataaaagtattgtgtaactaaatatgcatttttattttcttttgtagtccgttggatgtaaatttaagggtagaacaaatctgggtgatttttttttagaaatcacccgacaaatagatagacaatccccatactcaaagaaatacttatgattttattgatacactaatttcagttttttttaaccaaagggctttactaaattcaattctatttgacttgtactagtatgtgcatcgtttcttttatgttcagctatcatgtaccatccacgtcaaattgtagacctcaaagactcaaacgtccttgtagtaaaaggaacgaatacgatggggctgcaggaa

SEQ ID NO: 40619 - DNA, 553 bp, Oryza sativa
taatcatatgttaatgaggtttctcgttttaggtgtattaaaaatatgccttcaaaattgacgatcgatcgcagcgagtcgtgcttctatgcttctaaagaaaagaacgcacgaaaattgaagtgcataaatggctcggattaaaagttactccagtttacatgacaaacatcattagagaggggcattttcgtccatggaaaattttttcgcgaacacaaatgagaccaatctagaaaggactagattgattttgaattaagaagggggtgaggctcaaacccggaccggctagctcgcagcttgtgttgctagtcgggaagaccccggacctttctccatgggaaaattcagtccatctccagccatgcccgtcctggcgccgggagctcgcgctgctcgaggcgacgcgagcggcggtgggagctcgaggcgaggcgaggcggcagtggcggcgaaggaggaggcgagcgcggcgggcgacgccatgcgcgacaaccagccccagcccgcggccgcgcccgcgatgaagcggaggaacagatgggaccaa

SEQ ID NO: 40620 - DNA, 673 bp, Oryza sativa
tggtgctgtatgcggcgataagctcgtccagaccttagaccttgtggtggacccagacgcccgtgtacgatcccatgactcctgatacacatatcctgggctacggaatgttcttttcgcatgaaaacagcgaccacacagaacacttattagagcgcatacaaaaattaataccacctatatcaaataactaattcactggagtaactactcgctccatttcatattatatcgcaatggaggtttatcttagagtcaaactttctcaagtctgaccaagctgaacaagaaaaagtggcaacatccacaaaatctctgtcaataaaagcatgaactccgtactacagtatgatctcttatgagtctctaaaaattatccaaacatactctcttaccgagcactacagttcacgaaccacacttgcacgttggccggctgaacagcttcttcaaaacccttgcggaagtcttatatgacaccataaacaaaaatattcccttcttacagcacacagggaactatgtgtaaataaagctgtcaaatagccgatgacacatagtagcgatgtacttatctgaatattgaatccatcaccaactggaaggctaaaaaactgagttcagacataccgattactgttaaaacacatcttgcttgacctttcataacttc

SEQ ID NO: 40621 - DNA, 668 bp, Oryza sativa
ctattgactgagagcgattgcccaaaactgtaggcgggccatgtgattttgaacgatgcgtgcgactgactaagctcaatgcaagatggtgaaaactgacctgatcactgaatacatcttgtcgaggaatcttgtaacaaaagtgccaaatcagtatgataaacgggagggcaggtttaacttgcagtgtcagggcaccggatatgtttaatatggctgtcaactgcactgatgactagagggtacaattcataagttgatcgtccacacaattagagaacagcgtggtgctatcaagcagtgagtaccatttcatggatgtgaatcgatggattctctctcaataatatatgcgggtcagtttctgctcatttacccaaagcagaacataggtcaaatttcaacataagacgcaacagagggtcgaaaggtggtggaaactcagcctgtatgatgtgcactaagtggaaggatagatgaataaaatccaaaagtacaatgaaactgctaaaagaataatacctccatttgcaacaatgtccacttccataccagcctgtcaagaaaaataaagaatgactaattaactaatacatagagacatatgcacatagagttggttcttcccaacacatagcatgtcccaatatcacaatttttttgccact

SEQ ID NO: 40622 - DNA, 749 bp, Oryza sativa
ttcctgcagcccttataaattttttttaaaaaatagtcacacaaaaagtactattcattttttattattttattaccaaggaaaggtattattcttaaaaaattttcacttaaaacaaacggccaaacgttggaaataaatagtgtaaaactatacttattttgggacggacggagtatatgtcaagagcgggggatacatgccatggcctgtgtacagccaagtagcagcaggatttgattgaggagagtgagatatatcctgccatgagaaccaacccccaggaagcaagagctaatggggatccaatgaagtgacagtgatcggggccgatgtatagaggagctttgggacttggtgtttggtatgacagcagcctaattttgacatttaacagccgctgtcaattcaatcacaaaattaacggagaatgttttgagcttttggtgcaagaatgggtgtggccccagttttttgttctctttttaccaagagcctcttcttagcggttgacaacactaactgggccgtcttatctgactcacattgtggcccgtttgttggagtactagcacagtagcaccagttcggcgatgtcatgatgtcagcgattgatgcagtaaaatgattcatacgcgtgactcatattgcttgttttcctcttattcttttcattgcagccatcaggttcagtcttcatctaccaacaagaccagtagtagtctttaagccgttccagtgggaaaaga

SEQ ID NO: 40623 - DNA, 700 bp, Oryza sativa
tgcttccccacccgtgtgatggatccgatcgccgtcccaggggagggggatacagagtgggacgccgtacgacgggacgattcctccggctgcgtccgacgggcgacggttcgtcttcttgctcctcgccgaggagtccaaccaccgcgactctcgtccttgtttggcaggccagaattccggcccattcattgtaagtggctgggattttaactaaaggaaatcccgtcctatatatgcacgtgcacgagctgggatttaggcccattcagaaatggcctgtgctgtatttttactgttttagtccacatggatggtctggcgtcctgggtatatcatcagagctttgtcgcattctttgcactgtcactccttgacgtacacaccttccttccatggcaagtacttgggatttgggtactggtgagcgtgggcagcagtgtgactttcggtcaacgggttgcacagcagatagctatgcagaatctcatgtcatcgtggttatgtgacgccatgtgatccccagagtttttatccgcttattgactgtgtcggcaacctctagcagtacatgcggcagccacttctctggccagttactctccgcctcaagccgaggacggtggcctcagcctccctcggggaccgatgcgcatccgagcgatggcaggtcatcgtacgacaaacgggctgcaggaat

SEQ ID NO: 40624 - DNA, 677 bp, Oryza sativa
  unsure (1)..(677): unsure at all n locations
ggagtattttatacctcgagaggcacaagaactgcaagaagtaggaaagggtgcatagagcgaaaccggtcggaacgaagcaagaggccaccttgtaagttgaaacacatcacggggacgcttgaggcagagatggccaatgatcgcgatgtgaaagaagatgacgggggtgaactgaagccaggtggatgcgtagtcggggtcatctccggtctcccagcggtcgggaccgtggaagttggttggggtgccggcgacgtggtcaggccttggcctgatcagcgacatcttcgctgcacgcccgctgaggctgtaggcgatggcgacggagtagccgagggtggaagtgacgaaagtagatgcgaacacaaatttggtctgccaagaacaaaaaaacaacaagtagcttgaatcagaaaacgccgagactgcctggatgggttatagcagcaagaaagaagaataactcgccttggtcatgatgtgaccttccatggcgtgatcttgctctgcatgaagagaactctatagttgtgattggttgagaggagagtgtangtagagaaatagcttcattttaggataagttactgtgctagaaatagctacatttttggataggggtagtagctggtatatatgcatattttctgctttcatttgtttacagaacacct

SEQ ID NO: 40625 - DNA, 616 bp, Oryza sativa
atttttgtgttcattcaaaaaaaacctgaacattttgtacctttcaggagctagaggttgagtatcgagtgaggagagagagatacccaggccgagtttgcttgccagcggcgagctggtggtgcgcacctgcaagtgtggtgtccacaaggagttcagcttccaccattcccactgagattgacaaggtcattgctatctgaaatactcctgtactcgaagctctgagattgagaaggtcattgctgtctgaactacttctttagttgcctgctttgtttaacttggctacatagttgaggtacactgcaaataaaatgctttatatccaataatttgtaggataagaaacacattccagattcacataataataaggatatagaccctccatgcatttgttgattctttttaaacccaagaagtagcaagaagtgacctgatagggcagccgtacggcataaatatatagttctgtttgtggttttgaattatcaacatttataactgataattatcatgcaaactaaaaatttgagaaaaatatgcgcatgctgaatttcttaatgagatcacagtaatcttcctttgaaagaaaaaactattttgaaacatg

SEQ ID NO: 40626 - DNA, 2082 bp, Oryza sativa
attgatataatcttgatcaaccttcacctcctggaagttgcagacgttgcctcacgactaaccgatacaaaaggtctataatacgcgagaaaaaccaatattcaaacaacaatcaaatatgcgcaacaaaatgtactattcgtgtttgctaatggatcccaatcatgctaggggctaaggtttcttaatctttctattgtcaacgtggcctatttaggagttaaccaacatagcatttatgggatacatatatatttggctaatcggtggtttagtctatcaaatggcttatggaaggattatggctaagcatgcatctatctaaataggacggtcatatactagaggttctgttgttagatggatttaggatcaatcaaataattacagtgaatcatttgtattatttattttattgatggaagctttactttaattatgaacatattttacttgtcacaataaattataaaaggttaataattatccatgctctatatgttaaattcgggaagtttataatattatagttacagattatctcttaatgaacaatccggagttacaattgaactatgaacatatgaggtcaagatttataattagtacttatctactattcatgtttgttatatactccccagtttaatatataaaaaagataaattaattgtgtaactataatgggatgtacaatatatgtgtgcaacagcatataaggtttggtcgcctactgtacatgagcttatttagaaagtgtactacccaatgctctaagtgattcctgaatatattgtagtttaattatatattagctagtttctatgagtgatattgtatatgtgatgcgacaagtttaagcactggttctattgggttactaataagtggtaatcaatttaggcatatataagctattctatatggtattgcatcgattaatttacttagtgattcctccacatctagctctgttattattttcctaaacaggttaaagattcatctatgtgtgtttatattttagttacataatcataaggctatacttgatttaaataacctataagccatggccatcgaatattaaataagtactagtattttcctgtacatccattcatttgagacatcacataaaattagtttgtgtggttgttacagtggcaagacatgttagagacaaatattattacatccactctactgtacaatactaattttatttattagcatatttttaagttgactattatgcatcatcttgatattaattatttaatatttataaatatattttatcaattagtgaattatatatcattggaaagcttatgaatttagatgaatttaggttcaagtttcactcaaattggagctaaatatcgaacgaaatcctagaaatattatatgatttaatttagtctatgactaaatgattaaatataatacacggctaaaatccctagtaattaaatccgaatttctaccgtgaatcgattacttatagggattacccaaaaataatctataataatctataagaattcatctatttgtctagttattaattacatctaaattactaccgcgaattgatttctcatagaaattaccaagaataatccataatttatattaaattttgcaattctacgactataattaatctataattaaattctaattattttaaattttctaaacttccccaaactccctctaatttcctatttatttccttttcctttttctccctttcctttttcttttcttttctcttttcccttttctttttctctttttctctcttttccttttcttttctttctcttttcccttttctttttctctttttctctcttttccttttcttttctttctctcctctctttctttttccctttcttctctccctcccggctcctttctctcttactcggcttctccctccctcggtatcttttcttcttcctctctttctctcggctctctgtctctcggctctccctcctacccgagcggtggcggcggtggacgcgagggggaaggagggcggctcaccgacggcagcagcggcga

SEQ ID NO: 40627 - DNA, 2705 bp, Oryza sativa
atctcaaggactaaactgggcccgaagtaaaaactctagggaccatattagctattcaccaaaaacaaaatcgaaactactttaatatgaaacgtataaaactgagtgagtaccagttacaaacaaatctgtgtttcccctttcgggttttatgattttatcaccgcggccacatgttgtggtctcgttcgtagtatatgccgattttggaggtggacacgcgagtcacccatgtcgaattgtcgatcggttgggcttccacgatgtggcggcttttatgcgtgtggcgcggtaccagacgcgcgtgcgcatatggcaacgcaaatattgctgttctttcgaggaataacaatatgcaagttgttgttctggtccatggattttcatcgtgctagctagttaatgcgtgcgatcgaattattgttatcgtctgaaaatgcgctccccaagatgaggcatggccatgagatctgccactattaaaacctcccaatattgatcagtagctccaagctagggccatgttgatcgagcagtaatgaaaacacattgatttgatagaaatgcatgctcacaacaatggattgaaaatagacaatattacaacatttatcatttaaatgctctggaaaattttcatgttaattggacaaataacaaacaaatctattcatctatctgtgtgagatcaaattgtaacaacttagattagaagaagaaattaacatcattactgtaggaaaagttctagttaataagaaaaatagtgattaaatctggtcatccatctaaaccgaattacagtaacaaataagattagaacaggactaatttctaattattaattttaattttcaaattcaataaatataagatgcaagatggagaatacaagatgatcgagtacagcatcatatttatcaattcttgatggatttattaatgaaggcaaaagaataaaataaaattgagactcatattgaatacaacttgtgttaacttcaaaattactttatcaagaaaataaattgaaacggaccatctacaacttaaaaaaagttcatgttggtcactacctactaataaatgctattttgaatttcaagaattatggaaataatataatacttcctccatctcagtttaatcatcacctaaacaaatagcgtagggaccaaggataacaaaatcttcattattctaaaattaattctcatcagttaaggtgctacgtcgtttcgtatcccgtggattacataaagttttaaatattatatgtagttgcactaacataaattaattttggttggttactctgtgcacaaataaatgaagatgtgcttgttagatgatgattattttagaaagaactctgaaaccttagatgacgatcaaactggcatagagtgaatatatactaaattggggcttcaaggcaagtacaactaagtgtttattaatttcgaaattttaaattagtaaaccataaaagcagaaagtaaaataaaataaagaatatagcccagatgcctgtttggaaatactattttaaaatttgaatgattaataaaatcatttttaaggtatagagcagtgtataatgcaaataatttgcacggacgcacctctgggtttcaacataggaggctgttgatttacgtttgactattcgtttattaaaaaattatacgatcaacatttattttgtagtaagtataatttatcattaaaggttttttaacaagatgtatatttttaagaaaattaaataaataaaatagtcagtaagggtggcatatattataagctagcttacaagctaaaaactctaaatctaaacaaacaggttgattcttcatttagttttcttaaagccaaaagccattttatactggtaagcccaggttggagaatttttttttatgtgaagcggggaatgacttcaccaattaaacctaatgctttaaacccataggcttataaaatttttaagcttaaaattagcaaagtataagctaataaacctaataataaaaggccctaagaaccagtggtagtatatttttagaaaagtccctttgggtctcaccgtgctggctgatgatgatcagaccgaagatgttcggtttcctaacaccatgcaggcatgcaccaaaagaaacggaaggaaatggtttaatatatcgttaggcagtgctagcttgactaaccattttccacacacataaaccaactgcagaaaaacagcagcaagtggggtcatcagtagtttctccatcctgctgtcgttgtcccaacgaggggctagctgcatcatccaaaaacgaaaaagaagaggataagaaaaccaagctgcattcgccaagaaggtaacagtgtaacactactaccctcaacgagcgttaatgtgattcgtttgagatgactcacttttaataggtaaaaaaaatatatcccatttaaaataccctagtgatatttaaaatattcttagtatggaataccgtttgtgatgtatgactatggttaatataccctagtgatattaaaaatacattttagtgtttttagtgtatttaaaattcaaaactcgtaaattctcatcggtgaaggttcttaattaattataaccagtcacgaataagtcatcggtgaatggtgttcacctgatatagataagatttttttcatcggtaaccactaat

SEQ ID NO: 40628 - DNA, 1460 bp, Oryza sativa
atttcttttgagcttttcggatgggctattcccttgattaatgagcacaaattctgatcttctaagtagtgaatttttttagagtaaattgcagtttgtgtcatgtattattacccttgttgcagcttagacagggtcttagccaggattttcactttggaccacataaccttgccatttgtttcactccacaccaccccctcatcttctccaagtcaggcagcccatcgccgttgcccctttctttgctgctattatcctctctcccaacctattttcgttatgctatcactgatcaagaggaggtagaagtacgactgcttcccagactctagtcaccctatccaatctagagggaggagtagcagatcatcacaggttcagcaccgcttcaggtgctcaagctgagatgaagcacatggtgatagagctgaagttgctggtgcctgagctcgagcttgggagcagtacaacagcgcttcgtcagctagggactagaataggcaatgtttcttgggctcaaatatatgtaggttgctttcaccagggaactcagtcccaaacacagatggagaagatgaagacttcagtatgctaatgaccaaattaaactaatcatatcacctcacctggcatgctaattttagctaccaaacacaagggagtataaagtgaaaatattacttgttcctagtccagtgtgtaactttggtaataaaaggtagcccaatgtgcaattcacttatttttttttaaaaaaataactctctatgcaaaagtttttctttaaaaaaatcaaatatatatatttttagatttctgataattaacatttaattaatcatgcactagttaccgcaatgttttccatgccggaaaagcccaaaacttcccaaaggaacgcaatatactttggaacttactccattccttttatattgtaagtaactttgatttataagaaaatatagcaacattttaaaaaaaacatagaattaaaatatattaaatgtgatatttaataaacctaatttgatgttgtgtatatataagttactcaataaatatggttaaacctctaaagaagtttgaataaaaacaaaagggtgaatagccaacatggtccctgaagtttcgctttaggccgaagtttcgctttaggctcaatttatttctcgatatttcaaatcgtccaaacaaatcctctaaattaattatttgggttaatatagtccttggacccacaaaaaatgccaagtgagcatgccaattgcgaagtcatcctcgcatgcaacagcatggataaaatgaccattcttcccttatataacatatagaaaagaaagaaaagacataaacagaaaaaaataacaggctagcttagggtcaacattgttgcggagggtggccgacaaaggaatttacacgatcactgcatggctgcagcaatcgtaagtgac

SEQ ID NO: 40629 - DNA, 1291 bp, Oryza sativa
atcacgtataatgttggtttattttgggacggagagagtacagggaacacatagcaacaaggtttcagagttttttgtggagcaaaacaccgattgagatcctatgctcaaagtcaaatcactttgagtcactgaacatgtcagtgactctaaaaacacattacttaagttagaggataattcgtgaaacacgtactatcgtaataatttgatctgagccttgatcatgactcggacgattacgacataatgtgtcctaatgcaccttattggtatcctcctctacagtacagtttatacgcttagggcatgtataaaggtagagcttagaatggtctctttgttaatacatatcacttagagactattctcctacaatagttaagataacaaaaactcttaaccattaatgcaccaaaatattttttttagtaccattctttccttttctccacctccatgcaacaaaatttcctttaataaacgttaagagtcgactctgacccgttgtcatgcgtagcaaccatgtttccctttactccactctctctcttccacgtcatcaattttacttacatggaaacgaagagagaccgttattacacaccgttgtacatgcacttagggtgagtttgaggaaaaggtgattgaggagattgggaagtttatgcacttagggtgagtttgaggagaaggtgatcgaggagattgggaagatacgcaaaacgaggtgagccattagctcatgattaattgagtattaattattttaaattttaaaaatagattaatatgattttttaaagcaaattttctataggaaatttttgtaaaaaacacaccgtttagtagtttggaaagcgtgcgcgcggaaaatgagttgttatctccctcaatgttacccgaacgaacgtagccttagggtgtgtttgaggagaaggggattggggagattgggaagatacgtaaaacgagatgagtcattagcatatgattaattgagtattaactattttaaacttcaaaaatggattaatatgattttttaaagcaacttttttatagaaatttttttttgtaaaaaacacaccgtttattagtttgagaagcgtgcgtgcagaaaacgagatgcttttctccctcaatcccccagatcgcccaggaacgaacgaagccttagagtcgctgacatatatgctcatgagtttcccatgagaaagtggatcctacatgttaggcgtgatagtatgtcactgcgaaggatctcgtttcaacaaaattgagtttcgct

SEQ ID NO: 40630 - DNA, 754 bp, Oryza sativa
cctgcagcccgacaaatctgaagtctttcaggacaatcatttttttttccttttgagaatcaagagcttaatatgaattaatcaagttacatttgaaattcagtccctaattcttctgggataaactacttcctctaagtttctgttaaattcaatcatatgttcgaaatggagcctcagataagataagagaagtaaatttgtatgttacaaaaattagcattttgatgtgtttgctgaaagcatgcccaaaataaacctaaaaaaatatttctaaaattctgccccagctaccgcacatcgtaggacaatcgctctcccatgcacgaactttttgggatcaacgaaatgggagcccatggtcctcctaacttgtggagagggagaaacatgggattggggtttcttttctaaagaaattttaaaaaatctggattgatggcctactggatccatttttccctaaaaagtctaatatcgtaggatttatattattcttcttctaccttatagttcaccaactatagttctatacaaacctcattcatcatctatctatcctatacatcaccaactgcagtactacaaacctcattcatcatctatcttatatacctatagttcaccaactgtagtcgtacaaacatcaaatctaacagcctatctacgttgcctatttggcacagctccagctccaacaccacggccacctctcttagagctagagtctagctaaacagtttcagcttcatca

SEQ ID NO: 40631 - DNA, 651 bp, Oryza sativa
gatttgacaggcccaatcatcaagacgacgtgtgcttagcttcccaaccacagagacaagacatgcatttaatgcaaagattataatacttctccaccggagctaggttaggttgttgtgcccatgtggtaaccccttgaggtataaaaggagggccaggcctagtggtggagggggaacttccgagcgaactagcgcttgggtctcgcaaccccaagcacttgtgttctacattcaatcaatcatgcacaggagtagggcattacgcttcttagcggcccgaacctgtataaacctcttttgtctcatcgtcttgggggggctaaccccctcaagatcacacagctctgctcaccaagccctcgaatctcacccgctgcccccggccgaactcacaaaggggggcctcacggttccctgatggaggagttcattctccgacatctggcgcgccaggtaggggacacgttcgtgatttttgaggttctttcgagcgccggcgtggtgagtgtcgcgccgccgctactggggaaggcgcagtatcctcaggagtgtcgcgccaccccaggcagggggcaaggccccccacatccccaccaggtaagcttggctaccaggtctttgtggcgagtcttcggaatgtccgagggc

SEQ ID NO: 40632 - DNA, 690 bp, Oryza sativa
atttttgtgaatatgaacatgtattatttcctaacatattcttcttggcactccaaaaaagatcaaaataaattgctggtgtttaatccggccaattgcatggagacattctgaagtaaaatcacatcgaaagactgaatttgcaaccaacaaaatggacagcagtggcgatgaacaaaacccaaacctaacccaaccatggccgatagtgcgttagacggctgggctcccgttcctcgcatgggccatataatgggctttcgtgatggatgatgggccaaacaagcctaaataggacaggcagcagcgtgcagcgagtagcgaagcagcgctagttttagtaccacctcgccaattcgagccgcagccaggcgggaggaacgctataaaatagggcgaggttgcaccattgtaacccatatctttctcagccttttggctatttggctattggctaagggtgtgattagttcgcgaaaagaaaatattaaacgtgggaactaaacaagattaactgttctcatcagtttaactaatatctgatgtgtgggccatatgctcacttcgatattaaatttattatttgtgggggagggcttcgatattaaatttattatttgtgggggagggctcatcacagtggcaagcccttgccactggggccctcgcgcgtcgctcaagcgttgcact

SEQ ID NO: 40633 - DNA, 4723 bp, Oryza sativa
aattcctgcagcccaaaaaaaaaaatcaaatgtcaaatcttgtacttagttgccagttcttttattttgaggcacaactgtattggcacctgtctctactgcatatatcatttgttaccatgccactcttgctattatctgctgcatttcagatgatcatcaatttttttacggtcattaagcaccagcttttcctgtacaactctcatgtattgtgactgataattaagccttggtgttggccgatttgtcaggtggaacgctacaaggaagggtgtggttgggtgactaccgagtcgaggtcaattggcaggaggtgctactgctcggccattgttctctgactctcaatatcgacgctgtgaatttagttagctttctgacaagggaacaacaaacagatagttaaagaacttagaaggctcttcttttggctgaatttagagctgtagacatacataagctcttaccctaatcttttgcatgaactagaaaaccgttcaatgttgagctattttgttgatactgcaaaaatctgatgcaaaaatcagtttggtactaaacaagatgagaattccatgaatgaatatttgatagaactgtgattattaactgacatcgttgagcttcagttcagttttttcctacctgtttgaggattttactgaagcagatgtgggtctggctgggttcaccattccagcaatcacaaaccacatttaagaacctagtttactctttgctgtttcttacagagacctcaaagttgtgatgacttttgggggtgttaggcctgtttgttattattcctatgttgatctcaaatgttttgattttgattttaatcaaatgataattgcaagtattcagaaatgcatttgaagcgatacagtcaatggaaaaaaaattctgtcttcagtaaaacacaagggatgggagacgtgcgttccttgttgctgctgctgattctcgaagtcaccggcgatggccgccggcgacgaagacgctgctccggcgctgtcacgctgtgagatggtcaccggcggcgactgcgacggcctctcttcggccgctccctccgaccacgacggcaattcctcccatcaatcgccgatcccccctccgccgccgccgttcccgcactcatcggtttctctttcacctcatgacaccgcccaccccgcgcgctgctcatcgaattgacgcggagatatggggccgaactgacccgaatttatgtgcatcctttacaggccgatgaacgcacacttttagcccaactgacgtgcatggttgggctgaaatgctatttgggacaaatttgttcacacgtttgggccctactcacagaaaatttgggcttacattactagcgcagtagcgctgctctggtgaatggagaaggtccacttgactcactcctataggtcggatctgattcatatttctcgaccgcaaaacaggtataatgatttcctcgaggctccaactgttaaaacaggtacaaaataactcctaaaacagcattaggttttcactaatgtggcacgttgagctagttcaacttgctgagtcaacatgggtccacgtattagtgtagtgaccgatgatagccagtggtggctcctttctctcccctctcttcctcctattgtcctatgggcatggtggctggtgagtggcggcttctcgctttgcattttctactgcaacgagcatgtccggtcctagaactctactaggccatcggcgaacttctcgctaatcctgcaacaccacactgaccccccctccttctgcctcaccatcacgccccgatcaaccaaatcttagtaagatttaatgattgcttccgtggtcctgccagtagccatctccttcttggctagctagtttcatggttgggaagatgcatgctgaggctgagcttgagctccatcgagggagcaagaaagaaaagatcaaagctttcatcgattagtggctggtgctactcctatgtcattgccctcctcgtcggcaccacccttctgatgctctcccactgccttatgcctcgatctggttagccaacgtctctactatctgttgccctgatctacagaaccgacgggatcaagaaaccaactgccctgatccgatctgccatgtgccgccgagatcgagatcattagtgattgagcttggttggaatgatggctaggttgaccgtacggtggttggtgaggatgccacgtcctattcacctctggtgcgggtatcaccagcgtgtcatcgcggtgtgggacagagcgcgaggggaaatgcaaaggaagaagaggagagtggcatggatggacggtgagctagagctcgacggggttcactcgccattgtcgcttccattgggagctcaagctcccttgccactactagagggggaagagcgaggagagggagatatgggggagagaggaaggagagagaagtgaggtagagtgagatgacatgtgggctccacaaaatatttctaatttaatgtgccatgtcggccagcaccacctctcaatattgtcttaggaattatttctctggttttaacaatttgagggatacagataagcgatatgaatatgatccgacctatattttgaaggagttagagtggacccttttgcctagtttattgacgtgcaaatttgggccaaatttatgatcacctttaggcttaacctacgcccactttttggatgaactcgtacccacgtttaggctgaattaacttaaaactagaaaatcagcgcgtctattggcgcgcttgctagttagcccataaatgtgtgtaaaaattgaacttcagtaaagtgtcaaaaatatatttttgtcgttgatttttgctgcatttgcaatagatatattatcattctaaaacttttttaacagagtagaaccgtatttatatgactcaataatacataataaaacagacattgatttttttttagtattgctatttttgtggctcttgattttatacataaattttatattaaaacagtttatgtattgcataatgcactctcagtaactacgaacttaatattacgtgaaaataatacaaatttaatgataccacatacgtaacactattttttataaaaaaaatattagtcagatttttaaatattgaagtttttaaaccgaatcctatattatctttttagtacccagggttaccacgctgtttgaaagtgattgttggccacattatcacccgatccaatctttcacattatccctatcatctagttttgtatgattattgtttttataatatagaaatatttttatccaaatattttacaaaaatatatgtatttttttctagtactatttatttcctcctatttctattttctacctgctcatgcatgagctgcaaagtagcccagggaggaggaggcgatgttcaacgtgcaaactctaattatcaggggaacacataattgggtcgatccagtgcatacgctcgtaatggctttgttagttttctaaaaaaaaagttaaataaatatatagcatccatctatttaatgggctctattggagaccatttggcccagcataaaatggcggacggacaccgttaagcgtatgtacgtgacaattctagaagagattagattggttgaggaacctgcgacttctccgttagctgtcggaatttatctgcaagatgaggaaggacacgtggtccaatcagctggctgggtctccagccagctttagaagtatctagaaatatagattatatatggaccgaattatgcttgattttgggctgaatacttgctcactgatgggtgatgggtcgaattaatgtgcagctatgggctgaatcctatcttactaagttatcccccactaacttcttaaacttaacatgcaaagatgccacatcatcatccactaacaagatgccacatcatcattcactaattaataatatgccatatcatcatccactaacaatcatcacatttaaacatcatgcaaacatgctatatttttatagtttttataatttaagagattttcaaatacaaacatgttaaattatcatccaacataattcacataatgtttcaatgtatatcctatataagtatatggttcatactcatttagttagtgcttaaacgattaatttatggtacaaattatttttctcccttttccctctaattaagtcatatcacatcaattgtttttaggccctctttgtttagacttataagccaaacttataagccgaaaagtccaagcctaaacaaataagcggcttttttgtttggcttttctgaagccataagacattctgacactattaagccaaaagctaggttagagaagcttttttggcttatatgaggtagatgcatgactccaccattaaatttaagacattaaatccatcggcttataaatcatataagccaataagctaacttaaaagtctaagccaataagtctaagcctaaacaaagagggccttagcctttagatgattaatctacggttcaaactattttcctacttttcttcttctataaagtcatactaccttactttttacgtttgaatcactattctacatactatttaaatttaaattatcacaaaccatattaatttacttaatctgatattatctagctatcttacacgttattatttttgttgt

SEQ ID NO: 40634 - DNA, 725 bp, Oryza sativa
caaaatcacaattaattaacgccttgattaattgcatggattaaagcagtttttagtggcaactgggtgccagcctcatgattagtgatgaacaggtgccgctttggaagcttcaatatccacaagggttaaaagaagacgctggatttataacccgttcttatcatgcgaccgtaattagccgtgtgccgaccttgttaataatcacccaaatagctagccccacaatgccccatgacaaacatgtgcgctatctctgtgttcatcatatatcagccgaacggctcgtatagtataatgcacgcatgtgtgaagatgcctccagccagacaggtacaacaacacagaagaataataccgatatgtacaagttttaattaacgtaacagtgcattgatttattcctcctcaaatgacaacggtagtcgtgggcacacaaagctctaccccgtttaaaatcgtggtgttagtatactcgcgcgagtgcactgtaaataaaaatttaataaagctcaggacatatcgttgattcctatctcgttgagttgatgtaaaggactgtactcgtgtactccatctgttctaaaataaatccaatcctattgatgaatgtcatttatccttaggattagatttattttggttcagagggactactcacagacatatagtaagtgtgatgtgtgtgcgtggtggtggagtgcgtgcagaaaaaaaatgtccat

SEQ ID NO: 40635 - DNA, 709 bp, Oryza sativa
attatggcttaggctgattatatattgtggtcatttttcaggcggttggtaaatcctttatgagtttatttactcggattttataccacatatgccatatatttccaggtgtggtggaaccatgtgtcttctagggacttaagcacatctgttaaagcagtgtgcgcatggcgtatgcccaatactttggaaatttctttattcacaacatacaagcttttttatagctgttttgctatgtgaattttcaataatgtagccaactttaggttacactcatcatattttacaaagcagtcggtatatcactcggatcatgttattcagggatttacaccgcatatgctacatattaatatcaagtcgcttggttaactataattattgaagccactcggttggttggattatttattccttgactatatgcttggtttgttcacttaaccgcatagtcgagggctacacctattaggtgcatctagtcgatgcacctgactttatttttcagccctccacagtcttcagatttggtaaaagtactcgggagaccatggcaaagatgattgaagtactcggctttggagtaatctggttcgagagaagattatcttttcgactgtgaaggtctcaggggctactgtggagattatgggtaccccatacccacacggcatggttatccgactagttataggggataacttat

SEQ ID NO: 40636 - DNA, 1291 bp, Oryza sativa
tagtttaacgaaacatttcactacataatatttttgtagataaatattctttttaagtttctagtgaatttatcaataatttctattgaaagaactagctgcatgctgtgaaggattgtcactggcagctcgttgggttcagggactaataatagttgaatacttgaatcagatagcttgttgtgcaagctttgaagtcaatggctggaatgcacaagacctagtgacagtattgggcgatatcgactttgtcaatattgagggggagctaaatagagtagcacataaactagctaattttgctaagagtgatttaggtacagcggtttggttgggtaatattccaccggttattgcatctttagttattggtgaatgtaattaggcatccttagttgagtaataaagatgtccctttcttcagaaaaaaaaaacagaagaaaatgtagcctgccctcatgtaccggtagatatgcaaaaaaaaatatatggagtatagtaataggagtgtgtatgtttatatggtcattatcgcaaggctagcttaattgtattattttcaattacatgattattagtaagtgttaactactttctccgtctcatattaagttcattttagctcatttcatttgtcccaaaataagtctatttttaagtaattattacatcggagtttgtaaaagtagagaataattgtattgcgagtagataaagtgagaaatagttgcattggatttaataaattaggggtatattattttttttattggtatgtgtgggatgggtgcaaagttaacttattttaggacacaagtagtagaactagtatataaatctacaacggtctgattttacactaagaagcgcgctacattacaagaaacaaaaatcacaagtagtacgtacttaatcgaaattctatgcgagaagttatcttatattactgaaagaaatttatagctaacaattcacagtcgtgggaatatacgaacatttcaatatactatcaaaaatataaacgtccacgtcctaaatatcatgattcttaaacaagcacagcaaaatgaatgtgactatccgtagctagagttttatatgaaatcgaaatatacaacatactcctatattcccagaaaagatatgatgaagtgcaagtttattacattggtagttcggccaaaatttaatacttgcatctaaaacaaaataagctagctgaacaaaagcaactataagctaatcaagtagccttgacaacggcgacatgacccaattcaacttgtcgaaa

SEQ ID NO: 40637 - DNA, 653 bp, Oryza sativa
aaatcaatacaatatattctaactttacaaatgagaagcatgttttagcaaggaaggaaaacagtgcctagtcataaacgttgtttggttgtttcctggactatgaaatcagtttctgtacaacgattttcaatatatttttcatataatcctgtttggtacttgcaaccgaccaaagtataactaaaaccaaatttgtagaaaaatcagaatattgtggttaaagcttttaacaaaattaatgctagaagcttttaacagaaagtgcaaatccaatccttgtactggctggctaaacattagatcatgaggacaatcatttcagcattgacagtttccaccactgtacatactgtttcacattaaatatgatgatccctgaagaagaaagcacgacattgaagtggacattgttgtgtccgcatctagtattaatttttttttcgcgaacacgcaaaaggattgcacgtaaatatattagaagggaaaagaggttttttacacaacgcaatcaagtgtccgcatctagtagacgatttcaaaacgtgggaaccaaagctctcattgccagtgcgtgccttactgtttatggcgttatttctgcgggaattcatcaaaactaatctaacaattccactgttgaaggattctga

SEQ ID NO: 40638 - DNA, 626 bp, Oryza sativa
tataaccatatcaagttagatcagtatcggttgggttatctaaattattaactgatcatgatttgatatgtttatatagattgatttgtttatataagtttgtactagagtattagctggtatattatctttatctatctatcttgttctaaatattgtttcatcgactattcatatagtatcgtccgactcatacttgacaaactcatttgatgatactacagccgatgaggcatatttaaggtttatgcttaattcatacatcaatccatagccgatctggtccaactatatcagctaggatcactaacgatatgtcatcggcctatcagccgatcagctatcggcaactttgcttgttgtttccttgctggttgcagaatcaaaccagctggcacgcccttagcacactcgaggcaagctttgcacctgcactggagttaagcagatctcccaagccactgtgtttctcgtcaacagctagagatattggataagctatagctatgttatggtgtgtaaaactgtagttgctgttgtcaccctctcgagtaacgttagttcgttgagaacttggaacaccatgatccttgtccttagtagcgtaagtgaagttagcctcatct

SEQ ID NO: 40639 - DNA, 515 bp, Oryza sativa
tgcctcatacctttgttcgacagcatagtactttgcctttgtttctccctaaatcttaataaatttggtgggcctaatcctttggccaacctggcaaatcatttcagtaataaaaaaatgtgttttcctggtcagattgatatatatgtatgatttctactaggctgaaactcttggcttggagaaactttgttgcatactgtagcaggagctgcagcagattgaaaattgatggtatcaaaggttcttaataatacaagcaataagttgtcaaagaatcattgtttgattttgtagtaccaaaattccaatcacacttagtggctaatctttttattttgactaaatgccacatgttagcagcagtagcagaatttttttattttggtttcaggttttagaactgatgttatttgttgctccaaataatccaccgatattgtcaggtgggagctatttgacttgtgtggctagaagtattcgagtcaatcatctgcttgcctcggcctacttca

SEQ ID NO: 40640 - DNA, 1162 bp, Oryza sativa
tatgtcctaaccaattttattctaggttattatatatggggacgaaaagagtacttagtacttcacgtggatggagaatagtgcgtttggatgttgcaacctgtttattcctagtattgggtgttcgtgttgtagacgcttggcgtgactgtttatttcccgagttattatattgtattttttctgctttatccataaaatacgaatatatagctctatttttttagggagtattttgggggagggagtatctcccggtgaccgtgaagaaaaccaaattggtcgactcttctgtcgctgttactaatcattagaggtgacagttcaggtgttactttagatttcagcggagccaccgtttcgcttattttagcgaaacgacatatttataaacggaaagtaatttgtaaataaaacttttatatatgtgttctcagcgatctaaaaataaagactgaaaaataaacttcgatgaaaaaaaccttaaaatcagctttaaatttaaagttaaaaattcaaattttgaatgataagcataagcataaacgaagatagtccatcacccagattccattgccggagctaagcacacgtgggaaaaggcgtcgtcctccaaacaagcaaaaaaaaaagaaagtggtccacgtggactgaagccattggccaggtgccctcatcgatcaatcgcaaaatgcctcaggcctaagaaatctctaatcctggtcctaaacttcacgagcaagtcactcggcatcccggaagattccagtaggcgcggacacaccaacgcaaccgtcgccaacgccgccgcctccgcccggctcgggtcggaaactcggaacccggcgcgtccgatcgaagcttccgacctcctcgcccgcgccgacccggccacgtcaccaccacccggtgcaataagaccctggtcggcgagcgagttcgaggcaaacggcgcccccattcgaaaatcaaaatctcttcctcgcctctctctctgctctctgctctcctcgccttcctctctcgccagttgctccgcgtcctcgctcgagtgcgcggcgatccatccgggagggagaggtgcgtgcgctctgatcgctcgggaaaccgtcgtcctgctcgatcgcgctggttgatcgcgattcgccgcagcggcattccg

SEQ ID NO: 40641 - DNA, 1441 bp, Oryza sativa
ctcgtgatgaaaaacaatattcttataactctggacttaaaaaacttataccctccatcaccacatttatttaaggattctagtttgttttagaaaaaaactaatgatagaaaaaataattaagtcgcccttattaatgtattaaatagaactggaggtacctaatgggataaatagtactccttaatccattatatttgacataaattttgaatgtcccaatcctttacatctacgtatggaaagagtaacttagtaatttatttacccgaatattggttctctcagtagatcctccctaccatccaaatgcaaaaaaaatatttagtctcaagctattttggcattaaaaactggtgtcaggcgcccaatgggggttggaaaaaacgggcgcccacgttagcatgacatcaacatgcaaactactttaaactattttttctcttaaattatttatccaaatcatgatccgattgcactattaaatttgttgcaattaaatctttaaaacaagaccacacatgtatatattctgatgaaaaagaagcttattattgaattatttttaaatgttgcacgctgttccaccaagtatatcggaattgtttactaagtagatcgaaaatgtttcaatcgtttaaatctgacgctgtttcaccttatataaaatcaatgtttcagcaaatagtgaaagaatgtttcaattcactgcaacatttgatccatacatagtgaaacattataaatacactaggtgaaacatttttggtggaacaacaaatgaaacgaattcccttaataaagggtttccataatatgtggctgatttgttgcaacaaaatgtttcaattcactgcaacatttgatctatacataatgaaacattgtgagtgcactaggtaaatcatttttggtggaacaacaaatgaaacaaattcccttaatagaggcttaatagagggtttctaaaatatgtgggtgatttgttgcaacggagtatatggtggagacacatggaagttggtggcacggacacgtggtggggcccaggagcacgtgcacgtctggggagagcacccgattttgctctccccccgccggtcgcccgaggtaagaggattctcgttaaaaactatgtcagtaatgtattaaactgaattggttgtcttgctagaatcttagtaaaaatggtacactactaatagcttatttcacacgataataactcttctttacaataatattaaaatagagtttctatgataatattttttttataccagatggggtgaaagtaattttttttaatcataagaagagggagtagggggatggttaatttacctaatgtaaacaatatgttgatctcttataaacatgtacattttggcagtggcgatcctaggtacattttcccggtgtcctcagaccccggataaat

SEQ ID NO: 40642 - DNA, 642 bp, Oryza sativa
tggcgcaggaggaggcgttggtggtgtcgccgcggcagagcgcgagggcgtagatggcgtcggggggtgcgcccgaggagccggaggcgaagagggagggggaggaagaggcgtacgccgggagggaggtggccaggtactgtatgttggattggtacgtgctgttcgccgtgtagttgccgctgctcgtgttgcagcgatgccatggcatgggctgcgcgtcggtggcgtgaggcgcgttgaggaacacgccgacgaggcatgctgcggcggcgaggtagaagtacgccatgtaggtggtgcatgtagctagcttgacgaagggtgggcgagcttggacgaagttggcaggtctagtagggagagctagcgccatattgttgtgtttgtacatacggcgttcgtgaaaagaaaatttttcgtgtgtcacatcggatatttaacttgatgtcggaagggttttcggacacgaatgaaaaaactaatttcataacttgcctggaaaccgcgagacaaatcttttgagcacacatgtaggttactgtagcacttatggccaattatggactaattaggctcaaaagattcgtctcgcgatttcccccctaactgtgggtaccgagctcgaattcgccctatagt

SEQ ID NO: 40643 - DNA, 540 bp, Oryza sativa
tccgcgtcgtttgagaagcactcacttagttgtttttagaaaagggtccaaataaaaatcaattgcaaaaacaacagcctttccttgaagcctgcattaaacacctatttcccatggcttgctgagtactcccgtactcacccttgctctatataaataatcccccccccccagttgctgaagaagatgaagcggaaccggctgatgaggagttcttccaggagcaagccggctacgatgagttttagggtttcggcctagttcccaagtcgcgcctgtgttgtttggtccaagtcctggcttccgtttcccttttgtaatgcagttgtgagctcgggatctgtccgcagcccaacatgactgtacctctactctataataaagagacctctgttgctgtgatattctgtcttcctgtgataccagcactgtttcctaggactggtatcgaataacaggttaatttggagcgtcacgggctagttccggtcaggactagttcggggcgtgacaagagatggtatcagagcataggcttgg

SEQ ID NO: 40644 - DNA, 528 bp, Oryza sativa
ttgaaaataaaaaataaaaacatcgaaagaacacaatacggtattaactaaattttttttaaaaaattctgaaattagaaaaaaaaagattttaattaggaatgcaatttataaataactaaaatttgtgataaaaataaagattattgaaataaaagactatctaaaacacgtgacgagataaattaagtaacatgcctataaagaagtagagtggaggcggttgatacgacatataaaaattgttaataaaacaccaaatagaatcctaatgacgattaaaaggaggaacatcaggtaggccgtgaatcaaacgagtaaggcggttgtcgagacttctataaagtaaaaaaaaaacacattgatcatcatattcgatttttaaaatctcagtgacaataaaaaggagaagcagcgggcagggtgtataagagtatagttgcagagcccgcgacggttgacaggacttctagaaaataaaaaaatgaatttcaataataggtatgtttgatttttagaatcataatg

SEQ ID NO: 40645 - DNA, 1214 bp, Oryza sativa
cggagagaagcagctatgccgcattagctcttcgctggtttcagaaactcaacttgttccaggtatagttccaggtgctccgtgctcgtcaggactgaaagagattatagatcttatttggtgattcgcaggtatgataggctttctcccacttttgttttcctgtcatgacatagaattagtgaagagaaaaataatgcatggcggataaatgattgcaacttgcaaggcagcatgctgaacatgcacagctcagctctctcttgcctaggaaattcttggactaggagatgtgtttacggtgcagttggcacatgcgttcagttgtcaacgcacctaaactcttcacctttcgtctggatcaaatgaaggattgaaaatatgtgactcttcctatcttaattccatcggttggctagctccttctagccaacatatttttaaaaaaaaaaaattcttggactggcgttcccagccttgagtacactgaatcgcatagaaagtactcatctcatattttcatgtcatgtagcatcaaatcctctctatgactttatggatctacggtttttgtttaggtttcctgttggtacttaattagagttgtttcttgcatattttacttcagattcagtcaagattcgaagagatcttatgtgataattaacaggtctgatgaccttgctcccagttttgtttttgtgtaatccgtttactgaaaagtaatgcatggtggatgaattgttgcaagaaagcatgctaaatacgcactgtactgtgcagaagttctgcagtgcaggacattcctgccgctagtcgtgccttggacagccagagctctcgaattctcagccttaagtacattggatcacatacaaggtactcacctcatgccatgtatcatcaatcctctttatggacctggagttaggtgcaccttatcagcttaagctctcaaggttggcctgctcctcatcactttctatcttctatatatgctgtgcatgttaatttcgatggtttgtctcgtgcaggtctggcttcttggagtccatatgggcctcgtgccattctctctttgcactgaggtctgctgagcgcctggatgcttatagcatactctctctctctctctctacttgtcaacactgaaatatgttttctcgggacctgacgagccccaagactatgatcttacgaattccaatgaattt

SEQ ID NO: 40646 - DNA, 545 bp, Oryza sativa
  unsure (1)..(545): unsure at all n locations
tttaccttgnattttagcaaaaaatcgccccccttgccctcccaaccgatttgtgaacagtacaatggtcgggatggaaagcagttggcagtttgggggtatttatagatccaacacacctcaaacgggttagataaaaaaagcccgtcaaaggtattgctcatacctttgacgggcttctattcaacggcccgtcactggtatccgctcacctgtgacgggccagaaatgaaagccgtcacaggtgaggggataccagtgacgggttggaagcaaaactcgtcactggtatacctctgacgggttttcctttcggcccgtcacaggtgaggggatacctgtgacgggccgtngcctggtggctcgcccgtgaccttatcccgtctgacccgtcacaggtaatggtcactagtgaccaaatcgtttgcccgtcacaggtatcccgtcagaggtgtgaggatctggcgtactgctggtgtctgccgtccagaagagccgtctcagcgtgcacctgtggacgcggcgcggctgcggcggccatggag

SEQ ID NO: 40647 - DNA, 517 bp, Oryza sativa
ggtggactggcgctgagtttcccacagtcagcgccattatggctggcgctgagatcccagcccgcaagccatccaggaggcttgctggtctgggcctgggggttgcggccaagtcccacctcagcgccagtccggttggcgctgaggttgggcacctccgcgccgaagcggttggcgctgatgtagctgccacgtcagctaggggatcggcccggccgccacggtggcacaatgtcagcgccagtcccgttggcgctgacacgaccaacgtcagcgccaatgtgtttggcgctgagggacggcctatttttggttgaagtttttggcaggggttagtttcgaagtaagttttccaaaagggtcaatttgtcaaaaaaacggtcgctaccaactaccaagccaggaatgccactgcaaacaaattaaagcacacgttgcaacgagaccaaccctttcagcatcaagtactgagttcagtttcaaaaaaaaaagtgcttcctccgtttcacaatgtaag

SEQ ID NO: 40648 - DNA, 1953 bp, Oryza sativa
ataatagccccgatagcacaagccatcgagacgggttacctcttgtcgagataactcactgaaaagaacaaaaagggtggtgatgcgccgaagttgtattggattgtctcccgtattaaagtggtatggggttcatatttataccccgaggacaaaattgggtccattatggacacgacttaaactttcccaaagataaaataaaacaagaccatacggcggtctattaccaatctctatcaaacctactcaaatatcctaattaatcgatacaattgtcataatcgagctctatctctaattggcgatgacagttattccaacccaggctcatgccaagcccaactcatagcatatcggcacaatcagccacttgcgttatcggcttgaccaaactcaactttgtttctagccgatatgatacccagccgatacgctacccgacttcaaaaccgactcgatcttgctccttcttctccgagtctgatgcaaaattccgttgttaacactagcattgaaaatggatatccaatgtgcgtataaaaccatccctaagcttctgattatcctcctcctacatgggtgtatgagtggcaagagccccagtggtatcctcaattgtacggtcagtggcaatcaacagcatcatggacaggtcaaagttagtagaaatacaacgtgaggttgctacactcacacagctcatgtccacatagaagtacatcatggtatacaatcggtggaacacctagctatgtactatgtcagtatgtcatatccttcgtttcgaactagaacttctatatttgtgtttcttgtcgtaatgaactaccgtatctatagccatggacattatattgtgaactctattgtttgagctacatgtggacatcattatgctttgaaatgtgtgattgttgaattgttatgctatgaattgttgaattgctttgaagttcaaaatatagaaaatatcatgccgaatttttgtattttacatccaaaaggtaggtttgaaaatatcatatatatttttctaattatctctaatttctatacacatttaagtgtttttcaattttttgtagcattgttctgttctgctacacaaatcacggctaccatgcaaatatcgtggttacagcgccaaaccatgcggtaaccgtgaccaaaccgcgaaatcaccgaatttttgaattcaaatgtttgacgatgaatttcacagggttttcagtaaccgccttactgcggggttatggtagcccccatccaaacggtaaggaaaacactgctggtagcaggtgttcagttctgttaatggatgaatcaggaaagatgtgccacgtatactgagtttgactcgttcaattatgtgctagtcatgctactagttagctgcaccaaacagaagtgttcttattgagatatgtatgatacatggaaaaccctgtcataggctgaccattctggggataccattacttgttcgcactacaaaacactcatgtgctgtgcagtctgaatgcactggctgcctggcactagtagctctggaaagcttcagtttggcttctttgatatcttgtttgcatctcccgtgtactgtacatgtaaatatgagtgcgcactgatcattgtatacaaatcattttttaggatgtattatgctctacagactactggagtacaatatatcagcttcgcttaagctatctctaaaggtttgttaagacttaagagtcgccacgggatttgtatcattgtatggaagaaggcgcatggtaccgaggatgagaacgggggaacatcatgcggaaaactggtgtggaaggggcgcgtttgtgttgtttggtatgcgatggacaaggctgagctgcatcaccatcaaggcatcaagacctgcatttgttttctttgttgtcatcatccttgctggactcgtccttatttgtt

SEQ ID NO: 40649 - DNA, 540 bp, Oryza sativa
agttatcattaatccgcaagggttcatccaccttccccaagcctcgtttggtccggtttaccctcgcatctagttttccatattcccaacatcatcatcatgaccttcctgcccatcgggcaagatcacaccacttaatctaagcaagattaaaatctatgagactagtcaagtgtagtacaagtcccggcgctcaataaccgcgagcacggctattcgaatatatttgatttactcacactgcagtggatgtacgcttttaatcccacactccgcgacttgcccaacacatgagcctagtcccaacacatgagactttccacgatccggtatttcagtcaccctcgcgtttcggcacccgctccaaggactatgtacctccattgcacccttggcacaacacaccacctcaagccggcggtgaggagagtcctggcgcccctgggatcacaatgggttatattacatataggttagctccattttagatttctgatgtcataaaccaatccacatcccttcaccttatctcacatcaca

SEQ ID NO: 40650 - DNA, 635 bp, Oryza sativa
ccgaccgagcgttgtaacgggtgaagtctattttaatcttattattgttatatagtttaattaagatgtggaaattcgctttgatatatgtatatattttttagaaaatcataaactgcagttgaggttgatcgtctcaagttagcatgcaagttttttttaaacggatttcttatatgtttccttctgtattactaagagccaacgaaattaacaaccgactcaaatacggatatgtattgctaaagcaaacgaacttaaaagctgactcatatacgaatgacataccaaaataccgataaaaatatcttcaatttttataatagtagagattatagttggtcattacacgttacctttctggtaaaaagaaaacattatctagatcgtggcccatgtaggcctggccggatgtcagctcgctcgctgtcctctatccggtacctgtaataccttttcttttttcttctcttggaacaagcgaagagtagaacaagcgaagagtagagatttttgataagtgaacagtaatagattttagactggccttgagaatctttttttgacaaaaacatgttaaacttttatactagtagagaagaaatatgatattatcttatcttaattcttgccca

SEQ ID NO: 40651 - DNA, 3459 bp, Oryza sativa
aacagaggtagtagaaagcattaggatagggagaatagccaatatgatccctaaagtttcgctcctggatcattttagttcttaatctttcatattgtacaaacaagttctttaaatttgtcatgtgggctgatatagtctttggtcccaccaaaatcgccacatggacatgccacgtcaccttcctatgtaaaatctatatgatttatccaatttaccctcacatgtatcataggaaaataaaaacaaaagaaaaagttaaaaaaatatggtatatgtaagagcaaaaatatacttcaaaagggtgaaaaaaagaagtatttttttcctatgttatgtctaattcacacctatatttatttttctatgatatacgtaagggtaaattggacaattcattatcgattttgcatgaatgatgacatggcatatccatatgatgattttggtggacccaaggactattctaggccttatgacaaagtttaaggatttctttggaccatttaaaaggtcagagactaaactgatcctatagagaaactttatggactaaagtagctattctcccaaaaataattaggaaaagggtggaagcataggcatggtgaggcaaaattatatggaagagaggagaatggaaagccgatggttgttcttcccagctggctgctgcccttgctgatgccaagtgtcctttctcttttgttttttttctcaattacacatcagatgtacatgcacacgaacaccacatgcacacgcctgcgagtgtgcccctgatacacggttaaagacatagaaaccaacagcacatatttggccctagtaaattcctattcaaagatcactcgcgtgttttatcggtggaccctaggatttgaacctgataggtggcgatcagacaacctctgcctaaggcctacatgcgtgacaagagctttcttgagtttttttccattgtaaaatggagttaaaactcaaaacatgttgctctctctatctaaaatattgaacattgctaagttatttagcagagattaagattgaataggaaagactttggtgcgctttattagttgagaaatggttgagggtgagagagtagttaagggtaagttggtggataggacaagccttgttccggccaactaaatcaagtggccatattttaacaaatatacttatattaccttgtcctatagttatgatatttttgttttatcattattatccataaacattccatgattgacatatcatgtaaattgtcacacttttctcgtgaagtcttgccaccatagttattttgagccatcaatgattggtctatgctgcaaattatctctcctcacaaagccacactattctagaccaatcattgatggctcagaaaaaggacccgtcaaaggtgacggttatctgtgactaattcatagggccatcactggtgtgccgtcacagatgtagggttctggcgtagtgtctaactcgaacgtgcatatttaaaaccgagcgtatcaaaatgtcacgtcaaccggctagatttttatcatatgcctaaatattggaagctggcctaccatatagaaacatacatttacactgtatcaacgacgattcaaataaaacaataaccctgatgagcaacatatacacttgactctattgccacactaccgatgtgcttccatgaagaatttagtgaggatttacggtccacacgttgatgcaataataattagcaatgactatatatttagtggtactccctccggttctatattaattaacgttttggacaaggttaaggtcaaacttttataatttagactagcaataactttaaaaatatttagtttaaagtaactagaacaacttatatagatttatcttttaaagtactataataaaagtaaacatgtatttatttattatatatattataatagaaaataaggttaaagatgtatcttgtagatcgtgtcattgtccaaaacgtcaattaaaatgaaaccggagggagtagtaaataagctagattgaaaatatatattgacgtttgagactgagcatgccagagatccaacgttattgctatagcaattaatagagaacaataatcacccatgttgagtgttttaactatatagagaaataaatgatatcttaaagagggtatactgccgtatgactgcatacactccatctggtgtgtatatgtgcaccatctggtgtgtacatgcatatgcaccatataatcgaaaaagaaaaatcatcactaagaatacattgagtttgcttgtcatgtcatttttttttaaaaaaatcgaactagcctatattccggcctgtaagtgtggtctgtggaggtccatatactagtcttgaatgttggaacatgctaatcagtcagaatcacaatataacacttttaagtacgaatttaggttatgtcaactgttaatcaatccccaacacgacaagtctcagtgtaaagtaaacactcacccgctgccaactgaaagtggttaattttgaattagccttccgatagaatgcttttaaagaagacagggttgccgtcagtttccatccagctcggtttgatttggtactcaatttcgagtttggcaccaagtaacaatcatgtcagcactcaaactgatctaaggcatgtacagtgttcctgtgatggcagttaaatgttcactttcttaggagacaaatgaagccttgtgctgccagaaaaatcgtaagaggtcatatcatggatatttgacatattaatctggaagtcctcgaattcaatttaaccctgggtttttcgcatggaattttctactagctagtaactgttcttgacatgccccggaatttctataattccaatgtgagcccttgtgatttcactcaactttctttttgaggaaacactcaatttctaatctattactaaattatattttgattactcatatgccctgagtttttttattttaatctgatattagttgaacatgagttgactgctttttttctctctcaagcctttgacttttaacattaaggacctctagataaagggaatgtatacataagcttaggtgcacacacactaaagacaccaactaataaatatcataagaaattctataaaaaatttacacttacttataataatattatacataagtgcacgtttcatctttaaattcatcaaataataataagttcatccaaaaccacaatttgtttttgcataataacaaatatataacttcgaaactatatagatgtatgctatatttactccaatgagaagtctagctgtgcaagggagtaaaatgtcattcattatgtcagattttaaactttcataaactcgaactatataaactagtttgtcattaaattattgataaatatcattgcctcctatccaagccacttaagttc

SEQ ID NO: 40652 - DNA, 608 bp, Oryza sativa
ttgaaatttcagcttttacctgttttcatggatgctatcttttacttctgaatcatgcctaaccgaaaccctttttactatactcaatatgcagcatttaccaaagtgcagttggttaactactgtttgtgttgatcgaagattcattaagttgtaaatattgatgttacctatattattaatattgctttaaagaacaatataggaaaatatgaaaccaatatttccattacttgcaggttctttggaaaggtctagggcttgatgaaggaaatactgttggaagttggcaggggtatgttcacatatgttcttatcctttgtggaattttataatcgttgtggtaggttagagaccttttcattttggttttgtggagttgagattaagaagactatagtaagttgcaactgaaaattctgaactcactagccagctactagggtaattgagtactagtctaatttgttatatggaaattgacacacttaaaatttggtcaaacggaatgtttatatactacacggtgattatgtttctaaaatgtttcgacaataaagcaacctaggttcccattgtcattagtattactacaatgcataacaaa

SEQ ID NO: 40653 - DNA, 546 bp, Oryza sativa
  unsure (1)..(546): unsure at all n locations
tcttatggaagaaattgcaaagcaagaacgtagggtgggcataatataatatttggaaaacatgaccatgaatgaagtagatacaattaaacattaccgattgtattgttgatatttttcttaatagaggattcatataggaggnnnnnnnnnnnnnnnnnnnnnnntggatggccatggcgactgaccttagcagtagcccagagctgctgctacaacgacagtatctaatctactaatagcaatgatctgcaaccggagtattcagaaataaaacaaattaaggtgcagcaatacataaaaccggtatatgcatatatatgatctttagagtcgtcatataataccatgatcatgaatcgcctcctttaacaaattgtacatactaaataaatttcaatgttgttgaatagggacagtataaatctgaagaagaaacaaatccaaataaatgtcagtcgtgttgaatagggacggtagaaatctgaagtgacaaatccaaataaaattcaatcctattgaatagggaccgttcaaatctgaaga

SEQ ID NO: 40654 - DNA, 922 bp, Oryza sativa
tatcaaaaataaactttttagatttagaaatatgactatcaaaagtagatggagggagtatttagtattttgttggaagaaatataaacggaatgcccgacaaaggtgaagtttgagatacaaatatctcaaatagttatagcaatgtaagagagaataattttgattattattgacctttcttcagttaaaatggtctacatgtgaggtaatctatgttttatgattaatgtaaaaaatccataaacatagtgcaatcccttactaacttattggatcaacatcgctcaatcccttaccatcctataccataaagtaaattgaaagccaaaaaattaaacattttctatctttggaaaaagtatagctaccatatctaaacaaagcatcagaaactctcttaatttttttttcttgaggatactaatcattagggcagagagattgtatcgatagaaacataaatgatgaatcccctattatgttcaattgtgtgctattacaaagagcatcctttatattctactaagaaagaagggaaagataagaattaagttacatccatcacaaactgtagcttattaacccgtatgttaagtaagaacatcatatagcaaagaaggttagcatggacagatgcaaggtgcatccaccataggatgcaaagggcgttgcccttcatctaaaaaaaatgaacagatccaaggaccaatatttacctaaattaagttcattgctgaactcagtccctgatagtctgcagaaaatatgatattgttttgttcttatggaagaaattgcaaagcaagtaacgtagggtgggcataatataatatttggaaaacatgaccatgaatgaagtagatacaattaaacattccgattgtattgttgatatttttcttaatagaggattcatata

SEQ ID NO: 40655 - DNA, 1141 bp, Oryza sativa
cccctccgggtttcgaggctgaacccgatgagcccgaggaggaagagatagaggatccatttgttggggtgcctcctgattatgatttctttggttatggccatggctatggctatccccctccgcctcctccagaggatcctcctcaggcgccccttgcttgagtctgtgtctcttcgtcctctctttttggtgtcttgatgccaaagggggagactatctatcatctctatccttatgttggtcgaacattagtggctttttatttgtatgagacttgtgtgtttcttaagttagtttaatgctttgtaagactttattgtttaattatagatgatgggatgtaatggatattatggtgccttatgtttaatgtgatgtcatgtctcttttattctatattgtggttgtgatgagatgatgatgtatttgttgcaatggtctattctctccatgttgtgttggtgttgagatgaaatgattactttgtttaaatgcgattctgatatgatgaattgatccttcatgcatatattgtgatgatacttgttgttttgtgagcttcaatgtggatgcaaagatttagggggagctctccacttgcttttatgcacactcttagggggagctttcactaaacctttgcaccaaaatcatctaatattattattctctcttgtgatttaatcgaattgtcatcaatcaccaaaaagggggagattgaaagtgcatctaggcccctaatgattttgatgattgattacaatgcgattagagaggactaacatttttattcaagcaaatgtgaatgttgttaagtcctcaacatgttgtaatacaatgcatatcccgtgaatgcgacatcgcgatgcaatgcggcaatgatcaaatggtatattgtatctttttcctcgcattgtgtcgtaggaaagccgtactattaagggggatgatgtatagacatataaggagtgatgtgtgtgctcaaaatcaatttttcttcgaagcatttctcttttggagtgttctggaaattttcggaagttccgaaaatagttttcggaagttccgaaaatacacagaatcgtgtttgagtgttctggaaatttttggaagttccgaaaagaaaatttccaaaata

SEQ ID NO: 40656 - DNA, 1024 bp, Oryza sativa
tagttaaagatacaataaaattaaatccttacttaggggtcaagttgtaccatctatataaggatgggattttatctatccttagggatcaagttgtaccaaggatgggattttatctatccttataaggatgggatttatctatccttacttaggggtcaagttgtaccatctatcaattaagcaatgaatatcaattagtctaatctctcccccccaataatgttcttctccctagcctaaatctacatcccttctccaggagccgacgccgcccggctatcttcccggcggtgtttatcccgtcatggcctctggtcatgacaatggactacaaaaatacccacccacagataaatttcatcgagatcaatatcatagctctgagtttggtgttagcgaccaattttatttggacccaaccaccaaccatatatctacaggactgtactacagacatacaattagattgaaatttacaattatcaacacaatagtttagacttcttgctacagttcagtacataagtcaaatgattctcatacaatatggaaaaagtttgaaatattcaatgtgcattgttttattaggcaggcatctcctttacagaaggatgagatacattgcaggcaatgcatcaatagaagctgtcttaactaataagccataaattcacatcagtgcttacatgacaatatccatatggcgaggagcatagtgaccacctcctataccaagtagaactttttcactattactgcatcgcaagaaataaggcttagtgcttaaaacggaaacaagaataaggaaaggatacttacttagaaggaaaacaaacatcaccatatcagatactccctccatcccaaacacaagtttatttctaggctctaccatttatcccaaagtaaattcatttctatcaccttatccacccttggtcaccacaaaatgaggagttttatcctttcaataccccttaccttcccacccaccaattctattttcctattaatgagggca

SEQ ID NO: 40657 - DNA, 666 bp, Oryza sativa
aaggtttataaaaagaaaatcttaacagaagttctttccccccccttttctcttcttgggccggctcggcccaatccctccctctctctctctcttcccccacggcccatcggctcctccccgcgcgcgcgccgctgacgggcgggcccgcccgcctgccctcgctgacgggtggggcccacccgtcgtcttcctcctcccgccgcgcccgccgccgcgcccgtgccctagcgccgccgccgccgccaaatccgctcgctcccgccgtccccgcgcgcattaaagagaggggaatcactccccgtgattccctctcccgtttcccccgcttttccctctctctctccctcggattcgtccgatttccttcccgaaaccctcgccggcgcaatcaatggcggccggatcctccgcgaccgattcctccctctccggccgctctttcccttccccggcgctatgtaaaccctccccgtgctccgctcttccgtttccgccgctcaccgctcgctctcgccgtcggattcgtgctcgcgccgtgctccgccctctccgccatcgccgccgagttccgttccgccgccgtcgccactccgggcttcctcccggctcggcgccacctccctcggcatcgccgcatccccgtcgaccccgtccgccgctccg

SEQ ID NO: 40658 - DNA, 620 bp, Oryza sativa
tttagattaaagtttagctttgatactttgccgtgtaatcccgtgatcggttagatcgccagtttgcccgttacggaatcccaacttatcatttgtattcaattcctatctgcaattcagattgcttttatcttattcttgcttgtttctttgatttgcttgtaggaataaggttgatctgcactggcaagatcaacaacccacagataggtgtatcgatcgctaaggcgcaacacaacaacgtctagtacggttgtagttgggtcgtcaacgtttctctcaaatcgtagttatctacaactcaccgaaagatcgggccaacaacagccttgagtctctcgagtggagctcagggttcatcaggtggtatcagagcttttttttgctcagtgttctcaaatttggtcgttaacactactaccagaaaatagccatacaaaaaaattgcatcctatacctagccatatttgtgccattgcattgttcattcagtttttgctttgttgagttttgcgttgcattgtcgagtcatgttgctggtcttaagcgttagttcgtttagagtttcaggttctggtcacgtttgtaccactgtcgtcgtcgtcgtcgtgtacttgtta

SEQ ID NO: 40659 - DNA, 618 bp, Oryza sativa
ccccccccccgcccgtgttgcgcccgtgctcgcgctgacgacgcgcgcccgaccgcgtggggcccacgcgtcaggccgccgtcgccttcttcctccagccgccgcccggcttccctctctcccgtgaaccctactccttccctccctcaaatccgtgtgattcgctcatgggattccaaaattaaataggggaaattaatccccattgaatcctcttcaatcccccccaatttcccccttgaatggcgcccccaatcgccgggaacgcccgcgtcttcctcggccgccctccattgccgccggccgtggttcccgccgccgttcccgctcctcccgtggccggctctctcccccatcctataaaatgggatcctcatcccccgttatctcgttttagccccatcccgagcctccccgtggtccctagctctctccccgccgccctcctctctctcccacgctgccggccgcctccagccgcctgtgccgcctcgaccgtgcgccggccggccgcgccgtcgcctcctccagcgtcgccgctaccccctccaccccggcctgccctccgtttcccgcggagacccccggagctacgtttccgccgtcggcctttccttt

SEQ ID NO: 40660 - DNA, 515 bp, Oryza sativa
acattgtgaaacggaggaagtaataatttgctgactttataagtttctgagcctacaaaacaaagaaggcttattcttctagatcaagtatatgacttacgatccatgctatccatacattgtatttagttttagcttaaacatggacttaagatttaactattcaaagacaatattttgtttagttaatcatgtcagtcagaaagcgtgttatgctcttttgcttatgtgtattgctacagtaaaaattctgtttaaaacatgttctatattgtgaaaagtcggaaatgcaacataggcatacgagccatgcatgatactcttatgactatttatttctttgtccacgaaaccaacttcaacgagaattacgggtaaacaagatatacaagccatacatgatacacatctaaccaactctaactacatgcatgtcaagagttctagttgagtctcaaaagtaccaagattcaactcagattccccactacaactagaacaaaaactttacattg

SEQ ID NO: 40661 - DNA, 660 bp, Oryza sativa
  unsure (1)..(660): unsure at all n locations
taaattttgtgaaaaagaacatgcattgtactccaaatgtctgatcgcaacattcgtcactaaataaaaatcatttgtaaatttgtcatagcacagtagaaaagtcatattaaagaatgaatgcatccttattgaaatcacagcgatgtaataatcttttcgtgcatggcatagatgtgtagatcatgaaatgattgcagttacttcttgttacatgtcccagcacagnagaaagatgagtagcaaaaactaatccagaaagaaaaattctaaaatcaagttttcctaatagacgcacacttatgaaaaacctcacgagcaaactaccgaacacggacgtagcgggcttaaacataagcgtgaccaaggcactaccttttctgtcttatatactccctccgttgagtttcatttaaaaatttaatacaaatatgaaagtatataattactagaaaaatgcccgtgcgttgcaacgggtgaaaataatctatctattaaactataaagatagcttaaaaatgacacgatatttgctttgaccacattgaaattgttacattaattaatagaaaaagataatagttgtatatacattatagaatgattgtatttatagtaaatgtcacaaaactaaaattatttggttaaatccaattatgt

SEQ ID NO: 40662 - DNA, 599 bp, Oryza sativa
tcctgcagccctcttagttccaagggtctcacatacacgaattatcaatagattgtatgatgaccaacttatatctggtgcctacttactaaattgcgtgcataaaggtgcactctagcttggcaaatagcaccgataccgcctataacagagagaaaaaaacacttacctgctacaatgagttattacatgtgactgaggtgccagcagcatctccattgggccacttgcgcattctggccttgagggcgccgcattcgaaggtgcgaaacaaatggggcgtcttgcgttcctcacggattgctccttctactagtccgacgtcgccgttggcggacatcgccgaaatgtttgtctggaccggacctgccccatcctaccctactgcttgtctacattttatgaaacagcatgctactcctcttgcaatggcatgcatgggggggcccatgaggaccgcttccatgtcacgccgtgaagacgaagcatggcgcgcacgtgtcgtatgtgctggggtacatgacgggacaagggcttggggggcggatacttcatcatatacggtacaccaccattgatcgggtctcaggtgactaccc

SEQ ID NO: 40663 - DNA, 893 bp, Oryza sativa
tgttgttcttataaaccgggactaaaaatcgtttttagtcccggttttaaatggaaccgggactatcgtagatttgggtcgaccgatcaaagatggtttctccatcagtgatattttgggatggatgtagtatatttgatagagcctggggtgaaaggatgctagctagctaagagctagcttcatcatcgcatgaaacgaagagaaactaagaaaaatgcagtaacaatgacaatatgtacactcacctgtcactacaagtctacaacacgaaaaaagcctacagcaacgcttgtcttgcaacgtaatcagaaacgttgttgggcttgcaagtcgcaattgatgcataggctgcatgcctagctaccttctctctgcaagttctgattggaaaaactggcatccccaaaactctactcactgatctccctctgctgccttcttctcccactgcgcattctcccacggcatatgggatggaatatatcttaatttggcctataactttgtcagtgtaaagctcagatgaagcggtgagcgagctcctctagatgtttactcaatgagattgcatgtggtttgcattgtctctgctaattgggttgagatgtgtattgtcttgggttgagttccggtcctttctctctgggagacaagttaggatacgaatttgagcagacctgatcgtgcgctattaggactttgtcttcctttcacagtcgaggatgttttccttatctatgcaagactatttttatcttggagttctgttttcgtgtaggacatggtatatgcatcgaggtatgtgcatattgttggcaacctttggtgacaaattgacaagcacgatcgtagcaccttaagccttgcggtgattctagagtcgccaacca

SEQ ID NO: 40664 - DNA, 667 bp, Oryza sativa
tcctgcagcccgggttgcatgtgtgcactgagactgcttgcgtgtcccgccgcaaaaatcattggccagcccgattttgtgatggtccaaccggccggcgtcaaaaatatcgcggccctcgccagcgttgatccaagccgaaaagtgagtcagggctagcggctcactaataattaactgcaggtgatgagttaattaatcattgggttgccctgttaggatgttactactagtagtattgtactcgttacatcctaaaatatactacatcacttaattaatagcgataattattttaaaagggaggtggtagacttgtatgcaatggttgcaggtaggagtagcacgttgttggtggaccggtgcggagcccacactcgcgcgaacgaatgtatgagagaaatgggaatatgtgtattttgaaataaattggaatatgcgtcgcgatcgggggtccgtatcgtgaggcggtgagcgaatgaattctcgcggcctcccagagcggcggatgggtacggacaagaagcaggaactaagcagtgacatcacctcaccacccatcccctctctatctctctctgaatgcttccgaatccgcacgaatttacagtccaaactccaaacattgtgtatcaaccgagatttgacccctaatttttacaggatc

SEQ ID NO: 40665 - DNA, 533 bp, Oryza sativa
ttttcctgcttttcaactttctaggacagcatctctactttcagtttggatgctctaggacagttaggacaacagtttgttgaaatgctctaagacagtttggtggggtgctctgctctaggacagtttggtgggatgctttgttttagaacagttggtggggatgctctacgacagcaccctcttagactggcatggctgcatggctgctacaagcagctataaatatgtatccaatcctctttggaaggacatggcttttgtgtttagtaaatgaagaaaaccagaaaattgccccatctcgagtgccatcctcttctcaatgagagtaaccattgaaattctaacagcatcagcgacaggttccacatgagaaaggctctccactctctgttagcccaagctttgctcctcaaacaccggccctctctaatgatcaaacctgtaacatatggtgatcgttaatactgcagaaaagaaaagcaatggtggctccagaatgaatcaactatatgaaaggcttttcaccatgt

SEQ ID NO: 40666 - DNA, 583 bp, Oryza sativa
tatccagcagatcatattattcagcgaactgctgagtaaacgaactttatcgagtagccctgtaaaaatcccgatggtttttctttttgtagaatgggtgaatagtcattttacattgtttgcagcgttgtatccatttttggttgctcggttcagacagttttctgtcttacaattctctgtagggtgaaccagtgtgagcaaccccatttttgtacatgtaaattttggcatttggctatgttttgagtatacggatgcaaccatcacatagaggttatgctgagactattcgccgttaattggtcaaagattttatgtaaaatccacttgcgtgtacgctgccttgatagcggactgatgggaacattgggaagttgggaacaccaactgatgcttatctttgtttcagaaattctagacgcaaaactagcaccttgtaagaaacaagagggattacactttaaagatgagatgacagataagataatcacctaccaaaaacagtaaattgtgttgaacgcaaagacggcatcagatcaaacgcagcatgtcgaattaacttgaaccgtatggaagttag

SEQ ID NO: 40667 - DNA, 1820 bp, Oryza sativa
aaaattttgttttggtgggttgtataaattgtgtgtaaaattttggtacctcgaggtactttctcaatagctagcacatcccgttcttaatagaacgatggcagctcaagcataaggagatggatagaaggaaaggacccaaattagagagaaaccggatggtcgcggtgatgatggtgcatggataccgcggaagcaacggtccgctggcggtaggggcgcaaccaaggcgggcaagtgggattttgcctacttatcccacttttagttcattttttatcctaaaatttatactactatgtggcggatatgggatcgggttcgggaacgtagtatccgacggatatggattatccggtaaaaaattcaagtattacccggataaatatacggatattactcgtattatgtttttgtgaggcactttttctattatgtattggttttactatgatgtattgtgccctatttatttcctaaggtcctaatggcctaatataatcgtataatgtatatatggaattgttaaatggttattgtctatgtgacatataagattgttgctccgacttgatatccgataatattcgtaaccgatagtatatgtatctattttggtacgtatttgttccgtatttttgcctgacattatcgagtttgtatccgtatttgcactatccgtgtccgacccgattctgattataaaatgtgggttaggatatgggaagggtgagatctgaccgaacctgacccgttttcacccctacttatggctcgattactttctctcctctggtcctccctagcttctgacctcatttggatacggtcaagtaaggttatcatatcgtgtaaaaaaaagtaaggttatcgcgtcttcggattggactacaaatcctttagtgtcattctttacctatatacttattcatatttgggtatatcttatgatagatattacttttgactagaaaaaaatacccgtacgttgcgacgagtgaatgctattttaatcatattattgttaaattgttttctaaaaagtacatcctccatttcaaatatgatgccattgactttttcacaacatttgaccattcatcttattaaaaaatttgtataaatattatttattttgttatgacttcttatatcatcaaataaaatataatcttaacatatacttttacatatttatattatttttttgaataagatgaatggtcaaacgttgtgggaaaagacaacagcgttatacaatttgatagttttgatatctagtttgaaacttttattggggtgatggtcatatcttgtacgttgctttcttatgacttggcaagagttctgaagaaattaggagtctgattcttctcgtaagttaacgtgcgagttttttaaaaagatttcttatatcattccttatgtatttctaaaagcaaacgaacttgaaaactgactcaaatacggatgacgtaccaaaatatcgacgggaacatcttcaatttttatgtttgatgtagataaattaaaatcgggaagagtgctactaatggtgttttttttcttctttttttgattaatgtggtataataattcctagtctctggagtgaacatgttagtttttagctatatttggaacaaaatttgaaatccaaaagtttgttatattttagcatgagggagtttttttaattgcgatctaaaataaataacacgctcaaatatttttttagttaaatagagagaactttttggcagcaactgaaaaattactcctcgcaatatgtatgtatgcatgtatatgtgttgatacct

SEQ ID NO: 40668 - DNA, 1563 bp, Oryza sativa
ataatttaaacatgtatatataataacaaatgtaaagttaaattgcaatatcttccatgcacgaaatgccaacgcatctgtgagtacaacatactaaaaaagcacaatatggaattgtaagaacacatagagatttgcaatgaacaaggggtatgatcgtgaacaatttttctttgaaaaaaagcatgacggttatgaaataatagtttccatcccaaataaatttgaatttaaacaattatttccatctaaaatgaataaaactgaatatttattttgaaatcacatgattcaccaaaataataattcccattgtggacaatcttgaatgtgtccttaccatttactgttaaagccgagccgattgggggcaatgcttgcccaaaagaacacaaataaagaaccaattgcaacaaactcagcaaataaatcagtggcacctgaaccatccaaacctgaaaaaaaataacccaagactagtaaataaataccactaataaatcctcaatgtaaattataaagcctgaaatctagaactccaacaaactagcaaaaacatggtatcccattattaatttgagcatatcttttaaaccaccaaacttagcaaatcaattaagtaaatcgcagcatctacagaattatcaacaatttccatggtttgcttctctgttttttccgacacggtcatcagcagtgttttgatgatatgtcaaccacttattcgagttaattggaaaaaataccaaaagaaagatattgaaatatgacagctataacttttctttttaagctacaaaacatgattaccggtgcagagtgctagatccaatcaccccaactcccggaaccaatggattgagcctcctcaggccaccacttccctccatgcgttgcaccttctcctccagatcttgcaggcagagttgacggtaatggcaaggtggccatgatgacggcactatgctagcgtcacttccatgtctatgctcgtccttggccttgttctgctgacatccatggtcacctttctccgtctccacctcatgccgatctggtaggtagtagctagtgcacgccattggcaattgacttggagtgattggatctagtctcaccctggaggtggtggagcctgcatggatggtgaaaatgatgacgaaaagaccggtaaggcggtccggctaccgacaacggtgacaaaacgtgatgacaagggggtggcagacacaagatatagtgacgatgcagttacatcaatgacagtgcatgatcagcctagcgcgtcggatggggttaatgatcgcttgttctttagaataataaatgattgtggcaacaaagtttggaaatgaaagcaaataacattgaaaattattgatatgttactatatataacactatgttgatcgtcctaacacactcaaattaaggactcgtagcaaaactaattaaaggcaactgctttacagtacacaaaagttacgcatatagtaaaagaatacaattaattaaagcagtacaagacattccgtaggttctatttttccaaagacacagaaa

SEQ ID NO: 40669 - DNA, 636 bp, Oryza sativa
ccgggacaattgtgattttggataccacgggaaaagatcagttctccactagtgaatgctctattcactaatgttgaaggtgacaaaaataggctaaaactgtcatgccaagggttccttgctacaataaaacaaaagcaaatgcagatgatgaattagcagtggaaacctcataacaaaagaaccttggaagtgcacgtagagtgcaccattccagtactccgcacgtataaatcgcggtccccaagacatcatgtctggtgaatccaacagcacctctaatgatgtccctgccatgttggtggcgtggccttcatggagaaaagccttatcctcccacctcccagtcctcgacgagaatacccacaatgtgtgcacagacggtggccattccgctgtagcgtccttacccacgagtggacctttgtggcacttcttcttggtaggaatttcaggcaaatcagggatcaggaacacctcatagtgcagagactctgcagggtcgaagacgaggtactcagcactaatgcatagactatcatattctgtgaacggtggaagctggacccatcgatgcgtcgcggggttgcagacaaatagcttatattgttctgagattttgccgtggtacaggat

SEQ ID NO: 40670 - DNA, 757 bp, Oryza sativa
cctgcagcccgatgaaatcactgatactagaggcacgcttttcaaactggtaaaccgtgcgttgcatgctaaaatggtgtatatgagagctcttataaaatataacattaatctatgttcttatagtgtgaaataattaaaactcaattagtcacacgatattaccgcctcgttccacgtgagacacttaatctgtatctacatgattgatcttcacgagattcgggagattaatcgtactggacttggctgagtttggattgaattggaatccaaaaattattcgatttgtttaatccacaaatccaagaaaaagttggatttccaattggagggggcaaaatataaaaatccactgtccctggtttaatgtacgagatcgaacaggcgtctcctcctcctcggcggcgacgctcaccatcttcccccgcaaccaccgccgcgcggccgacgatcgactctgctctcaacgcacccgaagttagtatccatcaggttcaccccgcgctttctcctcctacgccgcctccgcctgcgacgcctgaagaagagctagcttgcctctttacccccagatttgatccgagcctcccaacctgctctgatcgatcgattgttggaaatctcgcacgcggtgatggtgtacaataagaagaatacaacagcgtcgaggcacaccacggagtcagaggaaggcacgcactcgttcgagatcgtgggggatagtctccacaaggcatccgcgtggaccagttca

SEQ ID NO: 40671 - DNA, 585 bp, Oryza sativa
ccagggcccacgatcaagaccttgacagcaccaggaatgtggatcttagcgcaagattgtaagcggtcacacccacaaacccacttatagtataaataagtagctaaaccgatttataatgcaaataaatggctacgcctatttgtattataagtgggttgataggtctgtccacttgtgcttatacccatattgtttcgaggatatccacggctcttcacatgatgtggatgcgaacctccgagcaatcgtattggggtaaaacatcacatgtacacactatgaatggccaataaaacatttgtccattttcgtccgattcggacgtgccgatagcacagttgtgttgcctagctgacaatttgccatggttccatcatagaattggcctttttgtttcgtaaacagcagtcatactagcgttgtttggggggagaaaaagatgtatttgacctcatggatagtgttttctgcagtggccgatggttggtctaaatacaaacgctcttatggcatcatatttttcatcgaaaaactgtgaacttctaaacctttattctatactacatgaattcaaggtataac

SEQ ID NO: 40672 - DNA, 638 bp, Oryza sativa
aaatttataactttcatatagattctgggtccggcggagatcgtttagaaaatttagaaattcacttatccaaatagatctaggaacttttagaaattcacttatccaaaataaattcacatatttcagacttccaaatgatctcaaataaaaatatcatcaactacaaagatgcagaacttaccgtgctctagaaatttgatataaaatttatcttcatccgattttatataaaaaagttatgtgcaaaacacacatatattagcagcgccaacgtaggtgccgcttttaattttcaacggtcggcagataaatgatgaccatatgtgccgatttccaataaaaatcgacacctgttacgatgcactcatagctaccggtttattacaagaacggctacctataagaaccgatacatatgagttgagggattattggtgcctttttttataaaccaacatatgtaagtcattataccagtttttatttatagacctatgaaaaaagggaaaatctcatatgtgtcgttttttatgtaccaatacctatgatagtgcttcctatgaggttctttttaagtagtgtatcatttgaaaaaaatgatgctctaatataaaggaatatctatataaattaga

SEQ ID NO: 40673 - DNA, 839 bp, Oryza sativa
cggtgtcaaacatttcaaaacggagggagtatttatcattgacagttttgaatgaaataaatattttttagcaaatgaccatatctgtttattctcttgtccaaaaatacatttaccactgttggttaagaaaaaataacttggcatttgtcaaagtttggcactgatcaaaaatgtactcaacagtttacttaaaaaagataaaatgccctataaaggtgatgattaacatatctgactatatcaaataaaggtatcccgcataattgcattgaacagttgcagacttagtagtgcactccaggaccagtatctgacacatcacacatagaccccactatgattgtaatgagagagcaagtgcacaggaataaatttggtccatttagtgctcaccatgtgcatatactactacagttacatactactctcaacaagtaaacgtaagatgagaaacccaaaagtcaaggaataatatttctcaggaagggacgacgctgctataaataagtactaattcaggacaagcagtatgcacagtgaacattctatttacctgccaatgccttgaaaccttactctaataaattccaaagcagtactaaaaagggtttttttttccagtttctggacataaactgaactcgagataaatttgaaaatatattgttcatttttttccacaaaaatatccaggatgcaatttttttggcataaatataccatcgatctcgctgaaccattgagcgaaaatgacatgagcatgacgacgcaggtgatgtcgcgcggggatagtgcgagcccgcgcggtgtcgcgcgctacaccctgtctcgcagaa

SEQ ID NO: 40674 - DNA, 2334 bp, Oryza sativa
  unsure (1)..(2334): unsure at all n locations
ccccaaagtgtaataatataggagttagcaaagaagccccaaagtgtaataatatacatctcatcggtcattttgaatttccggttacttgaatcgatattgtacattggtaggaaaattggagtaaaacatacctataagtttattcatgtctaaagatattcaagatatatggtggagataatcccttgtataccgctaaaattttaactgatcctttctatgcttctgaattttgtttacttccttgtatacctccaatatttgattttgatcctttccatgcccctccattcaattgaccattagttgaccgtttaatttctataaaaataaccattttacactttgaatgaacatagaagtttatgaattacattattgaaaatataaaagtttgtcacgtgagattattaatagttatgattgctatgcgatacattatttatgataaaatttacttttagataatgaaataaaaatatatatatttattttattttttgaaaatcataaaaatgaggagcattcatacaaatataggactactaatgctcacgatatttttttaagaatgctcccgatcaaaaaaaatctattgtcctattaaatttcaaataaaaaaataatttattacatttgttttattttcaaaattttatgaactaattatttagtctcattagttacttaaaatgcacacactctgcacacaaacaaaattttcaattgtttttcaagcttatatttaaacctaaatcatcaagggcattaaagacatttgccaccaaacttaacggtgaaatgaagaaaaatgtaacgggaggggtatggaaaggatcaaattgaaattttagggatatagaagtgaacgggtaaattttaagggtatatagggaatttactctatatggtgtctgaaacaaaccgtagatatataaccacatgttgatctagctagtagaaaggtaccgtaaaagcancccaaatttgggcggggggaaaaatgcttcaattgcccccttcggtacacttagttttacttaatttaaattaattaagagttttgtaatgaacggtcattctataggtattaactgatagaccgcaaaaaaaaaaccaaaattaataggaaaaaataattaaattggtgtcaaattactagttttcagggtttattctaagttaattatagttggtggtatactttttcaacaatagtattaattaaaaaaattctgaaatgtatgtgttgtgatattatatatatatatatatatatatatatatatatatatatatatatatatatatataatatcactgtctatcgattactaataattattaagggtagcaggagctcgatgcggttcatgaattggcaggacttatgtcttcaaggtaagctaattcttgcttttagcttggatttgattgatttatacgcactcatgcacagaagcttagctttgcatatatgaattgatgtctttctcctaaaatataatataacgtgtagataaagatatttggctacaatgttttcttaactgtcttgttaataaattgaatttcatgggatgaatcacagaatctgtacatgcttcgagtaaagaaaaagataagcagtgtagtgttaaaatgattttgtgatatacggttaatcagatcaaagatttgagcaaactctctacccattcagttgttcggtcagtttagagagagagagagtagtgctaggctcatctcaccttataaattaaatttgataggtggacttgcgagatctacgaatctggacatctttatatctaaattttgtactataatgtatcacatcgtagtacgaggttgaccttttttggacggagggagtatattatatcgcggcatatgtgtgttgctgtaggatcaaggaggtcgactagagggggtgaataggcggtttttcaaacttttggctaaaaccgagttttgtatgcggaagcgtaaatcaaaatggttttgcacaattcaaaacctaaatcaactagtctcaagtaagtgcacaaagaagctagcctatgttgaggtttgcaagcctagggtgataatagcacaaataaactctagtatgtaaacttgctcaaagtaaatttgcacaaaataaaggagacaagagacaaggaattttcaccgaggttcggaaactcgccggtttcctaatccccgttgaggcgagcccaactccaccgctcaaccacgaagccatcgcacgcccccttcgtcaagagatgggcaaggcgggagtcggcccacggagaggactaccaaagcctcaatcactagggt

SEQ ID NO: 40675 - DNA, 1208 bp, Oryza sativa
tcaatgtaaaggagactaaataagataagactcaagtaaacattagtctcacacttatataacaataacatggaaatcatatatatgaacctatcaaaaagtaggtgataagaagtgatacatatcgctttatctccatgaatttcatccttgtcatgattaaggtccatcatcaaagaatgcatatctaccacatctcattatcgggaaataaccttgttgaaaacttatgtaaaagagaggttaatcccataaacatcggtttatcatctatcaccaaagtaacaattacacaaattgtttaatccaagatttttcaatcttttctctcttttgtgatagataataatccgatataaacaatacaaagagatgggatgaaagataatttcaaatcaaagtagagatcttataatgaacaaaatatagaataagctccccctaaagatgtgcatacatatggatatgaaggaatgcatatgcacataatcaatcaagatcaatgagggagctcacactatattttggatctacaagagagaccaagttagaatatgtgaagtttaatacatacctcccatcatttttgctttcatatccaaataagactagtcaaagaaaggctcataaaaacgttagtctcatataattagatttatcattaatcaccgaaaccaaattaagtcacttgaacttacagttgcttagttaacgtcatctgtacatcatgaactatggagtacttgataagattgatcatggatggaattttcgacttttaagtattattagataatggcaaagtttatcactcataaatgagggcatatacattttttaccaaatcatgaagaggtatatgctctcccacgtaatatggttggctacatgcatgcatgcatatatgcgtgaataattgcatgtatacatgcatcatatcgagagcagtgtgacacgtaggtttattatcatggtatatatatatatatatatatatatatatatatatatatatatatatatatatatatatatatatatatatataaatttatacatgttagatcctctaaaaaatattatatatattatctatgtgtgtatatatgcgtgggaatatatatatacatgtaatgcacacgtcgatgaagaatatcgtaatgttccaaaaccgaaatttgagtggtgcttattaatttgctcgcaat

SEQ ID NO: 40676 - DNA, 591 bp, Oryza sativa
ttctctctccattttgacgggaaataataaaataatgggatgagtgtccagcagctaattaccacttttttatagtgtccacgagcaaatacacgatcttcgggtgtctcacagcaaagaccgtaatctttcagtgtcttgtaacaaattttgcctaaaagaattgtagtggggagagaagcaaggagaggaggtgaggaattccagggaagagagagaggattagaggggactggctttaaagatgaatccagctctttttggatacaatgtatgtatttgtaatacatgtgcgagtttttttttaaaaaaaactactaacacataaaatatcatcaacgtcgttttttaatacatcggcatataacaaccggcctagagatggcaatgggtacccggtccccggtcccccgtggagaattctcccattaggtgatggtgatggtattaattgtgtctccatggggaatcaaatggagagaaagtattctccgtcgggtctggcgggggcgggtctggttccccgtcccccgtccccgccctccgtggaggcccgatataaaagtatgtgtgtagtaatatgggctgcag

SEQ ID NO: 40677 - DNA, 552 bp, Oryza sativa
tatctcctcctctccttttaactctctcctcaaccttatttattcctctccttatctattcttctccttctcctctctacactgcagcggtggggcgaggatgccaggccggggcgaagcggcggcggcgcggcgtgcggcaaggcggcggtggcctggcggccggcgcaagggcggcgaggcggtggtcatcgacggcggcctgtggcggcggggcgcggagggccggccggccggcgcggcgaggcggcgcctacgttttcagtttttttttctttttttttttggagaatctgagctgagattgttgtatgatgtatttgatttgtgtgtgatgtgaatatgtgatgaattttgtagaagttgtgatgtaatttttttttaagattttatgatgtatttgagatgatcgatttgtggatttggaggcaatttgaggatgattgttttgggattttggggacgggatagggtgaaatcaatatattaaaaataatgaagaaaagaaaagaataaagaagccactagatctgcctctttagttccggttgg

SEQ ID NO: 40678 - DNA, 703 bp, Oryza sativa
ccaaagaatactccaccggacataaccacatgaggctaaccaaacctataggatgtgcccacttctctctttgtttgggacttgataaaactcaccacacttggctagacaagcccacaaaatgcacctatatgcatatgaactaatatggcacaaaatcatccacatgctcgcttcatatacccctcttgatagtacggcacatatctagtaaatccggtctacaccaaacaccaagaccgggaaaaagactaagaaaacattcttagctccattatacctttgccttgcgccatccaacttggggtcaatgcttgagccaacatcaacacttgtgaccattcggttgaaccatgtttatgccgagatctttgccatcctttgtcaagactttattctcatcacaagcttgacttcattcttgccaacatgacgatgtccttggcttggtgaccattaacccatggtgtcattcattagcctcatcgcaattagatctattcctttgcacgactcaaaggaaaacattagtcccaacaaatcggttggcaccctccacttggtgaccaaccggttgcttatgaaagatatgaatatgtttattgagtattcattaacatcataagtgtcatatactcatatgcaagctcaagtgcaaagatccgatatatataataggtgaacaacatggatctaaaacatg

SEQ ID NO: 40679 - DNA, 619 bp, Oryza sativa
tatagggcgaattcgagctcggtaccctatattacacatttctagtacagttcatagctagtgcacacatgcaacactaagaagcggaactttgcaaatttttgcaagaaaaacaacagtataaaaagaattataaaaagttacattatgaaatatgtaaagtacagatgtaacttcagtatactgacatgtaactgcagtgtaaaaacagtcaaatcataatgtaactaacttgacttcagttatacttgacttgaagaacaattggaacaatatcaaaacttacatcaccacagaccttaaattacatttgtaattcatatatatttccaatgtaactacaactgtaatttccattgttttatcctgcaacttcatacaaatctattgccatacaaaatgcacatgccatatataaaaaaaacacactaagttatcacatattcctacaataagcattctctccaaatccaatttctgttaagtagcaagaatcattcatgaaattactacaaaaaggtccaccataaaggcacacagcaaatatatttgcccatttctagtacagttcatagctagtgcacacatgcaacactaagaagcaaaactttggaaattt

SEQ ID NO: 40680 - DNA, 679 bp, Oryza sativa
aactacgagcgcgccagcgatgtcggcaccgagcaggcccaggtctgcctgcactatctgctcaaccgcctccagcccctgccttggcagcggccggtcatcgtgtccctcaatccggcgcggcccatccgcgacgagctggtgcatcgccgcatcgagtacagccacccggtcttcgacctggccgcgctgcaggcccagggccgcatagccgagctgcaggggcggcagcgaacctggttctgcggcgcctggtgcggctatggcttccatgaggacgggctgaaggccggctacgcggcggcagacggcgtgctgcaggcgctgggcagctggatgcccgagaggagcgccgcgtgaaccagcccgcgatgggtttcggcaaggtctggcaccggcgcctgcggccggtggcgaacgagttcagctacgccagctatttcctgctgctgccgctgcgcagcctgcgcgagcagcccagtgcggcgctgcggcgcaaccgctggggctggctgagtttccacgaccgcgaccatggcactggcggcgaagacgcactggcctggttcgagcagctgctggcgcaggagggcatcaccgatgccgatggtgaggtctggctgcagacctatccgcgcgtgctcggccatgtcttcaagcccgtcagcttctggtacgc

SEQ ID NO: 40681 - DNA, 622 bp, Oryza sativa
ttcctgcagcccctaggaagttgtagataatgtttggatatatcttctgaccaaagggaacgattttatctcaagtggtttaggagatataatttttttaatatgactgttgtttttgtgtcataatctggatagtagtagattgaactgtttttgaaggggttaaacagtggaatcagccaggccgcctatagacaaagttgtagaggtttttcatagctttcatattggtaaagtacaccctgattgggcgagtagaactccagttaggttgtttcagtgtggacagtctgaaattctagacagattctaaagccttctttcaagcgcaaattagaccatttaaatggcaaaataaaattatgctttctacatgaaagttgtaggtatttcaagatataaaggtttgaagcagcagtcttgtgcatagtccaagcggcgttccttgttattgagttttgatgggatggggcagtaggttcacctttttcattgttttctacgcatgtttgaatgtgttttctaaggttttgtttgtaattaggtggtggtccatcacatcgtgcatgataccaatccttctttgggggcaagtgcatgacgaactaattttttgattcat

SEQ ID NO: 40682 - DNA, 668 bp, Oryza sativa
agaggtaataaacaatatttgcgaagacaatgtcatggaccatcggccacacttgtgacacttataatcgaacatgatgagtaactataacgagggcattatccgtgagcactgctgtgaacatcgattgatcttgcatactctaagaaacttaaacattccaaagtatatgaatataatccgctcaataaaataacaatatgtggggtgcatgtcattggaaagaaataatcatatatggaagggcaagcatcgaaacaaactcttaacttaatgaatatttagtctcaaacacggttttcttaggaaatctgatatcacgattatgactatctgtgagaaattctacaatcacactgaaagacaatggaaatatgtataacatggaccgagtataaaaccacttttagaagaatatgcgcagaacgaagcatccttttcaactcgatgtttgtaacaaaaaacaaaaaggaaatatgtgtttaccataaactcatacaccacatatcaaagttttggagtttgattgtcaacttccatagcgaatccgaaagccattctataaaaaaattcaaataagattaatgatcaaataagtgtggacatcaatccaagaatatcaatactgcacacagttctgagccatggcatgaaaataaatcactcgg

SEQ ID NO: 40683 - DNA, 1885 bp, Oryza sativa
agactcgtacggcgtcatctgagcgagctcgaatggcacctccccctcctcctcctcctccgccatccacgtcgtgggtgatcctaagggagagcaaggacgctgccgccgttgtcgtccatggacgccggcaagctctgctgggtggacgccgaagacagcttcttcccgcgccggcgccgccacctagcttcttcccgcgctcgcccgccgcagaccccgcttcgccgtcggccgcctctcccttctcaagagtcacagtcatagctgctgtcgcctccttctcccgtgtcgtcgtcgccggacctcctccccacatgctagccactttgcagagaggagagaagcgagagagatgaggaaggagagaagagggggagagagatgagctggcataacgacatgtgggacccatgtggggcccacgctaactcacccgccacgtcagagaaaaccggggtcaaaaccactagaggacctcaagttgagggacctcaagttgagggacctccgatatctggttttgctgttgggggacgattttgtaagtcgatgataagttgacggacctccggtgtacttttcccttcatatcacagtacagcagtaaccttgaaaaggaccttggcagtaccagggcccacgatcaagaccttgacagcaccaggaatgtggatcttagcgcaagattgtaagcggtcacacccacaaacccacttatagtataaataagtagctaaaccgatttataatgcaaataaatggctacgcctatttgtattataagtgggttgataggtctgtccacttgtgcttatacccatattgtttcgaggatatccacggctcttcacatgatgtggatgcgaacctccgagcaatcgtattggggtaaaacatcacatgtacacactatgaatggccaataaaacatttgtccattttcgtccgattcggacgtgccgatagcacagttgtgttgcctagctgacaatttgccatggttccatcatagaattggcctttttgtttcgtaaacagcagtcatactagcgttgtttggggggagaaaaagatgtatttgacctcatggatagtgttttctgcagtggccgatggttggtctaaatacaaacgctcttatggcatcatatttttcatcgaaaaactgtgaacttctaaacctttattctatactacatgaattcaaggtataacgttgatttatggtactcttgtatacaaaattatggtaaaagtggttcgtgacctactcatttacataaaaaagaaaatactaaatatattgatgttgtgataaatgcaaaatagatagcttaaaatttagagtaaatttcataaaactacagatagtttggtcaaatcatcacaaaactacatatttaaggagatgtatcataaaactacagatttaacaataaatttatcacaaaactatagatttttgagattaaatccttagcattagtgttatatgcacgggtggagaagtggtttttactcccggttcgtaacccctgtatagtcccggttttccaaacgggactataaatccgggactaaagatcgctatctttagtcccgggtgaaataaccgggagtaaaaatcgatttttagtcccgattggtaacactaacgggaccggttggtaacaccaaccggaactaaagaggcagatctagttgcttctttattcttttcttttcttcattatttttaatatattgatttcaccctatcccgtccccaaaatcccaaaacaatcatcctcaaattgcctccaaatccacaaatcgatcatctcaaatacatcataaaatcttaaaaaaaaattacatcacaacttctacaaaattcatcaca

SEQ ID NO: 40684 - DNA, 689 bp, Oryza sativa
aattacttgcagttgtgtactgttcaaggtaatattttgatggctggcgcgcatgtgttctattatgctttaaatcttgggatgtttgtgaggtgtacgaattagttgtacttctgtacttttcagggtagtttgatggcttgtgaggtagaattgataacttgacagctagttagtttctaaaattttgtgatgtctgaacttagtttgttgaatttttgtttttgttattattattactgggtaatattatttttgaattttgtatattgtagtagattaaactttttacagatttttagttgtaagcatgattctactttccatgtcccttggatagttgtaagcatttcctaattttttacttccaagttattcttgtgtaattgacagctactagtgcttcaaaatctactgattgttgtttgtcagtttttttttaattcctatcaactgtaccctgttttcttcatcttcattaacttgctgtgcctgttgattccattcagcttgttgttatgttatttttctgccaccttctccttggtatagcttgtgtgcagctgctatacttctttagtgaaatcttctgcttgttcttttgtttccatcagctgtgtcatgttgttggagtcttgtttccctgtgcactctccatgataaagcatctttagctgtgcactcctatt

SEQ ID NO: 40685 - DNA, 570 bp, Oryza sativa
gtttgtgggcctgcatgctcatgcccctaccttggggctttcatagtgcacttacgtgtcatttagccatataattctacgtcaattttgctatatatttgtcgataaattttcccctaaaaatttgacagatgtaattacagtacaaccgtaatgtaattacactgtaacttgcatgtaattacactgtacctataatataacttgtatgtaactttcaaaaatctctcccataatatattattttggtaaaataaaggttgtgggaacaattttttttcagatatgtgtgtactgtgattttttttctttctcaccaaaacaaatctttataatagatctaataatttaaaattacgtgaaacttacatacaagttacactgtagttacatgcaagtagagatggcaatgggtacccggtccccggtccccggtcccccgtggagaattctcccattaggtgatggtgatggtattaattgtgtctccatggggaatcaaatggagagaaagtattctccgtcgggtctggcggggccgggtttggttccccgtcccccgtccccgcc

SEQ ID NO: 40686 - DNA, 728 bp, Oryza sativa
taaaaacttgggtggtgaaaatatcacaagtttgtttgcacatgaagatggaatatcatatatatcgtgttacacataattaagctgggttaggacaacatagctagcgtaatctgaatccaagtgccgtttccgtaattgtcataggttgatgcatggatatgggatctaggaatctaagttggatcggttgtcatcttctcacctctcacgcattgcttttgctgttgagctgagcgtttgtcacattggaaattactactactagcattgatctgtcagtttggcttgagatgataagaacattaggaactactgctactggtacgaaaaacatatccatactttctatatagttgatacccacaaacaattattagaagctaaagctcaacatgcaagtataccacatcatcacccactagcaattactattctagcccatttaaaatcctatgcaagcatgccacatattcacccactagcaattattattctagcccatttaaaacccatgcaagcatgacacattatctacaatattacttcctctgtttcataatataagtcattctagcattacccacattcatatagatgttaatgaatctaggtacacatatatgtctagattcattaacatcaatatgaatgtggaaaatgctagaatgacttacattgtgaaacggaggagtagtatattatagagatcaaccagtatgtgtcaa

SEQ ID NO: 40687 - DNA, 557 bp, Oryza sativa
tgtaagatttctttcttgtcagtccaaccaagattagtctatagtatttttccttctcttatacatacatatatccgatcaatctcgactgttaaaatctgaagctatcatgatctgatggtgtagatttctctttttcttcgattaatgtgcaatttctagctttcaaagcgaacttggtgtcttctttcaagactgtttttaataatataacttgggtttcgtttttataatttttagaagtcccatcaaacgctgtcattatactcctctacgactgttccgctgtctcatctctttattgtcattgggattttaaaactcgaacataattatcgtttgggttcattttttttactatctagaagtcctgctaaaccatcagcggcttttccattgtacttctctacagctcgcccgctgcctcacctgttactgtcattaagatttaatcaaacataattattattggggtttccttcctactttttagaagtcctgccaaccgctgtgcccgtattgcttaactgcatgttcattgtcgctattgggctgca

SEQ ID NO: 40688 - DNA, 556 bp, Oryza sativa
attcctgcagcccttatgaatcaacggtttaaatcaattctactagttgtataatactacgatatagagtaccggagcatcgctctttattttttgggaatgctatggatctggaatcgcaaattaggtttcatttagagcaagtttaatagtgtaaccaactgctgactctaaatcatctatagtcaacttaatagtcaattcatacaatagtttactataaacatatcctacacaattaatatctagtcccacttgtcatacacacttccatttggaagtccgcctgcactgctacaaatctgtaccgctactctcttctatctttatctcctcgaaatgtgtttatagtaagcttataggctgctattgtacctgctctaatacatctacagtcaaattcatctacacacacaaaaaaaccgaccgtaaaaattatgattgaattcccagttagatttgctatatactcctacctatccatatagattttttttagagaaaaggtcacaaggacccggcctatattgaaagccaacctcgagcagagtttttg

SEQ ID NO: 40689 - DNA, 594 bp, Oryza sativa
taacaaaattcagatctaacaggaagaaattaaaaaaatattaatgcatgattaaaacaattaacagtataatttaacataacaaatttggtacaaaattaccatcatcacattgtcttgaatcattaagttcaacagcagatttagaaacaaaagcatcttcatttccctataaaattttcaattcaagaactcaaaaaacaaataatataaataaaacttgcaaataaattatgcaatatatgacaaaaaaaacttacatgaaaagcattatgaataggagaatgaggtaacacattatcattaggcacatgaacttctgcatataaaacgaacgcattaacaaaataaactgaatacaaaataaaaaaatagaaacagcaagaggaaaaactcaaacaccaaaagtattataaaaatatgacttacgagcactaataccagcagaagaaataccaatgtcatcatcagctttagaagtgccaacattctcaattacattttcctcaattacaacattttgatctgattcattacagctagcttcaccaatcatagcaagaacagaaatcaaaagatctccacaagatgaat

SEQ ID NO: 40690 - DNA, 632 bp, Oryza sativa
actatagggcgaattcgagctcggtaccccgcgtcgacgccgtggcggcctcgcggcgccggcgcccaccaccatgcccgcccggccaccgcacggcgcggcgatggatcttggactggatcaccgccgcaactccagcgcacctccgccaccacaaccgccacggcttcacactcaccctcctcctccccctcgtcgacgacggcgacggcgacagcggccacccggcgctgctcccgctcgccatgccaaagcaagacatgctagctagctctcagagagttgaaagcagcgtgtagatcgaagtaggagacgccgccatgggaggagaggagctttatagcggcgatggcgagagggggtggcgtgaggaggaggcgggggatggctttcggcggttttggcgggtaagactcacgctatgtggttgactgcgcattccttctttggttggttggtgtgggaatggcagttggctagcagctgcctagctccaacctgtctggctggctgcttctctttttttttcgccttaaatggtattcttttcctcggtctctatatctaactggatatatacaatcttttatattagaaacttagcatattaaatatgaaacttagccctcaaa

SEQ ID NO: 40691 - DNA, 500 bp, Oryza sativa
ctacgtacgcttagctaggagcaagctagctggacggccgcaggcccaaaagacgtcatgcctctatgcaatctccaagaagaaaaacgatgactggatcggagatttggtctcggagacaaacccgcaaatcacggcgacttttgtggaatagctcgtggcactatggatcgcagtccatggcatgcatctggatgaaggagaaccagaccaaatcacatggaagttcacaactcacgggtagtactcggcttcgtcagcctacaaagcacagtgcattggcacgcttgacacgacctttgacccattaatttggagagcttgggtgtctggaaaatgtaagcttcatgcatgctcatcatctagaatagagtatggacctctgaccggctcacaaacaggggatggcagaacaacgggcagcgccccctctataggggagaggatgaaacggcgtttcacctcgttgcggaatgtcgatattccaaaaggatttggag

SEQ ID NO: 40692 - DNA, 619 bp, Oryza sativa
cttatttgagatgccgaagttatggatacgtaatgtacaaagcaggatggagaagtgctaatttttgtgtgtaagtgactcgattgtatttaccatgattcagactctttttatactttctcctgcgacggatgatcaccgttacccatgcaagattttttttcccctggagagtatgcaaactgatgatctaaacaagccggaaatccctgtttctttttttccttgtgaattgtgataaacacccagcaatatacatccatgcaaccaatgaatgcaacaatcctacataaaactaatatttacacgaaaagactccaaattcaaactatagcaatcttaagaacacgacataatctcctcctacctaagcccctaaaaatcttccaaactccaaaccatagctacctatcaataactcttaataatcatgcttagattatgattattatacaaatgacttataataaactaagatgatgatgtgtcataggcctctcgcgagcatggcttgaaattcctcggcggatttctggttctgcagcctcatctcctccctgaactttttgatgaacacctccgccataacatccacctcccccatcccacacgcttcttc

SEQ ID NO: 40693 - DNA, 527 bp, Oryza sativa
ttttacggtttggaggattaggctgcttgctcggttgggaaccattcccttcgcatgaaaaatggagcggtatattaacacgtgattaattaagtattagctatttttcttttaaaaatagatcaatatgattttttaagcaacttttgtataggaactttttgtaaaaaaaaaagcaccgtttagcagtttgaaaaacgtacgcgtgaaaaagatgaatatgagttgagaaaacggggaaaagaacacaaccttagtcaggaaagcatccaacattaggcttgggattctgcacagcgcagtctcaaaccttagctttagcaatgttttaaatagcggggtaagacatttagcagtcagtttcaaccagttttagcggataaattatacatgagaaagagctagaatccttctcaaacaaccgtaaggggaagatattcctctagtcaatggtcaactgtacgcgcgcgttcatctccttatatcttcaagctgtcaatgctgcattaacatcacactagcacagc

SEQ ID NO: 40694 - DNA, 577 bp, Oryza sativa
gggggaggggttccaatccccacaaattgtacgggtaaaatcgaaccatgcttgaaaaaatcgactacaacacactgcagcaaccaattgttatatgttaaagtaaaatatcgaccacaaaagaagagtcgaacttagcgttaaaaagatggtttgcagctgttggttggctgcacaagatagggatgtacgcatgtgattagagattctttttctataagggtccaacgatccatgtcacatattgtagccaacaaatcaaaattttgttcgaccatactaatcgaactagaactgcaggtaccctaaagctgacaagttgtattccattcgaaagaacacccttacagttacatccactatccttggccatgggtggttgcttcatgtgaacatatatgtggactgtgggcctgtggcttgctagtgccaaattggttgttgaagaagggccgttgacccctagtcaatgacagtgaattgtactcccctgcttgtcctgcaggtgccataaattctgaacctcaagaaccagaccaaagcaacaaagcgaggtgcagtttcagtgagggaggaa

SEQ ID NO: 40695 - DNA, 1500 bp, Oryza sativa
tctcctagtgattgacaaggatggatatataggtggtgtatagatttagggtgtaaagttttgatgtgttacagcgggtattatagggtgtggcatagggtgttaaggtattaataaaaaactaattacagaatccgtaagtaaacaacaagacaaatgtattaagcctaattaatccatcattagcaaatgtttactgtagcaccacattgtcaaatcatagatcaattaggcttaaaagattcatctcataaattagttataatccgtgcaattagttatattttagtctatatttaatactttatgtaggtgttcaaattgaacgttcgatgtgatagggttaaaaaaaatttttgtgggaactaaacaaggctatacttatctgccatgctgatgtgaacacggctgagtgaaatttcgcgccatttctagttcgttttcaacggagagattctcagtgcgaaacctgcatgaaacttctcttattgcttcttcagggttcagagttatctccgcttgattattttttgcgatcctagtctgctctgacaagcaatagaaatttgtttaatttgatggataagtaagatacggttacactttattatattagactgagtttgttttagaaattaatacaagtgtgattaggaaatctttttattcttcgcgcacatggaactggggtcccttgagagcctctgaattcttcagtccaaaatgaaaaatacaaatgtattcaaaatcaaataagcatgcttttacataagcaaatttctttcctgaaaaggcaaaagtgaagaaacttaatggccaaatgggccagatttatgcctgaaaaatatgcagaacagctataatttccgccgatttcttgactcacccggtatctgcgttcaattggattgcgtaatctttaccaaagtctacgctgatagcatcacttgccgcaaattctcgttcaaaaagcaagatcaacgtcagcaaatttcaaaatcaatttttacaaaaaaaaaattgtatttgacatgtcaacacgatactagtgcgcatatatgcttggattttgcgctgccttattatgattggtcaaatgttcaacacgtacttatcaagatatcaactaattaagcaagaagccaactgattccttgcaacctcttgattgctaatttgcaaaattgctgctgcattatagattcacacgttagaagttgaccagcttgcaattgatggcaacatatggatatcttacactaaaccaatccttaaaaacaatagtgtgatcacactaagttgattaggacaatcagggtgaattaacatatggttagatgaagaacatactgatcagtcagttgctatccattttatcctactgttgttcttttgtggtaaagttacgtacggatgagtaactaacagacacggacaatacaccctgattagtctgaaagtctgaatagaatttggtgaagggagcagagtaggcaagtt

SEQ ID NO: 40696 - DNA, 1861 bp, Oryza sativa
cagcaacaccaaattgaccaacaacaggaaatattaaatattaaaaactatatcattacgcctatatgtagtactaaattgacaaaatttagttcacaccaaaattggaagtttggtttaaaattgaaacaatgtgacgaaaaagttagaagtttgtgtgtgtaggaaaattttgatgtgatggaaaaattggaagtggaagaattattttggacctaaacacggcctaatattgaaaaaaaaaattggaagttgccgggaagctgcagcgtcaacggctgggcgactgaccgtctgcactggagctgtgcatgtcactgtaatgtcagtttcatcccatatatatcagcatctcaaccgtgtgccgttcatggcatgttcttacatgtgtagtatcagactttcaaggccattgctagcttgaatcgtacgtccacgcgtttcccagttaattatgatgtgtaatggagtacaattatgctgctaatcagctatcaccgattgacagcagcatctggagtagtagtcctggccataattcgattggtgtatgcaagactattactagcgattttgatggtctccttctgagaaggacaagagcgagaagatggctcttgaatcttgactagtagtaggagctaaaatcgtctcagttattcaccatcatcttgaaatttttgcgccaaattaattaagatactccatttttaccatctctgaaagtctgaatttatcggataagctctcaagacgtagcttcttccatcgtatcttctcgtcgtcgtcggagtcgtcttcttctctaagcatgcgaggctacgcgtgcagctagctggcctcctaaattccaatcctacaaacgattggtaactccatgtgctattccctatcaattagggctcatttgaatcgtaaaaataaaaaaacaaaaaaatataaaaaaatacataggattctgaatcgacatatacgtagaaaatttactataggatttcaattatacaaaattcttttataaatttcttgatttaaaggaccctcaatacatgataaaggcgttctgctactatttttaaccggcgataagctaaaactaataataagtcataaaacaacttgataataattatatagtatcattagcaattataaaaccaacctaaaaaggccgagtttagttacaaactttttcttcaaacttctaactttttcatcacattaaaactttcctacacacacaaacttccaacttttccgtcacatcgttctaatttcaaccaaacttccaattttagcgtgagctaaacacacctaaaaagtacgataaaacccctaaaatcatctctaaaattaaatattaaatttcagctactgtttataagctgaaaggtaaattaatgatggggacgttacactcaatgtacggttcacctgaaagtctgaaaattcaccagttaagtacgtacgtcctctgcttgctggtagtagcaaatagggatggcagtattgtccatgggttcgggtatccgtggatacccggcccgatgggcatgggcgtgggcacctttttttacccgtggacacgtttgacccgatgcccgtgaagttagtgggtatatgtaggttttagattttacccgtggataacccatatccgacccaaaaatttttagcccatgtatatcttttataccttcagtagtttaacctcccctcgaggcccaatagccatttagcccatttgtatatacagtgttcactcaatgaaaccctagccttatccttttccccaccaccacctctcaatcctctattccctacgcggcggcagcgcacgggaaagcaggtggctggcggc

SEQ ID NO: 40697 - DNA, 673 bp, Oryza sativa
catcagattttaatgcttagctatgaacatacaaaaggctacataaagcaagattcctagtgggagattcttctagcttatcaccaaccatggagccctatctagattccaattctcactcaaccaccggaatccagaaaggagaaatggatattattaatttagaaataaattttttgggttccgaaaatgcagatgaaatagggcaattcctagacgtcactctagcatcatggggtgtcatgataatgaaattgtctgatcacaaagttaagagaaattaattcttatcctttctttggaacacttgagagaatttttcgtgatttccataaattaaaaatcggactaattaacattaaaactatgaagtttttcatagaatattcctatattccaattaattcagcaaataattggcatgaattcatcctttttgtttgtggtagtttttaaaggattaagaggccccatcaggaatcattggttttctaataaatcactgataaggttgtgtttggcttcacacggtaatataatcagttaggttacctacgttgtttcctttatctgaaaaggagttaattggaataaacttgtgtttgacaactacttgcagttagtcatgctagcaatataagaggacaactacttgcagttggtcatgctagca

SEQ ID NO: 40698 - DNA, 542 bp, Oryza sativa
aatttttttctctttcaagtattaactaataataaatttgtccttttaatatttttttggtaggtggtgtaccttgacaatgttgaatttggtgataccaatgtttcaaatgaaattccacgtatttgtgtttggaaaagtgacatgatccatgcttattctgagtttgataaaattgatgatgacacttttggtcttaggcctctaagggattttaaatctacttgctatttccaggttaatactatttttaaaaataaaaatgaatttctttattatttttccttataatgcatattgtattaatgttcttttttttcattgtagcctcaaccttgtgatgaaagaaggatttcttttcagcagaaacttgactgtgctcttcagaatatgttgccagtttacatgaaagagaaaatatgttctatgtttgatagtcattgcacttcacttcatactattgatgattcatcttgtggagatcttttgatttctgttcttgctatgattggtgaagctagctgtaatgaatcagatcaaaa

SEQ ID NO: 40699 - DNA, 595 bp, Oryza sativa
ttcagttgtctcgaatctcgatgaatgcgtttgagtattagagattcagagttggtgcctgttcttggccgatgcgaaatttgaactcaaaggaatagttgaataaaaacgtctgaataggatgcactgaatatatgagtttattccaggtgattaataccatatcatgagttggcaatgccgaaaatcttgtcatgttctttggatattctgaattcagcatctgttcacctagttcgtgttacaaagcggcaaccatcgtgtaatcaacatgttttgagtctgaatctgtcatcaagtttcgatcgagatggaacacgagctgctagtgtcgtcgttgccaccggtggactgaatcagccgtcagcgccatacgtgcgtgggctcggaagacattcgcacggatcgggcgcacggtggcctctagcgacagctggatcttcttcatacgaccgcccttttccccggcggtcaccattcttatccctggcgccattggtccgtgcgcctggagagaggagatttgaaatgtgtgatgattttatgattttggtgagatcgtgcgaaatcaatatgcaaagaataatgaaaaaaa

SEQ ID NO: 40700 - DNA, 521 bp, Oryza sativa
atgatgacctacatgtcagtgggtcccataatattgtttatgtgaatgacaaatgagtcctacgtatacttttttaattctaatgccacgttagtgccatgtgggacggagaccagatcaaatatctaatccaaaatatttgcgcattttctaaatatggcatatcatcgtctgaatgtattttaagaaaagtataggatttcttagggggtgtttagattcaggggtgcaaagttttaacgtgtcatatcggatatacggacacacatttaaagtattaaacgcagtctaataataaaacaaattacagaatccgcttataaactgcgagatgaatttattaagcctaattaatccgtcattagccaatattcactgtagcaccatattgtcaaatcatggagcaattaggcttaaacgtctcgcaaattagacgcaatctacgtagttcgatatttttttagcctttatttaataattcatgcaggtgttgaaatgttcgatgtgatagagtgagggta

SEQ ID NO: 40701 - DNA, 542 bp, Oryza sativa
cagcaattccagaacctacaaaaatttatagaaagctaaatttgagaaaacattccgaagtgaataagttgaaacagataaatttgaaaaaacttttcacaagtaaaaaaatcagtaaccgaaaagaaaaaaagcttaaggtaactgaccatccaaaagatcatcaacagactgtttggaatgattagcattaccaacttgaggggtaacaaaattcagatctaacaggaagaaattaaaaaaatattaatgcatgattaaaacaattaacagtataatttaacataacaaatttggtacaaaattaccatcatcacattgtcttgaatcattaagttcaacagcagatttagaaacaaaagcatcttcattttcctataaaattttcaattcaggaactcaaaaaacaaataatttaaataaacttggcaataattatgcaatatatgacaaaaaaacttacatgaaaagcattatgaataggagaatgagggaacacattatcattaggcacatgaacttctgcatataaaacgaacgca

SEQ ID NO: 40702 - DNA, 1542 bp, Oryza sativa
catactatgagacaattattcacttgaccgatggtgaatgcttgatcgtatttcacaatagatgtaaagacgaatttgttgctgcaatccaaacacaagtgaacaatacgttgtaatcacgcaaaaaactgtagcaaacaatcttgaacaccaaaagtcaagcagaagatggaacagaattgtccgaagtgacaagtagtgacgctatgtagtacgttgtaccgattgtgattagtgaccaaagcgtaattcgtctagattttcaagtttcaacttttttcacatctcaaatgataccatgggcaaaggacaagctgtcactaactagttcgtttatttcaccgcagatttgaagcgtacggcaccaaaatttcatgctgcctgatcataaattatacagccccatcgttttcgagcactaagctaaacaacatatttacaaacgaaaaataatgcaataagccaaacaacatatttacaaacaaaaaataatttatgaataaaaatttttatatacgtgttcttaattatataaaaataaaggctgaaaaataaactacgatacaaaaaacaaaaatcaactctaaatttaagttgatcccactttaaggaaaacgagcgaattaaacaagtcactgtcataaacagcaagttgagtagagttgtactcctcctccttgactctgaatctgaattatcaggcgtggccatctttgctgacttttgggaggtgcagacctctgaccaaatcgtcacgcggattcctcctcgtgcgctctactagtgggctacactgcataaactctctatatatttccttaatttctcttgccagaatatttgttaatacgatgaaaatgatttatatctccgatctctgttagcgctggccacacagccagttcccgcttgcatacggacgccgtgtttagtttcgaaatatttcttcaaacttttaacttcttcatcacatcaaaactttcctatatacgtaaacttccaacttttccgttacatcgtttcaatttcaaccaaacttccaattttaacgtgaattaaacacagccggagtattgctttatttttcgaccgtcacactctagtcctcttgtattggtactcctacttacccttctcttttttaaagaaatagatgatcggatgaatgagcaagctttccaaactttttatgatgaatttcttgaaatgcaggtttgaatctatttgtcaacttcataataagttgattttatttgcaaacgcataataagttaatttattcattgtatccttaaataattatcacaagtcattcagctatattcaatacaagagaacacacatggtgtttgttttgattagactagtagtaatggaaggtcttcagagttcaaagccagcaaatacacaccgtacagagatattgtgcatgcatttctattggccgacgacgatatggaactatattatatgtgtttactttgcctggaatatcggggagaaaatctttcatatatataattttcgaccaagtggacatat

SEQ ID NO: 40703 - DNA, 527 bp, Oryza sativa
tgtcccctacccctccccggacggagcgggcaacacgcgatcctgaccgtggagtggagagatccctttgctcgctgagcactttaccccgggtacactgacatgtgggtcccaccactcgtgtgggcccgggaagtcgctagaataaataggccccacaccttttgttttcggctactcaaccgcccggtattttccattctgcccctccggcgagccccaccctttcccgccctcatggcgcccagcaaccgcctcgccgtagcttcgcgcggcggcggcggcgcctcctcctcctcctcctcctccgccgcctcctctacctccgagaggatctcccgcgccgtcggagaaccatacagcgatctcggcgcctctgctgcagcccgggggggcgggcgcgggcgacgcggcgccgctggcgaagtggctgcggcggctcgaggcgttcctctcggcggcggggctcgcggcgtcgagcccgctcgggaaggccggggcggcgtccgcgctcgccgtgctgggcg

SEQ ID NO: 40704 - DNA, 556 bp, Oryza sativa
taaaaccgtgtgtatactgcttgagacctctggcataccacttttccaagttgaggaacttgttatatttggtattatggtttgatgacgaaattcaaactcggccacaagttgagtgaacttattccataaaaatttaggaccatctgagtatatatcattggacggatttttttcccacgaaaatcagatgaatgtaactacagtacaattatgctcgtaactagcatgtaaagtgtcatatagatacacaaaaatgctcgtagcttagtgggataggcgtgtgttggggattgcgggatcgagtcctttgccttgtgattttaaatttgtgtgattttaactaatttcaactagtaaatttgatgacaggtgtatatattatgccttgaagaggactcgaacctccacactctttagcaggccgaatcgggccaccacttgggatgggaatggctctttcggataatgcaaatcgaagttttttgatgtgtgagcctatatgacatagaaaaaggttaaaaaaaaacgtttgattctcttttccctattcaat

SEQ ID NO: 40705 - DNA, 632 bp, Oryza sativa
cgctatatgctagttgatttttttcagccacttacacagtagttacatatcatttacacctcacttacatatgtaattagtatgtaattttcgaatttacatatgtaattttagtacttacatatgtaattttgagacttacattgtaaatacactaaaattacatatgtaatttagggacttacaatgtaaatacatgccgactattttttgatgaaaaatatggcgccataaatatagctacacccctttgttatactacccctccgttaccgtttcatatggggccacctataaatcggacgtccaatttttttaaaaaaaaatcagacattgtttcaccaagtatatcgaaattgtttcaccaagcagatcgaaattgtttcaatattttaaaaagctgaaacacaaccaaattaaatcacctcgtgaaacattttgctacaacgtacgaaacaacattttccaaaaaaatcgagtgttgtttcaccctacataaaaacaatgtttcagcaaatagcgaaaggatgtttcaattcactgcaacatttgattcatatatagtaaaacattacaagtacaattggtgaaacattgttggtggaacaaaaaatgaaacggattcccttaac

SEQ ID NO: 40706 - DNA, 505 bp, Oryza sativa
ttaaattactgtcctacccgactacacccaacattagaacacatgaaatgcagtctatatcaactactacttctaattgtttgacatgtgatagttaaaatgaatttaggagttagacttgtttgggtcacaataatgtacccagcatgtaagctggccacatcagtttgatatttggtgtgttaaaacaagtctgaataaattggctaaagacagacatgttttctcaacaaattttattggccagcatggatccagtataaatgcatagtgatgtagcacttaggatcacttgagatagtagaaaataatggttcgtttgcctgttcagcccaaaataacataaatagattaaattactgtccaacccgactacacccaacaatagaacacatgaaatgcagtctatcaactactacttctaattgtttgacatgtgatggttaaaatgaatttaggagttagacttgtttgggtcacaataatggacccagcatgtaagctg

SEQ ID NO: 40707 - DNA, 2333 bp, Oryza sativa
attcctgcagcccagaaaaacaaatatgtccgacaaaaaaaaaaggaaaaaaaaggaaaaaataccgaaacgaatccgactacatcgacgcggtaaaaagagtttaaaaaaataaaaagaaaactgtcctattccaaagaaaaatgaattatatgtatcgtggagaaaaaaaaaaaagaaaagtccgataaaaaaacctgggcggaaaaaaaccgggtggaaaaaaaacaaatctgtccgacaaaaaagaaagcaaaaaaaggaaaaaaatcgaaacgaatccgactacatcgacgcggtaaaaagagtttaaaaaaataaaaagaaaactgtcctattccaaagaaaaaggaattatatatatcgtggtaaaaaaatcgaccaggcgaaaaaagaaaaaaatagtccgatccgaaaaaaacaggagaaaaaaaaatgggcgaaaaaaaaatttgtccgataaaagaaaaggaaaaagctgaaaagaatctgactccatcgacgcggtaaaaaaaggcgaaaaaaaactttccgataaagaaaaaggaattatatgtgatgcggtaaaaaaaataaaaaaaccaggcgaaaaaaaagataaaagtccgataaaaaaacggggcgaaaaaaaaaaaatctgtcctatccaaaaaaagccaaaaaggggaaaaatcaaaacgaatccgactccgtcgacgtggtgaaaacagggcgaaaaaattccaaagcaaagggagaaaaaaaatcaaaacgaatccgactccgtcgacgcggtaaaaaaagggcgaaaaaaatccaaagtaaaaggaattatatgtgacgcggtaaaaaaaatcgatcgggcgaaataaaccgggcaaaaaaaaaatctgtccgatccaaaaaaaggggaaaaaatcaaaacgattccgactccgttgacgcgataaaaaagggcgaaaaaattgtctatttctaaagaaaaaggaattatacgtgatgcggtaaaaaaaatcgaatcctattatatctagaaaggtttgacactatgtgaaagtggtgaaaaaaacccttcgtaaaagaaatgcacgagaaaaaaaattaaaaggacggaaaaaagcgcggaggaaaaaagtcaaatttatattcgtcgttttttagtccatttatatatcttctttatctctaatctaatctaatctaactataaaaagagaagtttctatagtatattaaaaaaggaaaaaatgagcgagaaaataaaaacggtttaaaaaaacacgtgagggaaaaatgtcagaaaaaagcacaaaagaaaacgcgctagaaaataaagtttcgtagttctaattttctgattgttatcgacatggttatgcatgaaaaacgtatattatcattacgttttttcacccgttgcaacgcacgggcatatttgctagtatagtactaatgtataaattaaataaaaaagaaaaaaaagaagaagacaaaaacactcgattgggctacgtatccagcccaaattggatttgcacatgcgagagagagaaaacagcccgagttcatgaaggagacctccatgcagtcacaaaggagacccatgtgaagcatctcaaattgcaaataaataaataaagcaacgccgcaaaatcatcagatggtaaaagaatattttacttaatggaaaaggggggagcaatgctctcctagttcaaaaaaaaaagagaatattttacttccctgaattatttcactagatcatttaactccctaaataatttctcggttcattttacacctcgagcggtatttttcttatttctctctctatatgtcgtaatttgcaatgaaatttggtattatcaattttttatctagtctttctcacaaaatgtcttttctttctcagatttatagaaacattaaaagataactgattgagcaataatttaccatatttcatgataggtaattctgtgataatgcgatcaatatctggatggtaacttatctcaatctcagtaaatatataattcgtctcgaaagccttccacgagagctggatcgctcgagcagctcgagcatgtcgtgctcgcgtgggtggtggaacgacctcccgtcggatctcctcgcgctcgtcgccggctgcctcacgttccaggcctacacccgcgcccgcgccgcctgcgccgccaggcgcgccgccctccccgcgatctcctcgccgtcgctcctcgtcctccacgacgaccaccgcgaacgctccagcttctccgcatggttcttgtcccccaggatctccatcgctagcttggccaccaacctgatctctactgggagggcgcagcgct

SEQ ID NO: 40708 - DNA, 596 bp, Oryza sativa
caaagcatcctgacctattctcacaaaaaaaagggaaaaaagagagaaagaaagcagcctgacctatttggtgtactaaatgataaatttcttgacttggacttccgcttttggatttcagcagagttcgttacgagtttttctctgggcagcagagctgtcaacctaaattttccaggctttctctcgaaatatcgaattgatgtttttggatgattcgatcccacggtgaagtgaacgccacgtacggtttcggtcggaaaatcgactgcgagtgcactgcagctggctgcagattattattatttttttcccccaatcaggagcgagtctgctcagtcgccggtatgcaactgaacagggaacaccgttttttctgcacaggatttgcacgccacgtacgtagatttaatccgtgatttgtggcaaaatttagaaaatggttttcaacagtgagttcggattgagacatccaaggtctcgaatttctcctgcagcttctgcaaaacgccgaactgctccagctaaactggttggtcggactgcagactgccttgtctgtatcgtctgattccgatcagctgcctgccggcttg

SEQ ID NO: 40709 - DNA, 502 bp, Oryza sativa
gggcgaattcgagctcggtaccccgagtgtttctctgttttgttttctaggtgtgtttattcataataagtagacattcattgaagttacacatatattctttaacattcaatttttaccgattaacattttgttgttagctagatttgttcattcatttgtgcagacacaaggcagtcccactataggtctttatctcctgttaattaaacgaataagcttgtaccaaatgaaatacaactaactaatcacataattagcatctgaaatcaaggctgagatggccatatgctcgaatactctacctactttgggcatggcataggtatgactggtgccatcccttgccacgagagaacgccgttgtgttgtgtgtgtatgaaagatgtaatcatatattataatagtgtaatatacacttataagtaactatattttatggataagctattagattgactatatataatttggagctaataggtgactattctaaacttct

SEQ ID NO: 40710 - DNA, 605 bp, Oryza sativa
atttgaatgagctttattttagtagcataatgctcgtacattgcaataaaaataaatataaaagcaaaccgaattttgggttcgctagtaggtacacgtacaaaatttacatagttatgcgtcagacccatatatcgcacacacatgataacttacaggttgcatcttattgataaaatcgtttattaaaattgtagctttgtgaaatacctgtcttttagtatactaatagttcgaatcattttattgaaatttatgaaaaacaaaacaagaaaacagagggttccagagacgttggtgcaaatctctgaattcgaccgagcaacacactgctcaggcttgtaccacctgtcacatagcactagcagcaagttgtaatcaccccagagaaaaaaaaggttaaaagaaaaaaaagaaaagaaaaagggaagaacaagaaaatttcttcgcaactccagcgtgtccagcgcttttggacttgttcgcactagcccgaaacaaatggagactgctacggatcggacgttcgatttgatgcaaattattggacggtgttgtcccgattgttgaagaatgtttcacatgtttcacctctcgataaaaat

SEQ ID NO: 40711 - DNA, 509 bp, Oryza sativa
caaaaactcgtaacgaactctgctgaaatccaaaagcggaagtccaagtcaagaaatttatcatttagtacaccaaataggtcaggctgctttctttctctcttttttcccttttttttgtgagaataggtcaggatgctttgactaattggcttggtgataccgagtactgctcccttcgttgtaaattgtaagaaatatattttttatataatttttaatgatatattttaaccattaacgtattccatattatgtttttaataaaatataaaattagcatcacacgaaagtacttttaaatatgaatctagtcatataacttgtataataattagcatatatatggttagtttgattattagagcttttcttagaaaagaggtcgtcggttaatttggaacgagggagtactaacaaatacgtatacgtacttagcattgctgatgttcttttcgaagaaattcagacatcccgatgttggctataaatactttctctcaccaatt

SEQ ID NO: 40712 - DNA, 608 bp, Oryza sativa
tgtggagaaagtgcagatataactcgacagaaatacttggtggaaaaccttgtaaatgatgaatcaatctttgcagcctcctttagcttattatccttattaaataacaaaaaaattgcaaaataaataaaaaatagatatataatacaaaagtaaacagaacaaatatgtaaagcacaacaaaatgtaagatatatacctattatgtgtattggcaaaccatttgcaatacgcagcgaacataaaacaggtaccaatgttcatgttgtggaagagcaacaataatgaaaaagctcttttcaagtgagcaaactaattcaagtgatcaggcaaaaaaaaatttcgcatatgatggtgagaagagtttcttcactattggtgctcttagacaagtaaacaaacaactactaaatagagaatcatcagaaaacaaaattgaaagaaaacagttgaaaaaaataaacactaagtaaagtagaagaacaatactgcttaaactctaagtaaagaacaatttctaaacaaatgcaagatcttaagacaatctgagacaaggtaacagaaaaaatatctaaagtacaataaaatataacatatgttggaaaaga

SEQ ID NO: 40713 - DNA, 644 bp, Oryza sativa
gagagtatttttctcattaaaatataagtgctgatgtaatatttcccttctatcccatagattagatcaaagaagcatgcatgaaagatatacacaccatgctctctttttacagatgtttattgttcttgagaagatattattttactgtatcacggttctagctagccttcatgttttactgtgtattttcaaagatgatttatgctaataaggttttaggttttgggtaagggccagggtggaagggaagggaagagtatggttttaagcttagaggaatagccttgggcaatgagatgatagggtgcaagggaggctgtggagttaggagatgacgaatcctgcggctcgctgctagagacggggatcgaagagaatggcgtagaggaatggtgctatcgccggtttaacccttgttcggttacacaagtattcaatccgggccgggaataacaagtataatatgaaatttatgatagatacaacgagaggtcgggatttattttgggccggaaactaatttgctcatgatagggacaataagagaccgggaattaatccaccagttaagaggtgtggaactaatccggatattttgttgtacctaatataagtaaattggttcctgatctggaataaat

SEQ ID NO: 40714 - DNA, 590 bp, Oryza sativa
cattttgaagcactttttgctattttagatctaaacactagtagtaaaacttggcaatttgtcatttggcatttgctagtctatagtagcaaattgtgccaaaaagtgctttggaccactccctctctctttctctctctcactttagtgctagaatggcaaaagtttaggatgcatctaaacaccaactaatacttttgctataccaaaatttttgccatttgtcatttgctattttaaatggatctaaacagaccctaagatgcttggtttctttctctaattaaattttgtttaactttgattaaatttataaaaaaatttaccaacatcaataatactaagttagttttcattaaatcaaacattaaaaatattgctatctcttttctataaaactgtaagttttactttaaaaaaatcaaatcgtcttacgtatgaaatttcatatctattggtgtttctaaattaataataaatttttcactaaaatttttaatacatcttaatagactatatttatcgtaaattatctactctattgggaagtagtctgatgaacaagatgaattattagagcatttccaaca

SEQ ID NO: 40715 - DNA, 576 bp, Oryza sativa
tcttacatgtgtgcgcgtagtgaccttttccttcttcacttgcataattcttgaaactaatataccggtggaaaattatgtgcaagttatagtgtaattacactacttcctccgtttcatattataagactttctagcattgcccacattcaaaagaagggagtacgattgtagtgtaattatatatgtcaaatttttgggagaaaatttgtcgataaatatatagcaaaattggaacaaaaatatgttgaaacacaatatgtatacatgcaacaccttttttttatccgactaattggtatacctccatctcagaataagttcacctatatcaatttccatatacaaaagtgaacttacagagtagacgaatagacgtacacacgcgcgtttaccatgcaccactcgtggacaagtttggcacggaagtcaatgttgtgagaaaactatttcatacttcatcaatcccaaaatgcaaccatttgtatgttaaatactaaggttaagggggtccctctcagtcatcttattggttaaattttaaattttgaaaatttctcagactcatcttctaag

SEQ ID NO: 40716 - DNA, 722 bp, Oryza sativa
  unsure (1)..(722): unsure at all n locations
gctggccanttagaacatcttcttgcatgcccgcacgncgactctagaggatccccttcgtatagaaatacattttacaaataacgaaaattcgaaattaagaaaaacatgggaagaatagtttaaagtcaatataggaatacaatttagaagtaactgaaattcgaaattaaaaattaaagaatattgaaagataaatttagagtccacatagaaatacaatttgaaaaaataaaaatttagaaataaaaataaataaaattggaagaagagcatagattctatatagaaatacaatttacagaaaattcggaattaaaaacaatattaaaagacgagtctagagtccatataggaatatatataatttacaaataactaaaatttgatattaaaaataattaataactaaacgtatataaaatacaatatgaatattacacattagtagttttgtaaagttattgcaaaatttaaaattatgttgtcattttaatatatttgaataatataatgataaaacatatatgctattatatgagagagaatataatgatgctaggcgtgtaatctgcgcgggccaccatgctagtttggtgtaataggaggggtcatattagtaggggtttttttggacggagggattagcggccagcgtaggatttttatgtacgtttatagaggattcaatagctagattctacaaaatggggatgcgctcc

SEQ ID NO: 40717 - DNA, 613 bp, Oryza sativa
  unsure (1)..(613): unsure at all n locations
gaatttttcgttattattgttaaaatctgtaaaatttttatctatttgcgataatttggtcattaacgtcgacaattattccnttccccccncccagagggnggtgatgacgctgttcaagcngacanccactcggtaccccagaccagagtgcagaagaatactccctccgtccctattgggatattttgcttacactttttgactgttcatcttattcaaagaattttagaattattatttattttatttgtgacttattttattatccaaagtactttaagtataactttttaatttttatatttgcacaattttttaataagacgagtggtcaaaacagtgcaagcaaaatatcaaaatcctttagagcaaggttaatagtacaaccaactgctagctccaaatcatttatagccaatttatacaatagttgcttactatattattaatatctggcctcacatgtcatacacaccattatgtcttggagtccgtgccttacaggtggctacagatttatagtccgctgatcttctctctcctcttttatctctttaaaatatgtttgtagttgacttaaaagtctgctattgtacatgctcttatatca

SEQ ID NO: 40718 - DNA, 696 bp, Oryza sativa
cttaatttggttgttactaaatcatgcatcttcatgaggcgattcaatcacaataactttaaatttcttactatttatagtaatattgtacagtatgtgttcagatggtatacatattatttacttactatttacttactagatccaatagtcgacctcatataaccttgatttatcttctaagtcgataaatgatatttagacatgcccaacctataatttacctttataaggtacaatttccaaaaaaactataatatcacgttttaataatacgaatgtccacggaccacctttctagttaatatacagattgccaatggcaaaatatacgtctcagccaacgatagaaaacgacaaatattgactagaccaatgacacgccgtacgtgtgttttggtccgcctttggtagttgcagccgctggctggccggctggttgatgtggctcaggcagtcaggctcacgttggtttcgtagagtaaatggggagctatgccccccgtctggcatgacaacttgatgattgctccggtacaagggacccggtttcttgaaaactctagtatagcaccatgacagtagccacaccaccatggtgtggtagtattcattaatcaggtcgcattgtgcattgatcctaccgtattgatcaacatttattgagctgtcaaacaggctggcatcccacttaaa

SEQ ID NO: 40719 - DNA, 709 bp, Oryza sativa
gcaaccgataaatagacaacttaagaaaaaaatattttggtattgcaatgtgatcttaggtcctagcttctctcttcccattacgatcacctttgtgcggagaaagtcaattcaaacattttaagggtacatacttcatttcttacacatcatcgtatatatattatatgtctaaataaaaagtaactattaatgacatagtaccaaattttggaaacaatgaaaaggaactgttcgatttgatatcaaatctgtgtccataagagagaatatgcgcaatgacaaaatttaataggatagcatttccatggtttgtctagtttgttaccctgttcaagttctggtacgatggattttgatagaaaagcaaacatagattctagttggatcacctgaataggaaaaccgtaaaaacgtagaaacatgataggatgacaatcaaatttctatgttaactttaaaaatacataaagcttcaaaactattatacatagggaacatgcagaaaatttgagtcacgggaagaagaaaacatgaagcacaacctcaatcttattttcctaaatgtttcccatggattggccgtccattccatacaatttttaaaggaatttgtagtgctggatcctttgttttaaatgtatgcattgaattttttttcataggatacaaatctttcaaaattcctttgcttttctattattccata

SEQ ID NO: 40720 - DNA, 683 bp, Oryza sativa
caatttgtaggattggcaatataatttatgggatgcgctagattaaggagagattgtgatacatatttatgctggttcagtccctcaagaagaggtaatactctagtctagttagagtagattggatctgcatcggggttcacagatcagtaatagaatggctgatggcgcgtaagtgtggaaaagcgtgtaacccttagggttcctgcagacgccccttatatagtactaggccatccggtggtatacatgttgcggtatcccttataatccaaatacctaccatctaattacatgggattgaatagactttcttagctcttatccatttctatacaactgaagtgccgcatgggtctagggcactcggcccaccctatgcaatatagcccaaaggcctcctatgggacatccgggtatcatatccccacatgaataaaggtcggttgatatagtaacgtactggcaaaattattctgaactcttcgagacatcttctcattatttacatgatatctaaatggttatgaattttttttaacaaaatagattaatatgtaataaattactctataaatatgcaaggttaaatttaatttctacaggttgcaatgaaaaaaataaattttaaatatgaatatacactaactagtcattgtttaatttatttttctgcaatttgt

SEQ ID NO: 40721 - DNA, 785 bp, Oryza sativa
catcagatctccgctacaaacaccaaatcgaaatcatagatccagaaaatacctacagaacaaacacaatacaaatcaaaactctaaaaaggaggagaaaatacaacccaacaaaaatcaacaagagcaccaggagcacgtaggcatcaaagcaggaacagtcaccggagcaaggaaacggcatttcgccggcgagacggcgtcgacagccaaaatccccacctcgttgcctccaccttggcgaggagaaaaggtaagcttcctctctcctttctgtatctctctcttctctccctcactctctcgaagcaacgagaaaaccaaagcagggttggctttcaaaatgaacagtgtaagtgggtcccacgtaagcccaagcaaaagcccaatccaaccaagaaacccaaacgaaaactagctaagcctgatccagcattgcactaatctcaaagaaatatcaacggcctagaaaacgaatgatttagccatcttttttctgtcgacagccatatagcggtttttattttttgttctaccgaaaaatatttcacctagtgtactcacaatgtttcactatgtatagatctaatgttgcagtgaactgaaatattccattgcaacaaaaaacccacatattttggaaaccccttattaagggaattcattttattttttgttcccccgaaaaatgtttacctagtgtacttataatgtttcactatgtatggatgaaatgttgcagtgaactgaacattctttcactatttactgaaacattgtttttt

SEQ ID NO: 40722 - DNA, 551 bp, Oryza sativa
tatatggtttccacgcaaaaaacaaaaattaaaaaaaattgcaaaaaataaccctagccaccgccagatctgggtggcccccgctgccaaatttgagcggggctcatctgcccgctgcgtgatctgtcgctgccgcccgccactcgctatcggcgcacgcccgccgcccgatgcctgtcgcgaggccgacgaaggcggatctgctcgccgcccgcggatccggccgttgagggccctacagcggcggatcaggctatcgcggaccctacggtggcggatcaggccatcgcaggctcggtggaggtggatccgccagccaccgagccgcccactatcgccgatcgctccctccgcctgctgcctgcctcgtgccgctcaccgcctgtctcgtccagtgaggtgagagaggagatgaggtgagagagtggagaggaaataatgaggagagaaggtgagagagaggagtggataaggatgaaaaattttgaagtgtgaagagggaaatgggaatgtaactcagactttagacagatccttaagaagcccgtcta

SEQ ID NO: 40723 - DNA, 5024 bp, Oryza sativa
tcttggcaaggcgccattagctgctcaaaagcctccgaccgaattcacattgggcatgccattggtcggtgacgatgccttattcaagatggaccctgcatgcaaggagttgcacgggtactacatggggaagtccaacgcaaggaggaagaatagagagacctccatgttgggctagcatgatagtcagccgttcctcgggcctactgccttcatcaccgtaaacttcaaagatctatgggacctctacagggtgcgagcgatcgataccaacctccttgagtgctactccttgtaagtatttctggctaccgatatggtagtaactgtccataaattacgcttaccctgactcttgtctttctcgtaggttaacctggaagcatgtccatcataaagcaccccatgttgccttactcgatccagctgtcgtcaatgagacaacgctgaaaaacgatcgagccaacattgtggactatatcaaggactgcttatttgcccgtcaaagacaaggacttcattatgtgtgcctacaatcaacagtaagcatgtaccccctacttatactcaaatgcgcgacgcgtacagctgtagtatgtaactagcaatttattaatttcgtaggcgtcattggattcttctggtaataacgccgaagtggagtttggtacactaccttaactccaatatcaatccaaaaatatacgattggtcggccatcgaatctgccttgaacgaggcatgggaccaatacgtggcaagaggcgggaggcataaggatgggcatcccaaactcggtcacaagaaagacttcctaatacgttaacaagttggcaaccagtgcaggttccatgtctgccataacatgaggagcttcgcagacaaggtgagattgctcgaccctgaggtgtgtccttcaattgtttatacacacataggacgacaatttacaagtatgtaaactaacttggcgccgaacatgcaggaaaaaatttcaacgattccggaaatcaacttcgatatcattagagaggagataacacaattcatactagatgatctcttgtcaccgaaagggatgtttaaagtgaagtcctaggtagctcgtctcggaatggcagaacatttgcaatgcatatgcgacaaacatttgatttttgtaaatattctttgtaatacaattaaattctttagagtaaagtcctaggtagctcgtctctatatatacttgtatttctaattacatataaaattgttccaatttataacttagttttacaagttttgatgcatgtcggcggtttggagaaaaaatggttgtgaatgacatatacttcctccgtttcacaatgtaagactttctagcattgccacattcatttaaatgttaatgaatctagacatatgtatgtgtctagattcattaacatctatatgtatgtgatcaatgctagaaagccttacattgtgaaacgaagggagtatatgtgatgtgaatgcatgtgttgtgatgggacataaatgtgaatgagttgtgatttggctgtgaatgcatgtgttgtgatggaatgtaaatgttgtgatgctgagaatataaatgctatgaattggctatgaatgctgtgatgctagcaatggggttgctgggaatgggactatatatatatgtgcttctgtcacgtttttgcagcgagcatggctagcaaaggcctgaggctagccaaattataaaattttatttttttgttccaaactcatccctgacgggcattttagtaatgcccgaaagagatatgtcattttgttaacgaccaaatttggcgagttttggacctgcactggagttaagcagatctcccaggcctcgtgttttctgtcaacacatccgtgacgggcttttagagtaaacccgatagagataagtcatccgaaccgggactcgtttgactcaacacgtggggttaaaccaatcggtgatgggctctatctaaatgcccgattgagatgactactcatccgtgacgggcttagtggtgtgcccgattgagattagtcatccatgacgggctcctaactacgctggtttgactggtcatactcatctgtgacgggctttgttttcggcccgattgagataacatccatccgtgacgggcttttgctcgattgagatttttttctcacatcagtgacctttgcctagtgacggaggccttacccgatagtgatgaggctttcagcctatcacagatatgcaatcccgttctagtggcatgcattccattggagatgtgtggaactttaattttgcatttatataggtgtaaacacgaaaatacggtgacaaaaaaaacacattttagcaattcgatcattttgtacatctttacatatcatcaaaaagtcagaaatgctagaaaacaaatgatgtgttgtactcaaaaggatgtatctcattgtgttgtattcatacattgtccctccctgttgatggcatgtactattttcgtgcattttttcccataagaattttttatggttacttccttacaatcagacaatttttttaaccattatgatatgatgatgcttacataaaaaaaaagagagaaatcatacttcataattcattgtgcatgtcaacttgcatatatatataagacttaccagcaatgtggagcattgagccctgagcaacttcaacataaaaaaattggacaattacggttttatgtttctacatctttttacttagctccatatttaatttcttttacaacgtatactttgtgaatctctactctctaacaatatgaaaaaatggacatagctaagggggtgtcttggtaaaaaaagatgttacagctgaaataaacacgatagatataattctttctaattgatatcaagaaaaacaggctggggacatactatcactgttatcgttggctgagatcatcaggattgttgtaaatactgagtccctagagctgagagacacagtggcggatccaggatttcaacacgtggggagcaacttaccgagtaataatataaatgatattgcccatatagttattttcagatagaggtagtatataatatttacagttttgtacttccctccctaaattatagtaatttcacattaatatacacatgtttttgagaatttaacaatatagtagactcgtgttcagccgcgcatatcatttggcaacataaagttttatcatggtgaactaggtaaagcaaggataacttagtagtaatcgaaatgttttgatgcgactgttgaatgcacatccatagggactagacagctagcacaaactccacggtaccaatggcctaaatctcagaggactaaccttaatgcttatttaatcctatgattagttagatgtaattaggaacatatgtaccgcagactagtaattaacttacttatactccacaccaagtgttcattggttcccttgtagtatatttgaagatcaaggatctttttagcctttttaatttacttaatcatagttcagagattaggtcagttatggagaaaccagagatctagtgtgactgaagaaataattaaaaccgtatggtgtgctcaggcagaatgcatggaacgttgcacgtacgtacgatcgacgtgcgcttattttaatttaactcacaaagacaactaacccatgagcaaaaacatgggcttagtctcactattatgttcttcatcacctcacctaataaaaatgctcgatgcctgagagaaaggaagaccagcactccaacagccacgtggatatatacatttcataaaactcattggtaatttggtacacatgcaccgtcatgcagctctggagtgcacaagcagcatagagcaagaccagtgcaaaccaacagcaaaacatacacaaacaactccatgggtattaatctgcccattgaacccagcagtctgtggaatggtgacccaacacttgcgacaaatttccaagggagaggaaaaaaaatgatttcttggacggcttgctcatgtatacttttaatttggaatgtatggaaggagcgcaatatgagaacttttttaataatatgtatcaaactgttagacatatgtgcagatataaagtacataatagagagagtgctttgagagcatagcctttcataggttggggcctaaggccaagtcccacctaagatggcatgagttaaacttatatagtttagcatttgaagatttatgttcatagatttactatgagaaatgctttcataatacatataattcgcatgttttaaaactatataaatattaagaaattgatggttaaagttagaaaaatttgatgtaaaacttaaaacaaaggaagtaaaactagtccctactcgatctatgcataacttgaagtaaaaaaaaaatcacgataatttatgtcttcgcttattgcatgatttggttatatatgttctccaatacatatatatcttcaatcctacttcctccgtttcatattataagactttctagcattgcccacattcatatatgttaatgaatctatacatatatatatatatatatatatatatatatatatatatatatatatgtgtgtgtgtgtgtgtgtgttaaatttattaacaactatatgaatgtgggcagcgctagaaagtcttataataggaaacgaagcgagtgtcttataatttcttagatcaattttagtcatcaacaagtctataattttgatgatcaagtttaccggtgaaaattagaaaaccccatatgccaatctgtttgtggtacgatagagaattaatatagacgatatcagttcatcccaatgactgattgactgcatacaagttttatgtcaaaacatccaactggagcttcaaaagggagtacctatacatctttcgaaagatttttataatcgtatcacacagatttttaatctttatattaaaatccgatagatataataaaaagcaaaaagcaattaagcaac

SEQ ID NO: 40724 - DNA, 3367 bp, Oryza sativa
gactcggtgaacatttgtgatttgtcctacattcgagatagataattgttcagaccgagatagataaacatttgtgattagtgtattgtgtttgattcgtatgaactgttcatcagaaccttacattcatcatatatagcttttttggtttatgtgttgttgaaatattttagggtttggatgtagatctgaatgtatttgtacctgctataatgtttttgtccgtgaccgaggcagcactatattgtgagaatctgttgatatgatggaattttttgtttgctcggtgtgtgtggtaaagaaggtttcatccccccctacaggtctcagtgcttgtatctagcctgcctctgttctcctgcttgtgcaaacaaatactataactgatgcagtctgcctatgtgtcactctccatccaactacaatttctctctctggttgaaaagcagcagacttgcaggcaatgccactctattcttctgcctttttgcatcattaatatgctagcagtgcctttttttatccataatcgagtgttattccttcagctttctgaattagtgtaatgatacattagtttatctgatcatccatctatggtctattttagattagtggtggtgagtgcggatgtatacatcgatcatccccggagatggcgatgcatgtattgatgtacatggatgcaaatggctggttcttggtaaaatacatgtctactactgtagcatctgtctcaatttgacaaagagtataattaattgctactatactaccaatactacctagctactatagatgtcatgattgattattcacttgcttatttattttaattttctcctgatcatcaacttgttatttttgttttgatcgattgattcatggaactcaacatcagatgttcattagagctaagctcgcgtatgtatggtaggattgaattaaggagagaattgacagtcacctgagtccatacatgcataggcacatgtgagtgtgagtgctcatcttttttttatcagcttaattcttcttgcattgttgaaacacacaaaaaaaatcaatcagtgggggtgggggtggcggtgggggtgggtttggtgattcactcagtggttgtggctaaattggaggtgtcattgttgtggtttgagctcaagatttaggaaggtcttgcagtgctgtagcctatattgtttgtgcaaatgtcgatgaatcaccctctttttggtttgtatgaaacatagcatttgatttagctctcatgttgtgcctatgtgcatttgcaactgttgatgttgattaaattgccaaggttttgcttgtttgatgtgtgtattggcccttagcttttgcatgatattctggcaatcccttagtattcactatgaatgtcatgtgttctgaaacttgaattatcactgcagtattctatttgtcagacttgaagttgtctaattgtaaaattcaacttatttttctgcattcttgaatctgaatttaagttttgccttcagttacatgattttaacattgtaactacaatatttttctatgtaaatatagtacaaatgaactgtaatttttttgtgtgtacttggatgaaagtaggaattaactgtgctaactttgtgctatttggtcatatgttaagactcctcttttgacctgttctatataatttttaactcctttgaacaatgaatcattcacttttaactttgaagttattattttgcatttgatttaatttatatataatgaaacataataaaatacatggtaatttcttgattgttttcaattcctatccttttttggatgcatctctatggaacccaaaattgaaattgtagaacattagtgcaaaaatcataactgaatcagaatatttttgtacacttaaaataatttgaagatccaaatttctgtttatgcatgtagattttaaattgaaaattatgatctagattaagataaatctatacataataaccttttttttaactttttacctaaatttgattgtttcagaatgaaaagcttttgaagattgtagttgaagaatatcttacctcttgatgtctttcctcattggaattgcttttcatcacccatgtttagaacatttgatgttttcaaattcttctcttttaatcctaaacataaaagcattcaattaaatatgtacagattttgcactagtaatcatgatcataattaaaatcttggattcatttacatgattttaatattgaaattacagtattttttctatgtaaatatagtagaaatgcactgtaatttgtgtgtgtgtgcgctaggaagggattaggaactaattgtgccaactttgtgctatttggtgacaagttaataatatttgtggactattctatatgattagtttgaattttgtaactttaggaatttgtatgctttcaaatttgaaaattgtatagtattagtgcaagaatcaaaaaatattattccaacattgaatatgtagtttatttatgttcacacaaatcatctagtttatttttgtagataaactggagtacatttgtgctattaatctcacacgtcaaatttgcatatttgctccaacaaactaacatggcacaaactttgaattgaagttatttatttttcttgttgacgtaactattccataggattagtttcaaattttattttctacttgcattattctacttgttgtgtggattcctgactatgaaatgcattgcctaggtatataattgcatatctcttcagttttatgaatttgatttaaaattgaagtgtacttgattggtggactatttgaagaataatcttccagatggctgaggacacattttataatagaaatcttgatttaaaataaacatatggcatcctttacatgagctttatattgaagttacagtgttttttcaatgtaattcctatacaatttcactgtaatttgattcaaaagttataaaatattttttccaaataactgagatgcatatagttttgaatacaaatgaattccaacatatctaaatagataaaatttgtcacattcagctattttgaaacagaagggtagagttgaaattgaataattacatacctttggattttttttccagaatggaattgcttttcttccaccatccttagaatatttgacattcctgaatctaaatgcatttacaaattgaaaatacaagtaagcatggaaggtatgcaaatcatccttctcgtgctcagaattaacattgtataattcttaaatgaacagagtacactcttttcatattatatacttgcagaaaacaaatgtttcaaactctacacaataaatttg

SEQ ID NO: 40725 - DNA, 607 bp, Oryza sativa
ccccctccccctccccctccgctgccccttcccattccccttactcgcctcgtcgccgccggacgccgacgccgacgccgacgccgacgacgaagatgacgccgacgaggcgccggccttgctgcttccagatcccatctcgcgccaccacaccaccaccaccaccaaccccactcccacctctactacagatgagcggatcggggcaggccgcgcgccatcaccatcggcattgctcggatttcacgcctcgctcgcgcgtgcgcgcatggatggccgcgaaagggaagctagtaggagtagctccgctccgcctcgctcctgctgctagcctagcaaccactctctccttccttcctagcgaggcgaggcgaggcttgcgaggcagtcagagagagagagagagagaggagaagagagggttcggtaaaattaactaatgcctctctctcttcgatttgattggattggatagttaccaataatggcgtcctcgtggacttcagccttacgatgagtgtgcaataatgcactctcctctctctccgagacaactcctcgcttcctttcaccgagaatttccatttttctactctcaaatttactc

SEQ ID NO: 40726 - DNA, 684 bp, Oryza sativa
aaatcaattaaggatttttctgtttttagtaaaaacacagtgaatcttctaaaattcatatctaattcatctgagctccgtttaagcccattcaaatctcagtaaatcaagaaatatatatagaatccattaaaaatggttttgttctctgtttcagtagtcttatagcctgtttgtattgtttgctttgtatgtcgcttagattccggctctcccgacgctccggcgtactttgaaatagtcgccgaggttcctccagcagcagagcaaggcaagtcattcttgtcacttgaacatgttgatcctatattgcaaatgctccattgttttccttcaaatactgcattgttttataatattaccatgggatgtttacctactgttatagccatgctattttgtaccatggtcctttgttagcttgggatataacatgcctagatattggactagggattgcttagccatgcttagttcaactagcacacaatggggaaaattatattaatgtatagacttcaggatctagtgttgatgttggattagagccaccgtcctggtgtcgcttcattaaaatatgttaaatggtgggctgtgggtgcatggttttgctagtcgcgcccatggcacttaaggatcggttcgcgggaaaccctagaagaattcctcgtacttaccacaagc

SEQ ID NO: 40727 - DNA, 551 bp, Oryza sativa
cgtcgtcgtcgagcagcttgatggtgctctgcttcttggccatcgccgcagcctcctgcatctgcctctggtactcgctgaccccggcgtcgtcgccgccgccgccgcaactgcggggcaccctcccgtacacgtcctcggcgaacgcggcggtgtcgggggaaggcgggaacccggcgaggtcgacgagccgcgccgcgaggtcacccgcggaggcgcactcccgcgcgaggcggacgacaagccgcgccacgaggccctgggagtatccgaggagcgccatgaggcggtcggagacccacgtcctgagctggccatcatcgctcgccgccatggcctcggcctccgtagcctcgtttgcggcggcggcgcggcggtgccgcgagaggcggtatcgaagggggttacgggcttgggctttgtggtcgccggtcggtggtgcggccaaggccgctttatccgtgcgtgaccgtgtttgtgtttgacgtattcgacgtggaggtggctccgctatggcggttcgtgtcagtgctgggaaaccgggaaccgac

SEQ ID NO: 40728 - DNA, 979 bp, Oryza sativa
ttatccggcctcagtgcatcggcaaaaccagccatagtaaaatcacagtgcctataataaggtttttggattgttgagattatagacatataacgatttaatctattccataaataaatcatgacattacagatgaaaactagcatgaacgcatcattagatctacacatgtaaactacacagtataacatgaacagatcaaatatgcgcaacatattgaacacgtaccgaggtgacgaaaagaccggctgcttggtcgaaacttttcgcaggtgtctacgaaggcacgaaacacgcgagcgaagaggaaggcgagccatcgcgaacgaacagggagcagtcgcgcgaagcgcttcccaaaaaccttattgccgccttctcccggtgcaggacgtcaaaggcagaggttccggagacctgctctcccgatcgctggtgcacgccggcgagcgggatggagtagtctacgagcgacggcgcagtacagagtatgaggcaaaccctagattgattttgcgtatatattgcgtgaagacggcggatcggtttatatagagaagggtcgcttgatcagggcgcccgcacgatctctactgcgcgtaaccgaaccggataagtcgcgcgtaacttatccggactccacgctgtttgcacgcaccggatttttcggaacgtttccaaaacaaaaacgaatccgaatttgcagcaaaacaaaactgcaaaaggaggctgcatctgcgcaagggtgaggagccaatttttcggaccattcgacgcgtacgtcgtgtacgcgcgccgcctgccctgccctgctaggccaggccaggcgaggcgagagagcgcgcgcgtgtgtttcccctcttctctccaccacacatgcttcaagcgactgggagggcatcctcccttttaaggaggtccccctctcctagaataagcaaggtggtactaaactccacatgcatgccatcccatgagg

SEQ ID NO: 40729 - DNA, 690 bp, Oryza sativa
tagggaaggaggcgaaaggagggagaaaattgtgattttgctatcgcaaaagaatggtttcgctggaatgctatcccttcaaagtgattcattaaatgctatcataaactaagggtgttcactgaaatgctattttagatctttttgattgctagaaatgattttactctattttaagttttgttctgaccaaaatacccttgtgtccttgtctttattacgttgtgaaccatggtgcatgtgaaccactggtatgttgtgaactactgttatgttgtgaaccattgttatgtgaggtattttgtgaaccacatgctattcaatattatgtctacatgctgtccaaatttgttctattttgtttttacaattttttcatgcccaaattttatgggttaagctagcttctccattatatctttataacttggagtgagaaaaatcttgatgtgtatgcgcgcttgtggctgaactggactacacaccatttttaattgtacaaaatgtgaaagcaaaatatattgctatagcaaagcatgtgtcaaaaccagagaagtgctgtttgactttcaaaccagtgcactagagcttttgtattagtgttaatgatcaattagtatatatatatcacgcagcggagcgtgagccgtgcataggtttcacaaatatatagcaatatattttgctaga

SEQ ID NO: 40730 - DNA, 617 bp, Oryza sativa
tgatttaatggaattgtctcttttgcatgggaaattatcacccaaaatggccctgcaagtgcagtatatttaggtaagaaatctttggtgttaactgtaaaatgtgcaattgtataaacttctttatccacatcaattcaatgcgcaaatacacaggtgcatatgatgatgaagaggctgcagcaagagcttatgaccttgctgcattgaaatactggggagctgggacacaaataaactttcctgtgagtcatctatacttgctaattataattggtttcttagcttccatttagttcttctacaattattaaccacacactgccttttcttcaagaccttcatttggttaaatttaatcatttatattttgcatcacctgagctcaatttcgaagactgattctcttaagatgcaaattgaaaaccaaaagatatcttagagagtgttgtaccaaactttggatcatactagtccaaacatatcctatgcaactattgtgtgatgtttgaaaaatctgaatactcttgactattatattatgttcttttgtatgcaaaggttagggatttattcagtttacacttgacgattcggagatggatgtttgtgtcctt

SEQ ID NO: 40731 - DNA, 622 bp, Oryza sativa
acaagatagcactaggaacaactcatgcacaactctgatatatgaagtttagctcaaacataacagtattttctcttttctttctttcttctttcttcttttcttttttttccttttcttttctgttttttttttgtgtggctttttttttctttttttttgcacctttcttcctttttttcacttttttcttgattttttttaacaaaaactgactcaaggaccttaatgtaagattacagggactcaaacataaatataaaatttacagggactcaaatgtaaaagtctaaacccaaaattaaaattatacaaaaaatggaatgctgaatttatgccggttccgtttttccaaacagatctcgaaaccgacaccaaacaaaaattcgccaaggtgtttgacacaactcggaacggtggaagagagggagggagtcggactcggccaaaggggcgagtgggactcggccaggaggtggagtggatggcagccgaatttggtgtatgggataaaaagggaactgatttttaaccaatccaatctactatatctttccaaaacaatcttgactacttccaaaatcagatatggtaattcaccttcctcctctcgtgcacgaca

SEQ ID NO: 40732 - DNA, 817 bp, Oryza sativa
ttattggctgaaacttcggtgaaattatgaacaatacctattgaattgagcaaatctatccaacaaaatataactcaatagatcggatttaaccgagacagtatgacattgatgatgagcttaatagatttaaacaaaccgatagatattatgcaaggcgattgatatattgaatctaactaagataacaaagcaattaaagaaagatctggtacatcatataaggaacgcaattaaagacatcatgagtatatcagacttaagcaagaaagtactagccggaccgatacaggcctagctaacggaatttactttctcaccggaggttgaaacttaacatatgtagcccaacttgtcaacacgttttcttaccggagatcaaactttatcaatgtagcctgctcaaaaacaagaatccgtcgacaggttaggactagtgttgcaaagtgccaaaagttatatataaaactgttgtgattacagaccctgggtatatatatttatacccttggactggaacaagtccgactcaaacatgacctgatctgctcagaactctagctaattacaaaagagggaaacgacaagtctgactcaatacgctccgattggcttaggactctatctatattatacaaattttcctcgattcggaagatgattccaaaatagaattaaaactaaccaaactcatcttatacactttccaactgacgcaactacaatcatggcgtcaacttctcctttgacttggtcttgacttgtcaaattttgcctttaacaataataattggaatataaaaactattaggggatt

SEQ ID NO: 40733 - DNA, 4565 bp, Oryza sativa
catttttccatacaggccacttaagcagccgtatggaaaaatgactctcgatttttgtagacgccactagttatggtccgcatggaaaaatgatggggcctcgtacagaaaaatcacttttgtagtagtgtcatctgccgcaatatattttgtgctgaaatatagccaacataagctattaatgtaaaatcataataaaataaatagtaattacgtatttttattagtaagatgaataattaaacatacgctcaaaagttaataagttaatagaggaaaaaagtaatataaaaatactatagagatatcctaggtaaaaaagaaggggtcgtgaatgggaagagaaaaaaggaatgggatacgtactacctgcttaagtacgtacgtgcgagggaggagtatgtacgtgtactgagggatggaggagtacatgtacatgctgggagaggagaggaagggcaaactactggttttaatcttacctaatggtgcaaaataatgggtctaccagtttaaataaaaattgaaggctagattttcccgtctattaaaatgtcatgtggcggtttatgggcgtttataggggtgcgacgtggcggcttaaaagcgtttggtagaaagtttaatgaacttttagtatataatagatagatagatatattcaatgttagtttttataaaatcaatttattactgtagaagttgctaaatatttttttaaaacttgattaaatttggctggaaaagaatcaaaacgacatttagtatataatatttctacttctaacgacatttagaaactcctcgacaacgtgtgttgtttgtggttttatgtgtgaagtcatgggcgagtagtagaccttgtggagattaaaaggtgccagttggtcgcattgatgatagtcttacattcggttagaggtttgcggatgagttaatttcggtatgggcgacaattgtcctacttgaattttccatgtctaatgaattttgccgaaattttcacatctaagcacatgcaaccttctaattccaaatatgagcaggtaatggatggaattctatttttaatcaagaagcccacatgtgtgtgcagtggtcttccatcgaacttaatgtcaaacgaaatataacaaactaatggctgctgatcattggacaaatcactagctcgtagcgacttgcttaggtctaattgattgtttgtcttcagaaaagaaaatcttattaccatttgcaattggttggatcaaccattacgagatagggcaccgtgccatcatgccgttagtctcgagctttcttcgtcttttttttttcttaatccatatatgacttggatgttgttttctttttgaaaattggaactgtagcggtcggttgaaatataatcatctgcttggatcatcaaaatcataatattatgtgtgctaacaaatcttgatttgtttcacatagaagctgcatcaacaaaaggtaattgtaatactagcgaaacatgttaatggatcatttgctttgtgcctgctagctagtttgattagaaacagaattcaggacaatacatgctcacatttggaattatgaggtcgcatgtgcttagattaaaaaaatctgtgaattttgtcctttcacatcaatataagagtaagtttaataatatagtcaactactagctttaaaaattaaaatattatcaataaccaacctaatagcctacttatataatagttatttgtaaatatgtactgcatcatcaatacttaatccactcatctctcacatggtttattgaagttcgtgctacaactgacatataaatcagtagactacttttattctttctcatttcttctcaaatatttacaatatgatatgccccgcaaaaaaaatacaatatgatatgacaaattatatagcccgtttacaacttattgtattcgctctaacaataagtttattgaactcttcaaaacttgtctcgacgacatctatcatccactaagagagagagagagagagattagaatcctcccttgcccccaaccacacccctaaccattaattataaataattgatgcacctttggaacatatgattacagaacattcggcatgaaatgaattgagaacaattggtaaaatatgtatatatatatagacacacactagcaaaaacgcatgtgagttgcaacaaatagataattttcacaattgataaaaactctgccaatttaaatgataaaccggcacaagacgaagaaaataatggaaaacaaagtaagaatcatatatagtattggacccagttgcgtaagtttcatgcatcatcacatggagaatcccttatatagacatttccatatattaacaaacaatcgggtggctattccctaagttgacgcatgggtattttgctataactcatcgaccaaagattaaaattttcatttttcaattagtgaatttttttttggtacagatggaaagcatttgtaaactaacaacttactgtatacacatcttaagcaatgataattttaaaaggaaaatatttatgagaagagaaattgcaaagggaaaaaatgaggaaaataagaaaaggagaaaataaaggatattggaaggagagatagaggatcaggattatcaggagaaattaaaaagtgaaaatgaaaatgaaaaaaaaagatgagaggaaaaaaaagatgttgatcattggaggaggggaggagtgtgcgagacggggtagtgggatggtgtgacctggttgggttgggttggggcgagccagggttgggctaggagggcatgtataatagttattacaggatcatatcgaattggatgtggttcaggtacaactaacttaaatacggatgacgtatcaaattccggcaaaaatattttcaatttttataatagtagagatagcagaaaattagattatctttttaataatagtacagtgtcataaatttatatatccaactggatgattcccaagacagaagttcaacgtatatatctttactaattaaacaattattaataactttccgttcgtcacttttttcccgcgtacacgctattttttcagccatatactcaaaattttttcgtgagtgtccgctttgctcacgatcccctctacccctacacgtcctttgtccgtctcgccgtgagaaaccgaccgaatcagatgcacgacagtacaagggaagaaagaaggaaaagccaaataattccctaaatttgtaaatcaaattaacctgtatcaattcgggttactataagcctctgggaaacccgaccgtggtgtgggttttcaccgggaagcggcatcaccaccgtcgccatgcgggcctcatcttcgcccgcgcgtgccccggcaccacgcttgcctcctcctctctgacctgccggctttgccttgcgtgcgccgtcttggagccgccaccatcaccgtggtgccaggacaggaaggctcaacttggcaccgccctaagcagcgccacccagccgacgatgttggagacgcacgacggaatcaccttcacccgcacatgccacttcgccggaccgccatctctgccattgtcatcattcactcgctcattgggagagggaaacagtgaagcgaaggggatcgagagagattgaggtagggttagggtttttcccctcccccgatgcttcaacggtgcgggtgcgatctgaaccatccatcagatcggacgattcagctcgccctctcgttgggccgtcgcagttggtggaccgtgcggattgcaagctgtggaagcgcccataggccgcgctcggcgctcgctaccgcttctcaaataaaatggactggcccattttgggccgggttcgggagccctaggccataatttttctttatagaattgttgtcaaattaaatgtttattctttccagaaattcatttaaatgccttcttagctaaataaagttggtgaaaattattttagccaccaagtatacctacttaaaaaatgggagtgtctacagatcatgcaacagattttgatgtcttccatctgtcgaattttttgaccatctgatccagatccaacgaacaacgtttttttgatcaaaatagaaggaaaaaaaataaaaaaaaacacagatcgggccagatatatgcccgtctgactcgatccaaattaaatggaggcccaaacaaaaaagtctaaaattcaagcccaatgtaataaatcaacaaaaaaagcccaaatagatgagcacaatacacgtgacacatgccaggtgacttaattagaaaacttggcacccaagaagaaagtgtcacgtgatctggagataaaaagcaaaaagcaaattcaacatagggggaatcaaaatctgaagtcagaagaaaaaagatggagattaacgagaaaattgacgatagagaagcaaatttacagtacgcacagaatggaatcacaagtttgagcgatttggagaagggaaaaggtgaagagcaggaaaaatcaacaggtaagtgcaccttttgattcctcctttgaaatatctt

SEQ ID NO: 40734 - DNA, 651 bp, Oryza sativa
cagcatctgtcattgctgaaaaataatcagcaatggcgggaatagattaatactagtagtttacagtgtgtatctagcctagatgtagcaatatatacttgttgagtaatggaccataagaacgacggttttgttcttagttaagtgatgttaactaggccgtaccaaagatacatgcatccaaaacgggcgtattgtgattgatgtttaacgaaaaatgtcaacgtcgccttgtagctatcaagcgtggttttttttatatatatggaaggagggatccaaaggtgacgcatgctcttccgcttaacaagggatggagcgcctgttcatcaaggacctaattttggcgttattttctcccgtctaccgggaggtactagtactgggaggtacaaaatcaaatctgaccatctatcgtgagagggtacaattgagaaacacagaagagaagcgaaaccatctccggtgtcgcgccaccgctttctcatctgtttaaagggttcgctcttctcatctgttcagaagaattcggtaaaattgtaaagaaattgaatggcacaatttcctgagtgccttgtagttgcagacagcagcagaatgtatagtaagcagaactaagtgttcactgttcagggcttcagacaggcgctt

SEQ ID NO: 40735 - DNA, 817 bp, Oryza sativa
aacaccaaccgagaccaaagagaggtagcagcggtgagatggtccttttcttttttttttctttttttttctctcgaattaagtgggatacatatcccaaatcaaacctcaaatacccaaatcaaacccaaaccaaagtaacatcacaaatcttatacatcacagatccatacaaatgtacaatgaatcacaatattgtccatacaaaagtacatcacagtgaatcacaaataaaaaaacaatgttgactgccgctgtcgccggccgccggccgcggccccatcggccgccgtcgcacggccgcctgccgcgcggccgccgcacggccgaggccccacctaccgccgcccacggccgcctcgctccgctgccgccgcacggccgcctgccgcgcggccgcctcgctccgccgccgccgcacagccgcggccccaccagccgccgccgcgcagtcgcctcgctccgtcgccgccacctcgctccgtcgccgccgcccggccgcagtagagaggggaaggaggaggaggaggcggggatagaaagggggagcagagaggggaaggaggaaggggaagggccaggggaggaaggggatatcgaggaggcgctggaggcggataccgagagacttaaagagaagagaaaaaaaaggggacttaaaggcggggatagcatgggaatctttactcccggttggtattaccaaccgggactaaaaatacatctttagtcccggttggtaactccaaccgggagtaaagcttatgttgatctttagtcccggttggtaacaagatccctatctttagtcccggtt

SEQ ID NO: 40736 - DNA, 606 bp, Oryza sativa
atggcttcctaaaagcatcaatgttggaagtttgtggtacaagaatgattgtttcatattggccactcatgctacgaaggttttctatttgccagatacaaagctgggtgaaaattggcaagttgtacagacatttgaccataggcatctttataacgtaagtcagacggaggttagtgctactgcatatcaagaagacgagtgctatgatgaggaggatccacgccgaccagtttctagcattatatatgatacgcctttaaatagagatgatgagcgtggccctgtttttgaagctgctgaaattgctcggttgatgaaagaatctagcaaagaagtgaatgtcattggtgatgaagatgaagatgaagaagatgacacacttatggagtattttaacgaagaagatgactcagttatggaggtcgatagtgacgacgaatagttctgtttgaattttatgttttaatattttgtcgtaaggctcaattagtatttgagaccatgttctacttatttgataccatatgttctattatttagatagcctcaattgtatttgagatcatgttcatctatggaattatgtataatggttcgatgcca

SEQ ID NO: 40737 - DNA, 2678 bp, Oryza sativa
aaagattagtttatttaggctgtgttcgggaggaggggttttccgggcacacaaaacgaagctcgtattattgcaagatcaattaagtattaactaattttttaaaatatggattaatatgatttttttaagacaactttcatatagaaagtttttgcataaatcccaccatttagcagtttgaaaagcgtgcgcgcggaaaacgagacaggtgggttggtaaaatgggggcggggtgttcttacttccccccaccacttttccaacttcttcctcctcatttttcacgcacgcttccgaagtgcgaaacgattagttttttttatttacaaacgttttctataagaaagttatttaaaaaaatatattaatttagttttcaagtttattaactgatgcttaattaatcacttgttaatcaaccgtttggtttagcgtaccaggtgtgaagggttttaatccttcccaccaaacacatacttcctccgttccaaaaatataaggagttttggttgtgttccatctaactaaaactccttatataagtgattaggatgtgttccatccaaccaaaactccttatattctgggacggagagagtacttagttttgtacgctactttcttgtctattcggctttattcataaaaataatcacttgttaattatagataagagataaggtggattctcccaaaaatatttgaaaacacttacataattaagaatttcaagattgcattaggtaatttgagccacattgccatatcactagcgataaaacagagtagataaatacagatacaattcaatacggatacaaatacaaatactaatagtttttcctggatatgtatacaaatatgaagtcgaagcttctgacggatatggataataatactaatatctggtgaacaatgttattgaaatatctaccaaaggaataaagcataccctatttcttactaattctagaccttcaaactacacctttaaactttaatactagcccacactactagcactagttcacattattaatattatttaaacatgtaaatattttaaaaaactagatttatatgttataatatcagttatgcttccatatatatatcggtaatgttatatgcgttaaacttaatggacactatttacactttaatgaaactttttatatgaaactagctaattatgtgtgatgatatatgtttctatcataagttaggtggttttcttgttaaaacaaaatccttatttgtattcgagataattcgtatttggtttcgtatcaagctaaaaatatgaaatgaatatagcacaagtatgatgcatccgtatcagttgtgttttcttccttgcatgtcagtgccacattagataccactttgtgtgtggcccaagattgaaaatgatctgttttgagttttcacaatttactactgaattccacaggattgtttttttctagatgttaatatttaactattgagtttgtaaaatggattctcctaattccaaacatacacaatgcaatgcacaggaactaaataataacttttattcgttccaggattcatgagctactcgatcgatggtaccagacttttttttaagaaacatattatataatggcagtgtgttttgaagtgcgataatggaattgttattcggccgctgaagaatcagaataaaatatctttaaacaacagactgtctatcccacattcccaccaacctgacaataggcctcattagccaggcacacccacactcgcagatatagatacccaaatgggccgcctgacccagcacggcccaagcacgactgggcctaggctgaggtcagtcgggccggtatggtgccatgtctgcccacgagctacacccacgacccaacacggcccgaaggcacgatagcccatcgtacttctctacagaattccctcatacctttgggttgtgtcttatgtggctggaataactctattttttatccctcttctctttggatagtgccttttagtaagttataaggatgaattaagtttattttttatccctcaactatttttttagaccatgtcgtgctgggctgggcccgaaaccagtcatgtcgtgccgtgtttgggccaggccatcgttcctcgggccttatggccatctatactcgcatggaataagttcacctgacgtccctcaattttacgccgagtctgtctgaggtccactaatcgcaataccggaaatgtgtacccctgaactacgtataaccattcaaaaaatgccccaaggcagtatagataccagatttcgttgacgtggcctagtcataaaaaaataaataaatatgtggggcccatatgtaagtgagagaaaatggtataggccgccaccctttctgttctttttctcttctcttctctccttctctcgagcagacgcggcggcagactcggcgtgaggcggttggctgcggagcaggggtggcgacagagggagaggtggagagagatggccagcgtgatggtgagctcggtggcggagaggaacggcgcgcggcgcggcggaggggagaagagcggtgcgcgacgtagcggcgggggagaggagaggagtggcgcgtcattgggggctcgccagaggaaggctgtcctgcagctccagtgctcccgta

SEQ ID NO: 40738 - DNA, 668 bp, Oryza sativa
tcccctccacgccaaagcagcagtagaagggacattgaatatgctccaggcctgattcctaatggaggtggaccatcttcccctgtcatcggctatcatgcccccaggactttaactccctccaagatctaatcagggaaccagcagatgcaggcaagaaaagaaaaactaggtcatcggctgtggacgttttggctctagctccaaagaaaaaaaccaagtcgaagaaaactaagacgactgatgacctgcctgccttagatccatccattgaacaagctctggatgaagaagagattggtgaagatgttgaccaggctgcagccgaagtgagtgacacagaaaaaacaccaccagcttcacccaagaagacacctccaactccttctgcccccactcatttctcaagagtaagcatatctcttcggcttcttttgtaattacttcacttttcggcgaactactcattgactctatggttgcagaagaagaaaactgctgtgaagaagaagccagcagcaacaattctcaagtcggctccaccagtaagatatttttaattcttttactagtcaatctcagccgattttatataacacttgtctattttacagcctcctcctcctcctccttccgtacagcaatcgtcaagtgaccgaactccatcg

SEQ ID NO: 40739 - DNA, 636 bp, Oryza sativa
caaaattccgtcaaaaatcctccctttttggtgcttagatgccaaagggggagaagatatatccttttattatggtcgatcatgagtggtttttatttgtatgagagatgtgtgtttcttaagttagtttaatgctttgtaagacattattgtttaattatgaatgcttgggatgtaatgtgatatatttgtagatgtgatgaatgtgatgagcaaaatgtgttatatttgtagtcttgtgagcttcaatgtggatgcaaagatttagggggagctctctacttgctttaatgcactcttttagggggagattttactaaatctttgcaccaaaatcatctattatattcattctctcttgtgatctaatcgtattgtcataaatcaacaaaaagggggagattgaaagtgcatctaggctcctaatgattttgatgattgattacaatgtgattagagaggactaacacttttattcaagcaaatgtgaaggttgttatgtcctcgacatgttgtaatgagatgcataccccatgaatgcgacatcacgatgcaatgcggcaatgatcaaatggtatattgtatcttttaccttgcattgtgtcgtaggaatgccgtactatttctcgttgcctt

SEQ ID NO: 40740 - DNA, 659 bp, Oryza sativa
atttcaaatggaaaagtcatcaaaaacaaagttgtatgactcatcaagatctacaacttttgttttggtcactgttccatatgatgttgtttgaatagtttgaatttgattttcaaaatatgacaatttcaaacaacattttcagatactaaatgatttcaactgaaaaagtcatcagcaataaatttgtataactcatcaagatctataacttttattttggtcatttctttgtccaacaaagttattcgtaagattgttcacataataaacatctcttatatagtttttataaaactatataagagatgtacattttgtgaacaatcttacaaatcactttatcgaatgaagaaatgaccaaaatagaagttatagatcttgatgagttatacaactttgttattgataactttttcagataaaatcatttattgcttcaaaatattatttgaagttttgaaattcaaatttttaactgataaaacaaagtcacaagaaaaaatagccaaaataataccagtaagaacacaataacattatagaacatgattttagaaacatttagggaaaaaaatcatccaatttggagttagatgcactagtttcaaatttttcaaattttattttcgcatacggcttcttaagtggctagtatg

SEQ ID NO: 40741 - DNA, 558 bp, Oryza sativa
ttttacctctgtcagtgagatcaaatccgtcgctacaatgctgccatgtctgttggtccgtcggtttcgtcaccagggcatgatttgaagcaatcagcaagcagccgccgccgaaatcatgcgaagatcaccgtcggttgagcctgtacatcaccaagtcaatactactcggatacgtacggcaagacacaaagtccaggatacaaattaaatatacctggtcaaatctgtggtcaaggaaattaatccatagacaaatcagctattacatgcacaaagtggtctccaaactaatccatgcatgtgctaccgacgattacatgtctacacggctgcatgacacggctgcatgctacggttcatccattgacaggccttgaatcaaaattggatcacaaaccaggtttatcgttctaaattttcttatataaattagatttaattcacagatcactaattattatttgatctattattttatacatgtaccgccggccgccttcgtcgctgccgattggtttcatcacctccacggttggtgtgcgccgctgccgttgc

SEQ ID NO: 40742 - DNA, 560 bp, Oryza sativa
ataacatttgtcttcaccttttcttgcttatgtatttagtgcatgtaccttgaagcatatgactagagctttgtacttttcttgtcttccttctccatataaacttatagtttactattatccttgcttaaggtggttgcttcagcaacaccaaacacgagggcggcgaatgctatctagcgccagataatggtgtcattttcttccatatttttttttgctcgccatatcttcccgctcatgtcattctaccaacacttttttttttcgtcgaagacttcatactcctacaaatgattgagacagaaaggtgttttttcttgatccagtggagataaagaaataagcatcagtactaataacattgtttactgcttactttaaatgccaatggcacgtgttgatgtagaattacgcatagataacctgccagcggctagcatcctccaaggaaattgtaccatgagttaggcaaagtttgatgaaccagagcttagaattttactaccctccggtgaatgtgacagtgaatgctatggacaggaactctttgcgatgaa

SEQ ID NO: 40743 - DNA, 566 bp, Oryza sativa
atcaaaaagatgcagaaccgggacacttattactagcggccttaatcatttgagcattagaaaaatcatactcatcaaattgttgggctactgctagctcccaattaacataagcggcggaatcatacttaccatcaaaactggcaatttagattctacccttgtaagatcattatcatgtatcatgatttagattctacccttgtaagatcattatcatgtatcatgcgtgaagaagtcgctatatctcgttgatggggaagatgttgacattgagcatgaccatcttgtttccccttgcgcaatcctgccatggttagcagcaaacaagaaacatacacaagaatatacacgctcctatcaactactaggtagtggcagctcaaatctcacacactcaagcttttaaccaagctcttacaagatcttaccaatgcaagtggaatggtgatgtacaccgactcaaccaagcaccccaatagaggttggatatatcgatgcctcggcaaacacttgctgtacggctgcaatcaaatctatggagctctgggtaggcttaaatatgt

SEQ ID NO: 40744 - DNA, 549 bp, Oryza sativa
aagagacctctgttgctgtgataatccgtcttcctgtgataccagtactgtttcctgggactggtatcgatcaacaggttaatttggagcgtcaagggctagttccggtcggtactagttcggggcgtgacacaacagcttcagtatatgtggctggctcaagagaaatctccacctgttcagcacaactaaaagcataataaaccatatcacattcctcaataaggcagactggagctccacaactcctctttgttctgcgatgtgcaataggttcatcttgtggctgcaaaacaagaggtgagtgctgaataatatcattaacatcattaccaacaatttcagtttcctgatcatccacgtgctccacctgcacgctaacatattgctgctcctcatcagaaccacctggtatgatatctgtgggcaagctatcattaaacataacagattcattgaaaacaacactcctgctcatgaaggtcttattagtttcaggattccataatttatatccttttactcctgaaccataaccaagaaacagac

SEQ ID NO: 40745 - DNA, 2554 bp, Oryza sativa
ccatcctccatccatcccgtccgttttattgttttgctcatttcgacatggatttagtaccgattatgtatgccatgctcgtaaatttcttgcgtttttagtgaatctaacaagaatctggacctttaggggaattgatgctgttgactgacactggaattgaactgcgagaacctgcacaattacatacctggtggttgtttaacctttattgtatttaaagaaacctgctattgctgggaatggatgcatcttacatttatgtttgaattttagcaagatttaggatgtagattgatgaaaatgtttgaaatgtaggttcctttttttgaggaaacaaattcagcatgcccaaattcgcattatttttcagtttagaatataataagttaacaagaaacaattgcagttccaaagggtgaacctccacgcagttttctattcttttattatgttgttcactgaataaaagttctcccacaagctcttttcgcaattatcaggagcaattgatttatttacaataaagaaaatgacttcttggaagctttggcatagtattttagaaaagtaatttcttttagaatgtaggggttggctagctctttgttgaattctgataaagaggttcaaagtacagcatgaccataaacttgggttacagataaacatgcagcatttttttttctttgcaagggaaacatacagtgttttggaaatgaacaatcctgatcttcacaccaacaatactaagtcccttgtcatgacccgaggccatgacgggataaacaccaccgggaatatagccgggcggcgtcggctcctggagaatggatgtagatttaggctagggagaagaacattgttgagagggagagattagactaattgatattcattgcttgcctgataatagacacaatgtacaacttgacccctaagtaagaacctaatcttatattatctctaactaactaataatcttcttatcttatctctaactaactaataatcttatctcttaacttaattggtatgcgctacctataggccttggcctacggcccaatgcccatgacatccatgctaagagaaataaaatgaatcttgtggtggattgtgtattgcttcaaaacagcacagcagcataggataatgcctttcagaaagtcctcgcaaatttcaacaaacctgaacatataacattattttgttttggcatgtcatgttgtcttcctcctgaaaatcagtacaactccagggctatctgtaccagttccgctagcaaatgcaactaattgtatatatcaacatggacttcatatgataatttatgcacatatcctaatctgatgttttggaccatcttcgatgaagtggaattcttgtttgttttttcttgttaagaatttatcttataagctttatttttgaacagtttgtgctgtagcattaactgtcgttatgggaataagatacatcaaaacaagaaaggtaatgccagctggaataattgctgccgtcaggtattctctctctctctctctgtctctctcatgttattgtgtcccttttgtcaggttctaaatttgctatgctttaataaaatccttctgtagttctgtactgatatttcattgtgcctttcatagcctatattaaccatagccattgtcagcaaagtgtagttatatgtgctatatgttaaacaatattactaactagccctttggctttgattctcagaagtattttttcctttgtgcatggagcccacaaccactacacatatttgagaatacttcacctagtcaagtctttctttccttctttcatatactagataatagatactactccatgatatcttattcccatccttggtgccttggttgttgccttgctgttctgtgcactctaatttaaatatatatagatgacgccttaacatggtctatacatgtctttgcagtgcacttgtactgatattctacatctacaagatatcaaatggtggcaataaggtttatgtcccagtgagcgcggagtgatactggaggccagggtattatggtgcattctctggataattctgaatcgatcgatctgttcttctaatttgttgcatacctgtattctgccatcccagtgatgagaacatcgttctgcataatgtgaattatgaatgacccatgaaaaatctcggcagttcagacactggttcagctaagataccaaattcttctgcgattgtgacatatgttccgcttgtatcgtgtgaaaactatattgtcattgtactgcacatcttataatgcggccttgatacagtgattgcttattagtcattactaggaactaatttgggatgatttggtttgtttcaaaatttttttgggacgattggctcgttcaaaaacaaggtgggatgattgatgtatctatgattggataatctgcagttccattatgcagagttcacaaaaatgattcagaaagtgtctcattattcagaaatgcagagtcccatttcttacccctccaacgcggagta

SEQ ID NO: 40746 - DNA, 583 bp, Oryza sativa
catatcattcatgccatggctagctacctcttgataatagtagaattgtcacgccccgaactagtcccgaccggaactagcccgtgacgctccaatttaacctgttaatcgataccagtcccaggaaatagtgctggtatgacagggagacagaatatcacagcaacagaggtctctttatttagagtagaggtacagtcatgttgggctgcggacagatcccgagctcacaactgcattacagaagggaaacggaagccaggacttggaccaaacaacacaggcgcgacttgggaactaggccgaaaccctaaaactcatcatagccggcttgctcctggaagaactcctcatcagcaggatccgcttcatcttcttcagcaactgggggggggggatatttatatagagcaagggtgagtacgggagtactcagcaagccagggaaataagtgtttaatgtaggcttcaaggaaaggctgttgttttcgtaattgattttatttgaactcttttctaaaaacaactaagtgagtgcttctcaaacgacacggatgagacagtgcgtctcgtccggtcggag

SEQ ID NO: 40747 - DNA, 592 bp, Oryza sativa
ctttcctctgtttctttctctgttctacgtgatcctgctttgcgccttcctctgctgctctgttttggtgtttcctccccccttttctacatcctatctactctgctccctcatttgctactatgttgtggtctttcctccctctcctctacatctcatctactatactcctccctctactgctctgttttgctccctgactccctgttagtagtagtactcagcacatatttaccctgctttgctcttcccccatgccgcctctctctgtgtattcataggatggtgttcttttagttaataaattgatatctagttaagtaattactataaccatctagtgggctcaagatttgccaagaacaaggtatatatacgtgtgttgtactgctcttaaaatacaactttgatttgctatcagattagattattttgtttgccacctaattagtatggagtgtctaaggtgttgcctcaccttgcgccttactggtaaggcgataaggcagcccgggatcatcttaggacgctttaccaccttaaccaccatccaccaaagtaatggtggaaaatttttaaggaaaaagatttt

SEQ ID NO: 40748 - DNA, 1088 bp, Oryza sativa
cgcccactccgccctcattgccgtcctgagcgccggtggctgtgagcgccctattcgccgccgcccactccgccctcaccaccgtcctgagcgccgtggctgcgggagccctttcgccgcctcccacttcgccctcaccgccgtcccaagcgctggtggctgtgggccccttcttcgccgccgcccactccgcctgccatcgtcccgagttctactgcccccttcatcgccccgagctctgctcgttgtcatcctcgaggtaagggagggagaagagagaggattttggagagaaatagagaggtgagggtaaaagagtgtgagagactgacatgtggggcccactgatttaaaatgaaaagaattgttaactggactgtcacgtagaccaaaaccgcttgcaaagctgctcgagggctttttcatccggtatcgatagttgagagtgaaaaatgactagttttcaggtttagggtgtaattcatactcattcaatactccatgggggtaattcgtacttttttttcttttactgttaacttaattaactaattaaaagacatagtaatcctctctagccaatttattctagactgttgtccttggattgaatgctgattatagatcgttcctcgtgttcgatacccttagaatactctaaggggaagtgctataacggtgtggttaagtacttatctgtgatcttaagactaccaacaatacctaccctcattaactaactatatttatttctcaggccaatccaagtatgtacggattcactatgtggtccaacaatgccagtccgaattatcatggccaaaaaataactaaggctaaaacacacaaatagagtacatgcgaatgaagcagcaggaaatttcaatacgcgctgaagaacatagaaggggctggtaggcaagatcaggctcgagttgtcgtacagatatactcgtatcgttcatctatgagacattttagctctattatcatatccttctaatggtttctgctactgtatgggtcatgaatagaaaactaatgtatctattcattttccctcaattacctaatataatgatgtgatg

SEQ ID NO: 40749 - DNA, 509 bp, Oryza sativa
cgccaggcgccggagcagccgccgccacgcgcggtggccgcaccaccccgcggcggggctgacgtcgcgcaccacgagctgcaggctccggaccacggcggagccgcgccgcctgcccgtgccgccggcgccggacagagaaggccacgaggacggcaggcagcccgatgagccgccggagacgacgttggcggcggggtggcgcgccgcggttagctctgtggtggttgtggtggtggtgcccgctcccatggtggtttggagaggcgcgcaggaaggaagaagtgggagagagctctctcgtggcggttatacctgtggttatatgggaagcgagacgaataatagcagtattaggctgttagcatgtcgagatgagaaaacaatggtggttattgggctgcggagtagacaagtggtagagtgagatgagctcatgggtttttgtggtggttacttttggagatggaatggacatgcatgggagcttgtgctatttttagacacaa

SEQ ID NO: 40750 - DNA, 586 bp, Oryza sativa
cattataatttctttggacttcaataattttaaatcatcttactgacttactgtctgggtaaccctgttaagattgacctcttataatcaatacaagatggccacatgacactattagtctattactcgttagcatataatctctgatacatgccgcattactcacctctttttcgtggttatggacattatccagttgattggatgaccatatgacgaccacgattgattggtatgatcaccatatgatttattattgatggcgatctatgcttgcaatctcagtgtgataagagaatgttcttttgctcaaagtggtattatgcgaaaaggcttctccatgtatggacttattggagataagccctacccctcaatgaggtttgggttttacacttttccttttacttttgctcacttcaccatggtgatagggtacatggaaggtgatcacgtaacccacatattgctccccagtctgagttagggtctttctatgccaacaagcatccaatggggcctaataacagtcttccaaatcatgaaggggcaagggaagagtgtttttcattactgtagaagactt

SEQ ID NO: 40751 - DNA, 635 bp, Oryza sativa
ctgcggtcacccacgtggcctaaccccctcgggagggtcgggcccgagggggacgtgcccaccccctcctctgtctccccgaggggtcgagccgctcctgtttcggccccgagggctggggcgccccgaccccctgtggtattggcgccacgggtgtgggttaggtgggcacagcggcgctcaccaaaccacttttattgcggaatggacaagcgcgccacgccgcatttaatgcagcacggcgcacgcatatccggtccgtgaccggtcgcagtgtgtgaccggtcacagaccggtcagatcgcgggttaggtggcagcaggcggactgtcacacgcctcgccccgtcccgtaggaatgatgagagcctcttgacactcgtccctagctggagccggcgtggtaactcctggagttagcacgtcagtcccgactcgattcatgccaggcttcatcgcaaccattgcaaggaagtcactgtatgaagaagggcagatgtgcggcatgctaaactgacgcgtggtggagaagaatgactggtctgtgactggactgatgcccgtcacgtcatctgcagacaaccgtgctcccacgttgcatctgcttccggcggagtggaggtaggtatgacccat

SEQ ID NO: 40752 - DNA, 557 bp, Oryza sativa
gtttgatctcgaccgggtcttgtggttgctgaatgctgagcgatgtgcattcctttttcttcaccttcttcttctttttttccttttctctctcttttatttttgttctcttctctcttgcactccattgtcgatgatattggttgttgcagcagtgacttgaccaatagtcggtacgtaattttgtaatctgtacatagcaaggagataacataagtggaatttagccgaatttgcatgattcacatttttcatgttgtgatttatctgcgtggcaccaatgtgattcttctcgtcttttgataggtctcgatctgagcttaaataagccacttgttctccctatgcctattatcttgtgaaaaaaaaatactccattcgcgatggaatttggattgtaagatagacgaatttgactgttctcggttcatggattgaataattatgaatgacaggtagagatttcattactgttattcagatcaacaaggcgttaagtgttagcatttgccatacaaataatgatagccagaaaagaagggaaagagatcagcttt

SEQ ID NO: 40753 - DNA, 2005 bp, Oryza sativa
tatgcaccttttaactgatatatgcgtaattcaaatttggattttggatcacttaagtttttcacacaaacctatgaaataatgttttactgttgtagccagaactctttagatgtaatttcctggtctggagcggctgccttttattttattttcctttagctgacctgttttttttaccataatgctgatatacagatgtcatcatgtaggcagtctaaattaagtcaccacctgatggcatgagaaatattctaacttgcttgtcttactctgcagttatgcatttcgttgaaaaggaaacatgaagaagccaaagagctagcagtgcgggctattgttaacaacaatacaatgctgatgttaaaccatccaatgtttgaggataaaatatcctactgcttatttttttagcagttaatcactgcactttcacatttattaatattaaactttttattccttaaccataattaacatttgtgctcttcagaaatttgctagcaatctgagatccaagaaggttttattcgaggatattagtgccattgatgctgtaagttatcaatctcatcccatttctcgatctctgtgactgaccttaacataattattcccacatgaagataaaagaggaagtgatattttctaaattaactgtgttgaaaatcctattagtaaaacccactatgatttgccttagttatttactgtagagagagttttcagatggcaattgaaaaacaatacccaatcacttgaagaagataaggtgatggatagtaatgccccatccttggtgtggagattgccgcatttcattatctgcatggagattattatgagcctcacaccaaccgctcataacagagatactcttgattttcaataatagtcatctctgaaggggccattgtgtatgatgattcctgagtgtctgagcaaaatgatggaatgactgtcttagaggcctaattccctcttttcagtatctcattcaggatcctccgttcctatattcaatccattcaaccaaacgctttaccttgcaccagctcctccagagaattaagtgtggaaattcttgtattataagcccatcctaaaaaggccttagtggaatagtgggttagatggtttgagatatagaacactcagatatagaacaaatggtatattcagattcatgttctacaataagattcagggtactatccatgtttgtattcaagtagccatacagggaagattatattcatgtaattaccgggaagtgattagcgtagtaaatgcatgatttttgtctatattagtagtgcaatgctaatttcctatgcttttagaaaaaaaagatttggatttttacattattcagttctaagttcaatggaagcatcagaactgaaaataaaagtggatacgttagcatgaaacactgtgctttcctcagttaaatattcttgtaatttgtcttagatgatctatctgtcatatttcataagaggtgctagacctttatagtgtgatcaactaccataaggattatggcaccatctcttgttctatttccccattggccattcccatgtctcctatacatgtatgcattgtatattagtttcttatcatctctgattgaacagtgagtgttttcagtgttatattagtgccacctaacttcgtattacccaacttgtcatatttctcatcgactgggatatatatttttttcaaaagacaagatagtctcattgactacaataataaaatgaaacacatgatggcttttatttgtatgtgcatttttttaattgagcaacagcaattgtggtttgtgagctattagcctcatagaagttttgtcaacgccagcatatgttgacacttctgtttccggattcttaagtcaacatacttctctatctgacttgctcatttagtttagcatttcaggatttcgtccataaggatattattttatttagtagaattgtgtgtgctacat

SEQ ID NO: 40754 - DNA, 829 bp, Oryza sativa
actactagaaaaacgatttttcagggcgttggtctatgatttttgctggcggagaaatgccaaaaccgctagcaaagtcataacgagggggtggggggcaccgaccgccagcgaaaatggatcttcgctggcggccacgttataccggccgctagcgaagatatgttcattttcgctggcggttgggttatatagtctgataggaaagatacaattatttatactggcggcccacttaagcaaccgccagtgaaaatcgattttcgctggtggtagaacaacctccatattttagcaccacccatgtgtccttatccacccacctcgggattttggactatttgccattcacttagatgtagcattcccaaatgccatcttcccaaataacttagacaatttaccccaggtccccacaaaccagctctcctctgccattttacacccaattttaggtcccacggctgccacatcaccaaccaaggtggcactgagagcgtgaaatgtccatcttacccctgcccctctcactcataacacagcctcaccacagatccctctcttctctcgttttcagtcgacctggtctcactcctgcggcggcggcagcggcgctgtcgattcaccggcgacggagctgcgacagccaacgaggtgtgagataaatccgtttcccccttctctttttcagtttggcaacaatttgtctcagatttggttgtttttgttgcagattggattgtctagggtttggattttgggggttatggctccatctgagtgcccgccggggtaaggcacaaatctcatcctttagggctgcaggaat

SEQ ID NO: 40755 - DNA, 584 bp, Oryza sativa
aaattgttaaccaaggagaagcggacagctactatagcttttaagcattcaccatacataagaagcacacaaatattattaagacgagacaaaatcatcagcattagaaacgatgtcagagtttgtaccgatcgaagagtcatcttcagtgaagtaggagatgatctttgcatgcccttcagtactgtagcgatccattggtttccatcaatgctcccttttgatttctacaaacaacaactacaacaaaagacgctacttatgatttgcaggaaaaagttgaatgccttgttataggacaatgaaaactggtggtgattggtgagtgtactgtgtctagtttttccaaaagctattggttgaccatgatatattttgggcataagatgaatactgtccacttattggtggttagattatttttgagcatgaaaccaaaatgaatattctatagtctgaggaactcaacactttttaagcaaggaattgaaagaatccttacaaaaagctttatgatgtcctcgatagtctcagcagagaaacatttgttgataagtgggagcctatcgaaataagattgtcat

SEQ ID NO: 40756 - DNA, 648 bp, Oryza sativa
tttttttccttttgtcatccttgagacgagatcatattgtaataaacatgtgtccactgtactagttaattactccctccatcctaaaataagtatagttttgcgctatttatgtccaacgtttgaccgttcgttttatttgaaatttttttgtgattagtatttttattattattagatgataaaacatgaataatactttatgggtgtctatttttttaattttttttataaatttttcaaataagacaaacggtcaaacgctggacacggttcctcacgactgcacttattttgggacgggggtacgtagtatccatcgtaacgcgtaaattaatatactactacttgtcaaatgaaactaatgtctcgattcctgacatgttggaattataatattgttatggtcgttattgttatatactagtatatgctagctgaccaagcaacatcccgcccaataggtttcctgcataaactgaacattacaccagtaacacgtatataactagtgacgaactgatgatttcattcaattatcatgacattgcccaaccgatggtatatattatactatatgatactcgtccggtattctaaagtattttagttttgttataagctaaatttgggtaccgagctcgaatt

SEQ ID NO: 40757 - DNA, 1067 bp, Oryza sativa
ccgccagagaaaattgattatcgctggcggccgataaccgctagcgaagattgatatattctctggcctttgctttgtggcggctgcaatttccgccagggaaaacccaaaatggccgccacgaaagatgattttcatagtagtggcaagaggacaatgtctggatatggtccgagattgattttccttccccaaccacaaaacaaaatacaaagcctttctcaattgtcaataccggttaattttgtgcccccccagcctagttgatgattaaaatagcccatacaatacatggtttcatttttgttgattcgtaagtagtacatgtaagagacaaatatattgaaaacaatgcagacacgattttataaaaaaaatgtaagataaaagtcatttcaatctctcaattcattaatttcttggcacatcataaaaaatgctaacatgacaccctatttaataagaatgaaacaacaagtgggagtggccttaataaaataataatttagtagggcgcacatgttaatgagacccactccttcatcgccccaaagtcgagcacgtcgctcgagctttagcacacgtgaacaagtgactgctaggggcacgcgctgtgctgagagggaaagaacatcataggaggaggaggaggaggagatgaggcatacggaccaggaggagggggtagacaccggtgccacctatggcgatgatgacagggcaagctagaggtagtgggcagcgatggtgatgatggaggggatcttgatggtaatggaggaggaggctatccggtggccaccatatttgcttggggggacagtggtggagcatgtggagctccgtgcataggaagctgaggagattgctggcgccactgggtcatcacctagccctaccttcattgctgcatctctacctccatcgagagccaccactacctctagctacactgagcattgttgtcgcttgcttgaactcctcatccttctccatcgagttgcatccccagacaaaatgcaagtaaacatggaccaaaagtgatattggtgagacggataggtgag

SEQ ID NO: 40758 - DNA, 522 bp, Oryza sativa
gttgctgttgcctcttttcttttgctcctggagaaaaatttttgtatcgcgctgttcccgttctgaatttttgatgtactagcaattataagttctaaattttcaaattctgcaagtgatctcataatttcctgaattttgtgcgattctgccgtgagtttcagtgtagcattctaatcgtattccgttgtgcaattgatgtacttgcaaattcctggtgtgcctgactatggttagaactaagaaatcatcttccctcgtttgtatcgaaaggaaagaaactaggctatttcatgtgatctttgcgctagaatgcttgtgacttttgaatttcgattagataattcccagtagggtacagtacttaagtatgactcgtttcttgcagcattcgctggtgcactcctcgtccgtttttttcatttatggccggcgcaatccgcgcaaaggcgagagcacgtagcgcccagctgagcacatgatgtatgctggcactggcacgttgctgctgctgccatccaa

SEQ ID NO: 40759 - DNA, 538 bp, Oryza sativa
  unsure (1)..(538): unsure at all n locations
cgctagacgtgccgggcgggtgtgacagtgcgacaccggattttcggtgcnccgccgggcgagcccgccgacttttagccgtacgtgatcgtcaaggttgcgatcgaatgaattaaatcattttgttcgtgtatatatacacgtaatgctgtcactgtaaattaaactacattccaaatcccgcggttgtttctttggttttcgaattcatgcaatttttgttggagtggaagtttgtaaattgtacctaccttcactaaccacccaggttaataaacatcaaagatgagatttgtttggaagctggaatgattcgtcttctccttcccgccctgaatatatgtactaaagattctgacatgctacaagttgactgaaagtttcatgttatgttcagatccacaatcgtgccatcctattatcttttcgtttttgaaaactaagctagattatgctggtgctatatcatgtgcaggttgcaacttggaatgaaatgctcgcttgagagcctatgtcgcctgacacagtcgatgggccg

SEQ ID NO: 40760 - DNA, 1109 bp, Oryza sativa
atggaccgctccgtttttcgtgtatgggagatgggttcccaactcccacctccgaacacagccttattataatttagaatagagataatatatctctgtcccataaagactttgtgacctccagcgctaactcccactcaatgagctcaacgcctcaatctacatcgccagcctatgactataaattgacctcagcttttagccgcctccactcaacaaagagacattgagagggatgaaataatatcttgcatgtgggccctatgaaatattttgttattttgttgattggattgtcacatggtactatatatgctagctctggccaaatccagcaaaccgcccaagatggtgctcaagatggttatttgtctggtttacaaacttaaaaattactgaatacctgattttagtttagaggataatatagactacccaataattgaaggcgggtgttaatatggactaactcaacaataaacatcaattttgaattccaccaaattttatattagagttttcaacatacttcacttttttatgcaattatagaaaacacgttatttattttaaagatagttgatcacaagcacgcaaacaatcaactacctagaatcgaactgaacatgaatgcttgtagttacgactaattattcttttataataatcgtcttatccatatatagcgatgcatatatgtggtggttgttatttcacaatctcagcatgtatcggtccgcctccgagagatgcatgcgtagggtatggtatgttcataagagtgagcgcgtctgcaagttgctagctgtttatgaggtgtttggaaaaaaaaatctctacttagcgtgatggatcttttgatcaggcgacggattcagtcattaatatcgggaaacaaccgcgcggctgaatttctgtttcttttctttccgagagagaacaattccgggtcgatcacgaatcacacaacacacgtatatgtaatgattgaactaatatatcgaaccgaactgtacatttggtcggctacgtgcataacgaggtaggagtagttcgcatctcaacttagtccggcatggcgatgatggctttgggtccatcatatcacg

SEQ ID NO: 40761 - DNA, 693 bp, Oryza sativa
tccagtgggtgatcgatggcgcgcgcgcacggcagacacgggcatcatgcgtgcgaggtggtgagagagcggcgccgcatggcacaatcatcgccggccccgctcgcgcgcgcgggcggcgagacagatgtcccgtcgggaaagcgccccgccggcgccggcctcgcgcggtctatgcctcaatagctagctgcactgcacctggacgaatcctcctttgcggcgtatcctccgtgtgcgacgcatgatcgcaacagcgaacgcgctggtcgccactagacagcgacagctcgatctactgtgcgtgcccatttagtcacgaacactacttgatgatgagatccatgcagacaaccacgttttcagctatttggtgtggggtataactttttcttttcttttcttttactttttgtgatgtacaaatacagctgcaggttaaatttacgtcttccttatttttcctttccccggacgagaggcatttcaaaatgtactatcttagcatgtttcttctgtaccgaagagttatcttttcttagcggggcaacaaaaaaaaaacgactcagcaacagtttggaaatcctccaagtccaaatataatcgtccacttagttgtggcgcaagcacaattaagcatcagaacggccggggtcgcgctcatcttgagccactagcgctagattaagctaa

SEQ ID NO: 40762 - DNA, 1559 bp, Oryza sativa
cctggtacgtacatatatttttgcatatatataggctggagttaatatctatgagttggaataattaatttagttttttattgttgtgagcgaaaaagaaaagaaaagagataagatggacgtggggccatgcctgaagtacgtacgtacttacatgcacctatgtgggttatgtgggccttttgagataaatcggcttggctatttttattataaattaaatggtaaaaaataatgggtccaccagattaaatgaaaactaactgttaaatttattttagaattctaaatttattagagcggcatgtggcggtatagaagccactaatttaagtgaaaatcgacagttagatttgatattttatattttttacgagtctagttgattcatatttgtggaataatatattttatttttataagtagaaaattctatttttgattttttcgatggtactatatacgtatattttttggctttatttttttatcgtaaatacgctggtatgtttttttcctccctcatgaatcgtagattcgtaagtaagccgctcttttccaaacgaaccgatgaagagaagttaagctttattgttttctacatagtacgtacgtacttatggagtatttatgttttttccctgccaacagtaagctattagtttctttttaaataaaatacatctaatctaatctaatggtctaaattatcggatccaccaatttaagtgaaaatcgacggcgagattagatattgccacatggcggtttaggaacgtttgtagtagtgtcacgtggtttttggctttatttattttatcgtaaatacgctggtacgttttttttcctccctcacaaatcgtagattcgtaagtaagccgctcttttccaagcgaaccgatgaagagaagttaagctttattgttttctatatagtatgtacgtacttatggaatatttatgtttttttccagtaaggtattagtttctttttaaataaaatacatctaatctaatctaatggtctaaattatcggatccaccaatttaagtgaaaatcgacggcgagattagacattgccacatggcggtctaggatcgtttgtagtagtgccacgtggcggcttgagagcatttgtaggaagtttaatggacttgtagtatataatatataatagaagatggtagctactacctaatctcgtggaacaagtctcccggtctcattgttcatacttatgcatggtacgttgcctttgttttgttctgtagatatgatttgtctgttagcttatccggtactccctccgtttcagattataagacattttgactttagtaaaagtcaaactgttttaagtttgaccaagttcgtataaaaaaatagtatcatttttaacctaaaacaattttattatgaaaatatattcaattattgatttaatgaaactaatttagtattataaatattactatattagtcaaatttgaaacgatctaacgttgaccaaagtcaaaacgttttataactaaaacggagggagtagtattaataaaca

SEQ ID NO: 40763 - DNA, 2546 bp, Oryza sativa
  unsure (1)..(2546): unsure at all n locations
atatattcatagttaaatttattgtttttttataacttgtagaagtcgaatttgnacttgcangattgnnaagtnatatattacatattaacctatcatatcaattttttttaaatttttcataaccatttaaatgacatgcaagaaacgggtagacgtccaccgagtgtttaaaatagtttcctatagtgatatagtcaaaagggtcgatattccacaccagctacgcgctagattgcgaaaagcatcgaagaaatgtttgcgcaagaacaggcttttttccaaacaagagccaatttttattgtgatcctcttatctcacgggtgagtggtcatgctccatacgtatcacccgtgagacccagcttaattagagtcaaaaactaacactgataattatagttagctaatgccacgccatttaatagacatgtttacggagtacttaactatacttaatagagttgtctacgtactcggatcaatcggtgatcctagcaagcaagcccattgatttgacatcggcgtcaacaagctgatctgtcaaagagcatgttaattaatgaacaatcttatagtagtactccacatccctaaacacaaaggattttggttggatgtgatatatcctaatacaacgaatctgaacaagctcctgtccagattcattatactaggatatgtcacgttcaactaaaatctcttatatttagagacggagggagtactacactgctccagtatatttattacgatatttcttatttaatcgactgattttaccaattgattttttaccatgtactctgatccaatcgtccgttcacaaaagttacgattggaatgccgaaataacccgcgtgatatatagcgacgtggatacgcgtgacgtcttcctaatctatttcccatcttctctctatatcgtgtcgtcccaaacaactcctccatagtgtgtatcaataaacacaagccttcctagtccatagatcacacgaattgaaccattgggatatggtacctcctaaagacaagatttagaggaagagatgtttctctaaacaataattttaagaaaaaaaattgtgaacttttggagactgaaaacgaaatattaggtttaaaacctcacaccccactctactcgaactataaaaggtctctgtttaattagagttgttagattagaagagtactcttcatatgacctccgctgtgggatgtaggattggcgttaagtttaacgtctctctaaaaatgtatcctcgctccaatcttatttttttcttctgttttttttaattctttgaccagctgagaatggcatgtttgtcaaaccgtaccccatatctcgctgctctctagatgatttggacgtccagacggtcacggggccatgcatggtgcatgcaccaccttggaattaattccaaaagcttctctgctagccgtccgttggaattcgagtgcctctttgcctggaatttcaacatatgtgtttcgcagtgaccatgcatgcatgagtgtcatggctagcactttcaccagctcaaatgtatcagatcaaggctaataatacagccgacctgctggctataaggttctttatagccttctctcagtctacccatataatagttagctcttcacaattaatacatggcccacttgtctctctcacagagtttcttggttcttgtgttcaagccagctgttagtttacagcccgcttctcctctctctcctctcttctttcctccaactcagcatttagccggcttatagcctactattatacttgctcttagtcgccactgcagactatttggaaatgcaggaatatattacataattttacatacaagtcagtttaaccataataaatttctcctatacgcagggctgtccatagaaatatacggccctgtgcaaaatataaaataaatcagtatatgtactagcgacacagcaaaagctatatcaaagaaacgaatctacgtatgacgtctgcctaggtagaataagaatcgtggtaccaattcatcaatttttcttagtagttaagtagaaaaataaaatttttattatttgaaatagacgttattgcatacaagataaaaaatgtatatcttcaaagtagccataattatgattaaacacttgttggagtgaagaaaaaacacatatattgacatgtttggtagcaccccagctcctaaattttctcaagtgcaggagtggagtaatggtgcagcctaaacccagctccacctcttttattttgtaagagtgctcgatccagctatacttttattttgggtggagctgaaggcgccgtgccaaacagtcccttaattatctgccagtcttatatgtgtcatttaacgatttatcatcgaatccacatgtcatacatatacgagagtccacatgttataaactatgagcggcaaattattaaatatcacatcttaaaagtagcaaatagttaaatatccccgcaaaaaaaaagttaaatatcccaaagagaagcccgttctagtaga

SEQ ID NO: 40764 - DNA, 1499 bp, Oryza sativa
aatttgaatcgggtatataaactttagatgtatagaaacactatatatgaaaaatatttgaattcaaattcaaattcaaatttgaattggatataattcaaattcaaatttgaatcggatatataaactttaggtgtataaactttagatatatagaagtactatatataaaaaatatttgaattcaaattcaaatttgaatcggatatataaacttttggtctctaaactttagatgtgtaaatttgaggtgtataaactttaggtgcataaatttactaaaataggaaagtaatacggtgccaaaaatagaaaccaggtggagggaggagggggggaatttgatcgctctgggcgacgcgctcgctcaataacatttccgcaagctttggcccccgctcatttccacctcgcattctctatactacagttattacaccgtgcgtatcggtcagcgcaccgtcttttacggttttaccggaggtgccgcttccgtggttccgtgccgtgtagtggaggacgtactacccggcctttagagcagtatagccaaatgttactaagtccagatcacttatagctaatctaatagtccatttatataatagttatttataaaaatatactacaccattaatatccgatcccacctctcatacacacaaaacatcttggagtctatgttacacttgactataaatccataacccgtttgcttctctttctcttttcttcacgatatgtggttatagctagcttataagctgctattgtactggctgagtcccggagcaaaggctgttgccttgttggcgtcgggcggtcgggccacgacgcaccgcaccgtccctgccgcgtggtccggggacgccgggccggctgcctccaaggttccaagtccccaacggtgggagtcccgcacgtacgcgttgcggcgatcgcatttcgcccgatgccacgattagatccatcacgccgtcggtggacggaggggcccccgtcggtggttgttcgtcccgccgcgctcgcgcggtgggcatgcgtacgtgggggaggtgaataggtgatgcagtccggccagccgccagcggccatggcggaaaaagcgatggggacagtacgactcggaggggctcctcctccctttcggtcggcgatgtcactttcatatagccatgcgacacgagacaaactggaacgtgcattacaatcttgatcggacgacagaacatcgttcctcagatccaccagttagacgccagcaggaacagcatccaccatatatatccacagagtacaattcgagtgctgaaagttgtagagagaatcaggagtagtaactgggaactgtagactgagagtaatcgttcgactggacgactccactagcatgtgctagtgccttcagttgcgtctgatgatactgcaagtgatcaaggctcatcttcaataccacagcaacattgctgcaacatctgtgaaaagtctcagatttgagc

SEQ ID NO: 40765 - DNA, 1426 bp, Oryza sativa
attgggggcactggttagtggcttgctgctcgcaacgcgtgttggggcggtggggtttggttgaaggaaggaaagggattagggttgatgggaaatagggtgttgagtttttatatgtcaatttgaaatgggcttgctggacttgtattgttgcaatgggctatttttaaagaggtaactcacatctggggtcacttcgggtcacccacgggtttacttccgatcctcgccctggcccggaaatttacgggccccgtccccactcacccgtgggtgagaattctcccccggccctggccccgtaggggcggctccccagccccaacaggaaaaatgccacccctatgtatccgctttgaccaaaccatatgttagagtggccacctcccccttaaactttaactacagcatctggactagtatagtcccaagcgtattatggttattttgtaaattctctcgttgagttggcaaaaacaataaaatattgtaggcggggccttaaaaaagtaacaaaaaatcacatttttaaatgcctatgagcgacgaggccacgttttttcctctccaacaaagaccgtatttttggaatatcttctgataaattttttaatttatgtaaattagtatgcaatgcaactatacaattttctaaaggtggaaaacaactaactacatgcatagcatatgttggacatgttcgactgacctatacaattctcactgccaccttattgctagctgctacaaaaagtgaattggtgcagacaacggggtaacactatactacctccgtcaggttataagactttctagcattgcccaaattcatattcattaacatatatatgaatgtgagcaatgctagaaagtcttataatatgaaacggatgaagtattagatagccgaacaagtccactacccatatataaactagtatagaggaagtagtagactacttgaacataaaagccatgttcagccggaggacccaaagttgccgatggaccacaacattgtactttgatttcatgattaattttaggccggtcattgctcgtgtccttgttctacgcctacgttagctgtctaaaaaacctacactgccaacgatttttaaagaattaatcaactccatgtataatttgtgaattgtgggcaggtttgcatcgctggtccagcagctttgaacacaagcacggagacgcaattctggcatcctgcggggaggaaaatgcagcggcggtgcagtactctccccggatccgcatccagatcctcccccgatctcgatggcatctggacaaaactcccgcgggccccaccaactgatgccggccccaccaactgatctcccactgtgtaccagtcgctgtgcccgctagctcccccagtctccggggagaccgaccgtgcgagatcgcg

SEQ ID NO: 40766 - DNA, 1809 bp, Oryza sativa
gagaaggagacgggggaggagaaggggatgtgggctatgtacatggacggcttagtctatgacatgtggggacagaaggagtggggttcagcgtgtcctggagcgagcagacgtggcccgcccgagggggtgcgaggcgacctcgcggcgacggagcgacgagcgggcgaggtgggggcgatgtgtccggttcccagccacaggaggagggcacgagagattctgggccgtcgatcggacgtggcgtgagaggttattagggcagtcccaacctttaacatagacatgttttccataaactctacatcattaagaaactagtactagacactactcttctaatataaacaccactattccattaatttaatgctacttatctcacatgatgtcttagatgttgtgtagaaaccatgtctcatgcaagacatggtttccctctttttcttcatttattcacctgccacatcattttttcctagttggcaatttatttaatgctatgaatactattctatttattgggttgggaatgcccttacccgctgatccgattacacgcgtacaccttacttacgtgtagccacttggtatcactcccttgtttcagcgttaaaaaggttcaggtagtgagaggtagacacatgctttcatcgaggaaactgccgtaatcggcaaaaactggaggtggtgcttgctcagcttggctgcttggggcgtcgagtcgagatggatcggagcatgcaatcgttgagttagggttcaggttgaatctcgggctattactaaggctgtgttcggtaggaaggataggaactaatctcttctatacggaaaacagagcgattttttagtacgtgattaattaagtactagttatttttttttaaaaaaatagattaacatgattttttaaaacatttttttgtatggaaaaatttttcaacaaacatatcgtttaacagtttaaaaaacttgcgcgtgaaaaaagagtggagtggattcccaactgctcctgccgaacgcagcggcgaatccagcatggttgttggggggactcgagtccccctaactagctggatcatcattgatagatggagagatgaaagaggtaaagagggagaaaatgaagagtagggggactgaaaaagaaagaagaagataagtccccccgaatagggagtttggctaatctcgcggactttcattttgtacaggtgtaacgagaaagcggattgggtggtcaactttggttttcatggatatggagtttggtgcgtttttctttctttttttttttactcatgcaaagtgggcttttgcgatgcaagcgtgcaacatataaaagcgtcatttgatagttcattttctaacaagtaccgtagtttttttaaataactaaatttgtgataaatgggagaaaaacatacttgttcattttacttgcatcctagtgggtcttgcactatgtgagatagtatgtaaaggaggatggacgaatgaaactccagctttttacaaaaaaagttagaaccttggctggactgaataattcatccgacctttattttttcatgaaatctgatcttcctttggatatcacgagacacttacatgcacttgtatctcaaaagatttatctatggccagaatccagataccatgcatgtcctttttccgatcgcaatatccaaacgctccactcatagagaccgcgtatagtcgtatacccgcaccctaaaatacgactacaactacaagacgatctttccaaaggaagaccgaaatcagatgacgactttattcgag

SEQ ID NO: 40767 - DNA, 752 bp, Oryza sativa
ttcatgcccgttagctgtatctcttcatagtatcaagatgcatgtgtagtcgaaattctgcagcttaaatagcctaatagtacccatattagccattcatgattcatgtaccaattttactctgaaaaattgcagctgaattgaaatggagctacacaaaagggaaaaatatagcctaatagtacccatattagccattatgctaaacttttggagtctcttgtactcatttccagttattctttctttctcgctgaaggatttcagcaggtttgctgtagcttggacggccgatccttttcccatggccattagcgtatgattgtttttctatcgagatgacatcatctccggtcatgattctgacttctgttacatttaatcaccaacaaagagtatactatttcaaattgaatcatgatcctataaaaaaaatagaaaaatgatgtcatccggaagcaaacaagcgaagtcacgagcagaacacggacaaaacaaaaggcacagcacacccaaacttccaaactgagttgccatgtcgcgttcaatccacacaccacaactacgggagacatgacgtaaacacaatatatactggagataatctagtgatttttatattaaaatccattacaatcaatatttcttttagcttgcataggcatgctagtgtaatctaccatagaatgaactgtagtgtagcaatcgaagttcacgtgatactgtaagggcattgacagggctgcaggaat

SEQ ID NO: 40768 - DNA, 580 bp, Oryza sativa
attaatctcgcgattaacaattaaaagctagctcgattgggatgacaatagctatatcacgggcgggagtggcggcgcgatatgttaattattacgattatcggcctcacgcaatgcgtttccggtgcgagttagcatggaatttctttcttaatttgcccgtacgtacactatatgcttttcagtaccatgcacgatagcggcggcggcggccggcccacgtgtcatgtaagctagctccaaacaaaatgcacacatcattaatcatttatcattatttggtttttttgactataatatatactctctcattccctaaatgtttgacgctgttgacttttttaaacatgtttgaccattcctcttatttaaaaacttttataaaaatatgtaaaactatatgtatacataaaattatatttaacaatgaattaaatgataggaaaaaaataataattacttaaattttttgaataagacgaacggtcaaacatgtttaaaaaaatcaacggcgtcaaacatttaggaatggaggaagtatatattaatatatgtagttatatgcaccttttctctttgg

SEQ ID NO: 40769 - DNA, 1907 bp, Oryza sativa
gtgtggcataggccggcccgtttaaggacctcgagttataccttgtttgtctctccgtgtctaaaaaatgttctgcagatatgtaggtatggggatgggatacgattgatctgggattgtggaagatggaagttgtggacttgtggtgcactgctgtcattgagttgttttgtgatgtgcagtaaggtttggttggagaacttaaaattatgagaaatagtgatctgaaaaccttaggtttctcaacattcgacttctagtttatttttcagacttttaactatatattcttagaatctaaatgaatagttgtatttttttggatcttctgattctaagtgaagctacagttaccataagctctccaaacaagtccatagactgcattggagctaccgctgctcatagatgtgcactgaattatggatattctagttcttggcgttggtagaaagcatgttcacttgttgcctcttaggtaaaattttgctataggacatagtaaacataatctttgccacatgacaccaaataacataggatacttgataacaatccggcccaggtgaggttggccgaggcccccggaccccaacagttcataggcacacccactcggggaaaggcccaatcaccctaaaagactagtccgataggagaagggtggctctctcttttaaggtggtttcctcctcctcccaagctaagcaatgtgggattatttagaggctcacacagtcgccgcctgactttggcgtctttgccagcgggtaatagtggaggatgtcctcatcattcaccccttaacaaggacccagctctgataccaaatgataacgatccggcccagatggggttggccgaggcccaataatttaaggttgcccggaccccaacagttcataggcacaccaactcggggaaaggcccaatcaccctaaaagactagtccaatagaggaatggtggctctcccttttaaggtggcttcctcctcccaagctaagcaatgtgggattattcagaggctcacacggtcgccgcccaactttggcgtctttgccagcggtaataatgcaggatgtcctcatcaacacttttgaaatatagtaatttttctaccgaataccacatacaatattttatcatttgtgcttttggagaaaaaaaaaagtgaaacgacaagagtgtccttggaccagataggattatgtatccttaagggtggcaacaggccgggaccgggttgggctagaacgtcccagcccccagccccacaaaggcaatcgggtgaaaatcatcacccgtacccgcccctgtaagggacccgacgggtaaccgaggtcctgcatcacccggatgaagttatactccataaaatatgacaatacaccaaataatagtatgaaaaaaatttcaatagcaatatatactcattgatcatcacacccatacctaaagcacatggtcaaggtcaatccactaatacacgaaagtagcacatatacatacatgacacattatgattagcacgtggcaggttggaccgcggctggttgctataggtcatgtataatggtctttattagcggtctctctttattatcatgtaagcatatttggtgacgtggaagagagagaaagaaggaaagagaaagatggttgctacgcatgacaacggcatagagtcgatcttagcatttataaggaaatttttcgttgcattgagtctaataaaggaaagatgactagtaaaaaagtattttggtacattaatggttagataccgtttttttctaactattgtaatgtgatagcctctaattaacgtagaggccacactagtctctacctttgtacttacccttagtgactcgatgacgagacgacgtggagacgaatcgatgt

SEQ ID NO: 40770 - DNA, 713 bp, Oryza sativa
gtgaaaatagggttgttctttttaataatgaaaaactagcatggtagcccatacagattacgcggctagcattattatattttctcttatataatagcatatatgttttctcattatattattcaaatatattaaaatgacaacataattctaaattttgcaataactttacaaaactactaatgtgtaatattcatattgtattttatatacgtgttagttattaattatttttaatatcaaattttagttaattttctgtaaattgtatttctatatagactctatgctcttgtttcaatattatttatttttatttctgaatttttattatttctaattatatttctatgtggactctaaactcatctttcaatattctttaatttttaatttcgaatttcagttacttctaaattgtgttccttcatcgactttaaactcttcttcccatgtttttcttaattttgaattttagttatttgtaaattgtatttttatacggactctaaactctactttttaattttattatatttattccaaattttagttagttttaaattcctatatggactctatactctacttctaatattccttatttttaattccaaatttctattttttttcttcattgcatttctatatggtctatatactctacttctaatattccttattttaattccaaatttcagtgggctgcagga

SEQ ID NO: 40771 - DNA, 960 bp, Oryza sativa
tttcaactactcaactaccaggagaatcagcatattctcactagggcactacaaacagaggatcagatccaggaaggacatgatcagagcttcagactatgttaggaatattactcagaacaaatcaagggagaaagaagaataaatcaagaaaccttgtgaggaacaaagaacagatccatgccctcctgcttctccttgccgccgcaatagcacgaggtcacgagcgcaagaaaccctaacactggaagaggaggctaggggagatgggaagggaatgaactcaccggggagaaggtggccaccggaggagagagcgtgccgttgccgtcacgtcgtagtcgcgccgcgccgtgcagccgtccccgccgcagcgccccctctcattgcgtcgctgcgtcgagaggattttttcctcgccaccagagaagctgaatatttcccggccgatgacgaggggaaaacactggggtgggccgggataaaatctcgcctggacttaaccgaacgcctatacttgcatgggctggtatcctttccacgccgggattttccacggggattagaccccgatcccagccgggaacggcccaaccgaacaagccctaacggggaaacttaggctggctggccacagcatggacctcactcatctacagtaaaaatggtcggagacaaaaggaaatcaaccgaagctggccaatacaaacaatctattctcagggatgcatgcatggttgtgaagataactgagaatagaaggcaaaatatagaatctaacaactagcttgagttcatacggtgtgcttgaggtgaagtaaatacatgtttaaatgtcacaaataatttaagaagaatattaatggaaagaaacggcaacgtaatggagagaatacaaatcacggatagactttacaattgctcttacatgcatgaaggatatttaaagttgaatgtgcc

SEQ ID NO: 40772 - DNA, 692 bp, Oryza sativa
gcactttacacaccaacatcctgcagcaacgcacaggggggcatttacggaacttattttaatcaaccccattcattattaaaaaccttccttcttttggtaaaaaaatattttggtaatagtaagagataagccgaatacttacacgtactaatctttaaactgtacattggctggagggggactagatagtgagagatgagaaacttgtaggcatgcaaaaaaatgtccttcgtattatatgagaaaatgcaaggtttataccaaagacttgtgtatctatcagctatgtaagggctggtaccttccttggctccttgatgcaccaactcttgtttagctgtccccttttttgtcttccagcaacatcgttatcaaaatataaaatatatttcatgataaagactacttttatgtatatatgttggtaaatttacaggggtcattattctgctcactatcgaatccaatgcttctgaaaggtagcatggtttataagatgaagtccaagagggagatgttacagcaaaggcaacaattgcccaatcagtatcatttcctttcacatatcaactcagcagtgaattttgaggagaagcaaacaacatcatacagaaatactgacattgcaattgttgggagggatgcagacttagataatctcatggacattttaatggaaaacagcgctg

SEQ ID NO: 40773 - DNA, 543 bp, Oryza sativa
tgaggaaatgcttcacatgcataacttggcgcatgatcttgctagatcagttgctggtgaagatatccttgttattttagatgctgagaatgagcgcaatgccagatattgtgattaccgttatgcacaggtgtctgcttctagtttagagtcaatcgatcgcaaggcatggccttccaaggcaaggtcactaattttcaagaatagtggtgcagactttgagcatgtcagtgaagttctttcagtgaacaaatacttgcgtgttttggatctcagtggatgctgtgttcaagatattccatctcctatctttcagctgaaacaactgagatacctcgacgtttcatctttatctattacagcactccctctgcaaattagtagctttcataagttacaaatgttggatctttcagaaactgaacttacagagttgccaccctttataagcaacttaaaagggctgaattatttgaatctccaaggttgccagaaacttcaacgattgaatagccttcatttgttgcatgatctacattacct

SEQ ID NO: 40774 - DNA, 511 bp, Oryza sativa
cccacgtaaccaagtgactgttaggggcaccccctgtgctgagagggaaagaacatcataggaggaggaggaggaggaaatgaggcatacggaccaggaggagggggtagacaccggtgccacctatggcgatgatgacagggcaagctaaaggtagtgggcagcgatggtgatgatggaggggatcttgatggtaatggaggaggaggctatccggtggccaccatatttgcttggggggacagtggtggagcatgtggagctccgtgcataggaagctgaggagattgctggcgccactgggtcatcacctagccttaccttcattgttgcatctctacctccatcgagagccaccactacttctagctacactgagcattgttgtcgctggcttgaactcctcatccttctccatcgagttgcatccccagacaaaatgcaagtaaacatggaccaaaagtgatattggtgagacggataggtgaccggccttccattcaccatgtgt

SEQ ID NO: 40775 - DNA, 607 bp, Oryza sativa
tcctgcagcccttctttcctggcttgtttcctctctcacctcaatccctgtcacagatgtttaacagaaaaaaaggaaagaatgtcacgggtatgcctcaagaaactcaagttttcaactcaatccaccactggcctcaagagagttagcaagggcacacccttggtccattccaagcatgctgttagttcacagctaccattggttggaagtcaagaccaaaatcagtatgtgtttgatcgagcatttgccacccaggtcaatgagcttccaatgccagaagagcatgtccccttttgtcatgattgtagagagcaaggacactatgccctgaattgtccatgggtatatgccaaagaagccccttcctttggtttaacagggcagacatcgctaaaccagcctcctcgcaccaagtcaagcttgcagcctagtgtacaaagtagagagcccaatggagagaatccattgaatcccgggaaatgctttcctcctagcctttcgtaccacgtggggtcacgtactaagcaagccaaaggcaagaagagtaagaatcataagagaaaagcgccgatgcgaactgaagaaaaaatacgtaagatgacta

SEQ ID NO: 40776 - DNA, 1283 bp, Oryza sativa
atatatttcttgatatttctatatatattataatagaaaatagttgtcaaagctacgttttgaagaccgtgcccttatccaaaacgataagtattatcaaccgggagggagtaattaaagatgattcttctagtatgtactgtatataacctgataaagctaagctagctagtgccacttgttagatagagaattctctctagggactatgccatatctctacccctatccatctctgtaccatctcaatagtttaattaaccccaaatcaaagcaacactatccaattaacttttcccttctctctgatgagttcaaacttgcattgtgggcacacatcacatgcccttgcacccctcaagagaagcatgcaaacagaacaaaaaaaatggattcataagcattggtaaaaacaaacaagcaaggactcaaacaaaacaaaataaaacaaaacaaacaaccgtgtgcacacacacatgccaacacacccggaatgtatttcagattttcagtactttcagtttattactccgtatcaccttctctctctctctctgagttttgttttttgtgcattgtgatgtgtttgtcctagagggtagtagagagttgctgccatggggaggagcaagctcctagatcgagtagttggaatccttatttgaaaagaggatttcaaaaagggagtagtaaattttaatcagattccgtgtgtacgcagggacgcatgcaggggttgtgaagctcaaggtctaggcacggttttatatatatttgaatgacattgtaaaagggtatttgcgcacacgcattcgtgtacgtacgtatgtgtgacgctgttgttggactgtgagcaagggagtacattcaacgcagcattgctattggtgatggctggctatcaaatcaaaaaaaaattaaccattatatatcaatatatgcttgccgcttattggcgcatatatcttcatgttgttcttttgtgctggatggctgaatctcagaatgatttgtaataatgatggccaaataaatgagtgaactattatcactggtggagaaatgttttttagtcccggttcgtaaccccctgtagtcccggttttccaactgggactacgaatccgggactaaagatcgctatctttagtcccggttcaaataaccgggactaaaaattaatctttagtcccggttggtaacattttttctttttttttctgcttttaatattgaatattgatttcacaccatcccctcccatatccaaatcatcacatatt

SEQ ID NO: 40777 - DNA, 633 bp, Oryza sativa
attccatgtgggttttaatttttttattttgcttctattgtgggttttaaaaatttttagtttgcttctatttttagaaaaaaagggcattttacaaatttgccattggtttttttaattttgtaagaatgccacttgagtatcagttctggtgatatttttgcaattttctagcggcagtattgtaataacgattcaaaccattggcaaatttgtgattgcctcttagaacaaaggatattaaaaatgtgcaagccaagtacatatttattacaagtatataataatctaaacagtagaaaacctatcacaatactaatcactttgctgtttaagtcaacaaaagtacaaaactacatactggtttgttcgcccttcttagcagccaagcagctgcttgtagatgcagcaaaacaacttgcgatcagctgccttgggttgcctagcagccgttgtactaagcaaccgaacaagccctttaagcactaatttacttgatcaaagcgatacactattttagaaagctccataaagataacgaagttagtgtcattgagactacggtgaaaacaatgagcctttataggtggattcggtgtggagtcccatagaaaggctgcataggcgactgaa

SEQ ID NO: 40778 - DNA, 644 bp, Oryza sativa
gtctcggagtgattactgtggcggcgtccagcgtggcaacggcgtccggcggtgtcctggacctggagtcggagatcgggcggcacgcggcaggagacgagtcaactgtcgacgagaggaggcgaacagccgatgcgatgaggcgatcagccggtgggcaggtatggcggccgccatacctcgccatactggtggcttcgctactgagcgcaagatccccaaacaaccgggccgatcgatgccaaagctaggagtggccttggttttttttcccttcttgtataaataagcaatccaaatcaataccgaatcggaaccagagaggacggaggggtgaaaaaaaggcgataactttgagacggactcttaccacgaaactgatttcaccgcatgggcatgacgagaaggagttggcgccagatgttctacgtggggggtggagcggagtgatgatacagagggaggcgaaatgatatgcgacgccggccgcggccggaaggcgagtacacggcggcgccggaacggacgagagagaggaagggggggaggggtttgtagatttgggttaacgagagagagagggggtccgtcttttttttttgccgaatccttttttctgttttttttttgcttccggttttatt

SEQ ID NO: 40779 - DNA, 708 bp, Oryza sativa
tgcaccccgaattgtctctacgaattagaattattgatgatgtggctgcttacatgccatgatgtggcttctttgatgctttgctttatataggaagataggattgttcaagaagtgagtgatgatattctaattaggatgtgtttgcactacaacaaatataccttgtagagagattttactaatactatagagacatttttaaaatgccttcctaatactataaagacagttttaaaatgtctttacagtgttatagagacattttgaagagtgtctttttaaaacgcctttacatgcatttttaaaatgccttcctaatactataaagacatttttaaaatgcctttaccatgttatagagacattttgaagagtgttttataagtgccatttggtgaattttacggcaactatagcaaatcaatatgaaaaagaaagaatttacggatattctaattaggatgtgtttgcactacaacaaatataccttgtagagagattttactaatactatagagacatttttaaaatgccttcctaatactataaagacagttttaaaatgtctttacagtgttatagagacattttgaagagtgtctttttaaaacgcctttacatgcatttttaaaatgccttcctaatactataaagacatttttaaaatgcctttaccatgttatagagacattttgaagagtgttt

SEQ ID NO: 40780 - DNA, 686 bp, Oryza sativa
ttggtccaacaaattatatcgtggtcgacttcaaggatcttttcgacctctacaggctctgagtggtggacacaagcctccttaagtgctactccttgtaagtattgtcgcccaactcattctggtaataacaatcggtttaacttgcttacaagatcgttgatcctgtgtgtaggttaagttggcaatggtgtcagaagcatgcaccggaagttgccttccttgatccacaagtggtcactatcacaaatctccagaataaccgtcaaggaatggtcaactacatctacgacaccttgtggtcccgccgagacaagaagtacattatgtgtgcctataatcaatagtaagtgtgttaactaaatatacacaacagcatgacacattccttgagtaccgaattaactttcactatattaatgccgcagtgcccattggatcattctggtcataacacctaaatggagtacatgtcattacctgaactccagaattgataagaacgcatatgattggaccccaattcaactagcgatagatgaagcgtgggcccaatacgtgcaaagaggaggcctcaggaagacaggacatgacaccctcatccacaaaaaagacttctcggtgaagcaacaaataggtgaccagtgcggatgccatgtgtgccacaatatgcgacttctgtatag

SEQ ID NO: 40781 - DNA, 679 bp, Oryza sativa
ccggattaaagtaataatgttgcgtagctttaggaaccgggactgatgtgtgacgagcgatttctagcgtttggttagagtgattttgcatggagttcttgaaatctggtatagtgcgacaaatgatttttatcctcctgttagagcatagtaatattttcgtgtgtctctagaaaccgactaatgttcgtattgttgtgaagctcttgaaatctactatagtgcgacaaatgattctagtcgattaaagtgatattgttgaggagatattgaaatatgctatagtacgacaaatgattatggccttcagctagagtgatattgtcgcgtacctctagaaatagactaaaggatgcattcagaagtcaatgttcttatttcccactccctcgttttctacgcgcgctactctttctaaactgctaaacattgtgtttcttgaacaaaaaactatagaaagttgtgtaaaaatcttatttattcttttttaacattatttacttaacatttaattaatcatatgttaataagctatctatttttcatgcacgtgggagaggttcccaaccccttctccagaacacatcctaaagtgatattgttgtggaggtcttgaaatctgctgtagtgcgataaatgattctagcctctagctagagtagtgatatcatcgtgtagc

SEQ ID NO: 40782 - DNA, 649 bp, Oryza sativa
ctcacgaggttgttcccgaagttcgaatccttgaggggattctactctccgttgaggagctcactaagagtcgggtcttagctaaccctttcctcaagaggttgcactaagcactcctccttccactaagggtatctcttcccttttggaggtgagatccgaccttcacaaacttctcccggccaaccataagtagatcggtggctcgggagcgacacctagccgcctaggagtcctcaacctccaagagtaacaaatgaagcaaagaactcccggagatgatgaaagtgctcacaaatcttcacgaagtcaacaacaagcactcccacaaactcgaatccacaactctcacacacacaccaaatccaaatcgaacacgggtgagagggaaaacaagaaaacaaggctcaaaagtgctagagaaagagcaagccaagggcacaaatgattggaatggaaccagcagccctcacaagtgaggggagggggctatttatagccacagcccagattctgtccgttatgcacaataattcagattttcggatattccgaaagattttcggacatgtccgaaaattccagctcagcaccaacaacaaagttaacgaaggatttttcggacattccgaaaacttttcggacaagt

SEQ ID NO: 40783 - DNA, 1341 bp, Oryza sativa
taaacatgaatctatctaggactcagattgagaaattccatcaattctattggtcatacttttccttaaaaacttacctcttttttctgaaacgtttaaaactttttcttcggccatactttatgtggttctctctgtcctagtgtgggctcttgttgtgtgcaaacttttgtgggccggtttgagcctccaaatttcttttttttaaaaaaaaaatcaatttacgggatgcgattagatgatgtgtatctcactatagtattcattcataggattactgaattcttccaccaacagtaaaaaccagaattcatattttcagagagcatgctaaaagagttgcacagaaatcacagcatgtgtttgcttaagctgatcccacatagtatgtgaaatcagggcaatatcctaggaatcgtattacatatttttgtaggccatctaagataaacaaaacatgatgtatgatgtatgtagcacaattgtccatgatcatgatcttgatctctttttttttcccattcatgtcttaattctgaatattttgttcatgtgctccagagcattgtgcataaatccccacttccggtgttcaggggaactgtgattagcatgaagattttggttgatttcagtgttggattgggttttatctacgggccagtagatatctgttcataatatgctattacaatggttaaatgtgtttcaaccgctccaatttcctaaaaaaaaaaagaggaaagaacttgtgttttcggcagatgttgttttactggatgcctctcacattcacaactcacgcaaaggatcaaatatgtgcagggactgtggaaaagaagaaaaatgggacatcgaaaagcaaaaactagcatatgatgattacggactagcaggatagaacctcttgtgttgtcacaaccagttcaagatcctcactttcatgctttggtacgttcccaaacgcctcctgttcctaaccttgcaatgctcgtcggctcgtcgatcgctccatcactataccgtatgatgatttcaaagttttgggaggcatatagccatagaggcgcaacactataatgtttaaatattaggggttcatgtcattctccttaaaatcagctgctacggaataacttatttacgcagatactataataaaactattggtatatattttcgtcttccgtctacctaccctccaatgagttcagtccttggagatctctcaaagaatacctcctctgtttcatattacaagtcgtttgacttttttctaatcaagtttgactaattttatggaaaaatttagcaccatctaaaatatcaaactagtttcat

SEQ ID NO: 40784 - DNA, 886 bp, Oryza sativa
caccaacaaatctttttttttttgaggaaatgcaccaggaaatcttagcagtgaaacaactctgaggtggcattaccaatatagtgagttaattccatatggaattaaagaccatgttcatttatttctttttggtaaaacttgctatgctacatcgtaaattcataatatttactgtagaataatatagaaatgtgcatttattatatgacctctattttcatattcttactcaattccagagagataattagaatagatgattttaccccatgtcaggttgtaggcttaacccacatatatttataacccaaattgcagagatcaaatcatttcaaagatgcttggtagaatggaattctccaatttattaaaaatggacatgataagaattcaaaatttatgtaaatgttttaaaaaattgttgggtttaaaacccattctaaatggaaatattcaaatattttagcaggactaatagaacgaaaatatctaaaatttcgaatagaatctgataaaaatttggactttttgagcaaatgtttggggaaagatatccccatgggtagttgaaatacccaaaaatttttcataggaactacatctattgtctcgacataatattatctcataaagtgaaaactgtacgattttaagtaattttagtttagaatttatgtgctgcaagggtaattagaagaaaatcataacccacgttgaaagcacattaaataagttaaataataatttatatatagtaaagtaatattttaatacaaagtcacatacatagatattcgtaataaaatttcacacatattaaattagttgcacgcgcatgtgcgcgggctacctttctagttaggaataaaatgctcataaattt

SEQ ID NO: 40785 - DNA, 683 bp, Oryza sativa
ccgtggctggattgcaggattggtggcgccgtaaaacacggacaaatcgaaggccccggcgtcgacgacgagagtggcttggacgacaaagcggatggatcaaagtcgtagagagggtgaactcgtatatgagttacgacgatgtgtggccggctgccggcatgcgcgatcgagcgctcatcgctagagttagggttttcttttgattgtcaaggttttcttttgattgttctcactctattcgtggcttggctgcaccagggaggtggacgttggttccaacagcgtccaagtatggacgttgtttacaacggcgtccaattctggatgctttctgtattagcgtccatcctactcctgtaaatccccccaacgatttactaattatttaatttaagggtaattgtttattataaataaaaaattcggaactcaggatggtggtgatcatgcgggtaagcattcgcaatctaagaagcaagcaagagaagttaggagcttatggttcttccacacttagaattgaactatcatcattactttcacccttattttgttgggattctcctgatctatttttagatgttctcattgccgcctcctttgtttgcacacaccccaacaacaaccacaacgcgctatggcgcctcctatggatagcgcaatgtctctcacgagctccc

SEQ ID NO: 40786 - DNA, 623 bp, Oryza sativa
tcttgctttcggattgagctgcatcggtttcgatcttcaactagaggtaaaacttgttatggcggcttgcgtttcgggattagtgcttccatctttatgatactctaatcttgttatgtagttcgttgagttatcagatattctatataatctcaggcaatattgttatctaaccctcaaatcggctaacatctgttgctaaaaggcagccgatcaggttaaatactattgttgacttagattatataggatatctaccgctctatgaaatatccaacggcttgattgtctagatattgtccttcttttcatacttatagctgcatcagttgagtttgatcttataagttgtcttagaatctcaatctctagcctgcttttggttgccgattagggtagtatcggggtttcaaccgatcttacctgatttagctttatatttcatgtatttgattgatattgaaagtgcatctaggcccctaatgattttggtgattaattacaatgcgattagagaggactaacatttttatttaagcaaatgtgaaggttgttttgtcctcaatgagttagcgtaatacatatcccgccgaatacgttgatgtgatgtaatgcggcaaatg

SEQ ID NO: 40787 - DNA, 648 bp, Oryza sativa
gcctggagaggatggtattttgctttcaaaatacttaaccctgtttggctttgctttgggggtggtgtctgcgaattgcgctctaccaatgagttcctagattcggtgcataatctctttggtgattgaggataacagttgccatctacaaaaaaccatttgagaaatgaataaccgaacaatgcaacaagcaattaaagaagttttaatttatgaacttcctgtttaaataatgtgtgatcatatttcatatggttatcaaatttgttagtccataaataaacacttaaatgctccatactgcctcaagcattccttgtgcatgacaataaggcgtcaattctactttcaatgcaaaccgacaacagttgatatgaaacaaaataggatacatgctgctgcaaaactgagctcgtggtatccccagttcaagagtaatagatgcatgactatgttcaaggaccaaagtccatactaagctagactgtacagttcagctcataagtctagaggagccagaggtttccttggtaaatggcactttttgttacattatagggacttttaaaatttttagtggccataccttttcatcacagtcctttctgccacctatatataggctacaatgcagaattgcacatacta

SEQ ID NO: 40788 - DNA, 1251 bp, Oryza sativa
acatttaatatattcatgttgaagtatgtgaatagtcagctcttccatcaaagccaagtacaagttaaataatagagccttcaatttttcttctcctctctccttttctcacttatgtatttagtgtatttatccaggagcacgtgttaagtgaactctcatttatttttttaactctctcctccacataagtatagttgacttatactcactattatccttactctaacccttttcaatttttgacttatgcttgctattatccttactctaaccctttttcaatttttaaattccttcttctccacataattttacagttggcttatagctacgctactatatactcctttcatcttattttaagtacagtcgtgggttttcatgtctaacgtttgaccgtccatcttatttaaatatttatgatttgttttttttaaagtcacacataaaatactatttatgttttatcatatgtcataataaaaatattaatcataaatatatttaataaggtggacgatcaacattacatagaaacccacaactatacttaaaatgggacggagggagtgttaaactcggagcaagtttaatagtatagccaactactaactctaaattatctatagtcaatttaatagtcaattcatataatagttacctataaataaaaactacactattaatatctggtcacatctgtcatacacacattgtgtcttaaagtccgtactacagttggctataatctgtagccacatgcttctctctctttttttatcatctcgatatacttttaaagctgatttataggctgctagtttacctgctcttggctctgttcgcaagagggtgttcccaactctcccctctcgttttttacgcgcacgctttttaaattgttaaacgatgtgttttttttaaaaaaaacaatctatacgaaagttgattaaaaaatcatattgatctattttttaaaaaaacactaaaacttaattaattacgtgataatgaaccgcttgttttcggtatggagggaatgagttccaaagcaccggaaacgaacgcaccctactctgtgtgagagagagagatggcatcatggtcttctcatctgggtattactcggcagccttgtgctacgcgcacgtacgttaaaaaacacacacacagacacagataccgtagctctcgtgggtctccgggtctcgatgcactgctcccagctgctgcaaaaggagcgccatg

SEQ ID NO: 40789 - DNA, 913 bp, Oryza sativa
cacaagacccacttttactgtaactgatcaaacagaaattaaaaataaatcgcttgacaagaacatgagggactcaaaattgatgttatcttctatctcccaagacaattgatcacctaacaagttatccacacattcatgtgtggcagcaaatcagcaatatagcacagtgaccctcaatgattaacaacatcagttacagcaccatctcacaaagcagtgtgtggcatatacttcctctgttacaaatgtaaggtatattttatctcgttatgacgaggcttaaccaacaattattactctattgggatattatttatgttattaaaagcacataactaaatatttttaaatacgaatataataaattctatttcatatcacaaaattatactataacaaagttattattggtcctaacgaaataaaatatgccttatattttgaaatagatggatggagtatataactagccaggtgcccaagttgcctggcttaatcagagagaggagttttcaagggtgaaaaggaaggcatggaaaaagaaagagaagctcctcactttcaagaagcaaaaggcagtactaattacactaaacaaatggtgttgagttccaccgagtaaagcaaaaggcaaaggaaggctacttgtccagagcatgccaaacttgcctggtgatgatgaagcaaggaggatggcttggctgttgcttgacgcacttttcacgtcacaattgacatcagactggacactgcaattgggcttgtgagtgaatagtgatggcaattgtgcccgtttgactcgtttacccgtgggtaaaaaccccattagggttgggtttgttctccattttatacccatgagtatcttattgggtcaaaagctatgcccgatgggtaaatgggcatgggt

SEQ ID NO: 40790 - DNA, 580 bp, Oryza sativa
aacttttagatggtaaaaacacgctaaaaacgacattttagtcttctgatgtccttatgtcatgggatttaactctgtgatcaggttgagatctctctctctctctctctctctctctctctctctctctctcctttttttttcttttttcttttttttttgtcgaagaggatttacacaatgtaacagttctgttgggcgttgcgttggtggtcaataatgcttttctgaacctatgtatgaatacctggcattagatatcctttgtgtcgaatgatattttgtttttctgaatctatgtatgaacacctggcattagatatcctttgtgtcgaatgacatggtgactgacaagccatagagcttgaatatcacctcaggtctcagtgatgcaatgggctttgcattcaaatcgtttataagcaccttgtatcaaagaatgcttcatcgaataatgaaattaaccatgccaattcacacttgaggtgtttataagcagcagtttactcccaacgtttggcaagatcagggaagcgcacgtccaggtttctccatatcttataatcatattgaaaaaaaa

SEQ ID NO: 40791 - DNA, 722 bp, Oryza sativa
aaagtgaaagtaagcaagcacacatatataccaccagcagctaattaactgatcaataattaattagattcatgcaactgaagcgttttcaatatgcatctgggcaactaattaactagctaaatattaatcctgtgtgttttcttttgcaattacagattgcaccgtggagaactgcatcttctgcaccgggatgtggcaccctctgtcgggtggcttctgtggatacaagaggaagaagaagaaccggagataggctcttctgcaattatcagccactgaagctgcatgtctcgtcgtctcatctttcttctaactttgttttctagaaataaattgggtaccaattaagtttagttgttatcgatgagttgtcgctttgatagatcgcgacgtagctggctgccgtgcttgcttgcattgcttagtatacatatgtgcccaaattaatttatatgtaatttctgttgcttgcttgaagaattaattacttcatcagtgcgtttaattaatttcatgcgtgtgctacattaatttctgttgagcttttctccatttcattatgcttgcgaatgtgaatatgtgatcggttaagtagttttggcagctgtcatagacttatagtactctcaattccattatatttggagtaatacatatggtatatattaattaacgtacccttgaaccttgatttctacttcccattgagcaagctacat

SEQ ID NO: 40792 - DNA, 735 bp, Oryza sativa
tgtgacttgtgacttgtgattcgattttttttggtcggtaccattttttaaatacaatattgaagtttttataggaagaacatatttagtaacttttttttgttcatagggatacggtattgtctcaggtataatgctagctcatccaaatgatccttataaagatcactcccatgatgtgtatatatgcacagcttaagatctctgtttccacattccacattgctgatgcactcgacgaagaaaccttcatttggtgaaacccaatttttggaggaaacgctccgccattgcttcgggagacgctgagacacgatatcaaccccggccaaccaccggagtaactcaccgtgctaaaaaaaaagtatcttctggttgcatctactccctccgtcccaaaataagtgcagttttgcactattcacgttcaacgttttactgctcgtcttatttgaaaattttttatgattagtatttttattgctattagatgataaaacatgaatagtactttatgtgtgactaaatatttttaattttttcacaaaattttcaaataagacggacggtcaaacgttgggcacggatattcacagctgcacttattttgggacggaggtagtacacaataattataattaattaacttcatattttcttacaaactttagtgaattaagatattgatatatatactccatctgtcaaaaagaaataatcatgggtttatatcca

SEQ ID NO: 40793 - DNA, 951 bp, Oryza sativa
tattgctgttacctttttcaggatattacggctccgagatgtgccctctactgtcctgaaagctatgccatgttcgtgcaatgtatttgttgtgtccaggcacagattgactattaagtttgcaaatcaggctcgaacaagcagtatgttttgcccatattctctactatttcttttgggaaatgcaatggtgaggcactcattttgccttaaacctttctattttttgcagagtcaagcgcttgtgtaaggactcagtcaatcagtcataaatcattttcccgaatacagaagaactggctgctagacaaacaatctttgcatgaccaccctgaggatggaacaccaaaatcttctggagatacgagttatgcaggctctcatacctgcagctctcgtagcacttctactaatgctggtaaaagttcaggaagtcatggaagaagcctttttggaagcttagggcgaaaaacaccgggcagagatgtgaacacggatcccgatgctattggccgattgaaggaaatcccttatgttgccttgagctcaattgatgaggtcagacctgtttccagccttgaaaatattctgactagtgttggctttcataagctttccataagttgtattaattgtgattcaattcttagcaggatctgcagtctcaaccagtagatgaagtagcaaaactgagaaaggaattgcaggatacgttagtgatgtatgataaagcttgtgaagatctcgtccatgccaagaaaaaggttagtgatgtgtgataaagcttgtgatgatctaaccaagataaggttaagttcttttggctgctgtttggcttgagttactgtgaccagttttttacattactaggtacatgaagatatctatattcatatattaaaagtgaatgttttaattagcttttttccatgttactctgatgtttcagat

SEQ ID NO: 40794 - DNA, 590 bp, Oryza sativa
attatattatagttatttctagaagttttttcactttagatactcccataggcaaaatagtacataagacaacataaaacaatacatctaacatttgtaatgatttctttaaaattttagagcaaatgtgcatgttgaatgttcaatacctagttaaaatgaattagttataaatcttagaaattttaaccattgtaatcatttgtagaagttataaactgatatatgacgcattataacaagattactatgtcagtagtggggaacctggcgtcaacaggcgggcctcacggtcagcgaggaagggaggccagctctcgtggaccaaatccgccgaggtggtccacgagaggtcaatgaccgggatttgccagcacatatcgaagcccgggatcactggtgcacggtcatgtgtccttgccatgcgacagtgcacatggcgggcatggtagtcaggtgcattgaggtggtgtcaccacggcactgacataggcagccacagatgatccacgaggatgacagattggacggacggggcgaggaggggtcggcttgccagacaaccggatgtgtgacttgatggttgccgg

SEQ ID NO: 40795 - DNA, 726 bp, Oryza sativa
tggattggtttttggtttctgatttttggatccaaattggattcagtccatggatttctttggatgcactagacagtccagtactctccaaagtccaaacctagcgtcatcagtcgtccacggctccactccttccgccgctgccgctccctccccttgcttcgcctcctccacctctccgccaccgtccgcgaatccgccgccaagccgtcgccggtcagattccctcccccaccaccattgcttttctttttccctggtttttctcggtctttgatatatcctggttgttttgtttgtgtttttttttgggtctcttcctgatcttggtggttgcgggtacaggtgaagcagaagaagaggaaggtgcgtgcgccgccgggcgctggcgaggatgtcctcctctggcggtccggccgcgtcgccaatctccctaagaagcccaagtaccacgacgtatgtgaacagtgtgattggtgtgatagtttctataagattttgttttttttgttggttttactgaggagttaacttgctcaagattacaatcttcgatgggtttatgtgcaggagttccaagatttcaagaagaagataaggaggtatagtgaatgcaggttcccttcatctcccaatgcaaattatttaacatatcattacagattgagtcctgatatgattttgagatgcaaattaattctatggtcaatcgaattttagtgtggg

SEQ ID NO: 40796 - DNA, 989 bp, Oryza sativa
catattaaatgaactcatatggaaaagttatcaaaaacaaagttgtacaactcgtggagatctaccaattttcttttggtcatttttccatccgaggttgattgagctatataaaatttaaattttaaaatataagaaagtcaaataatattttaaagcaataaatgatttcaaatggaaaagttttaaacaacaaagttgtataacttaccaagatctacaacttttgttttggtcatttttctatatgactttgtttgaacagtttgaatttgaatttcaaattatgacaacttcaaacaacattttcaaatactaaatgatttcatctgaaaaagtcatcaataacaaagttgtagaactcatcaagatctataacttttattttggtcatttcttcatccgataaagtgatttataaaattgttcacaaaaatgcacatatctcttataaagtttataaaactacaagagagatgtacattttattaacaatcttataaataaccttgtcggatgaagaaatgactaaaatagaagttatagatcttgatgagttatacaactttgttggtgatgactttttcagttgaaatcaattactggttcaaaatattatttaaagttttgaaatttaaaattttaattgataaaacaaagtcacaagaaaaaataaccaaaataatagcagcaagaacacaataacatgatagagcatgattttagaaatatttagaaaaaagaatcatctaatttggagttcatagttttaaatttttgaaattttatttttgcatacggcttcttaagtggccagtataaaaaaaaataatttttccatacgggcgcttaagtgtcatttttacatgcggtcctcttaaaagacccgtatgggaaaatcgatttttccgtacgggccacttaaggggacgcatgcaaagacgccgctagttatgctccgtttgcaaaaatcaaggggtctcacaagt

SEQ ID NO: 40797 - DNA, 953 bp, Oryza sativa
atgttgtttgaagttgtcatattttcaaattcaaatttaaacggttcaaaaaatattatatagaaaaatgaccaaaataaaagttatagatcttgatgagttatacaactttgttattgatgacattttcagttgaagtcgttcactaacaaaaaattctgtttgaatttctcaaactttgaatttcaaatttcaaattgtttaaatagagtcggatggagaaatgaccaaaataaaaattttgcatctcgatgagctctacaactttggttttggtgacttttccatttgaaattatttattaaccctaatttttgttccaagttgtcaaattttgaaaattcaaaatctgaattattcaaatgaacttatttgtacaaaggaccgatacaatagttgtagatctcggtgagttatacaattttgttgtttaggatttttgatggttgtgtatgtgaatgaatgtatatgaatgagggatgttggggtgtgacgtcctagcctagggcttaataggattaatagaatactcataccgacaagttacaacttctcttccggaagctgatctccaaagaactttgatgttaagcgtgcttggcggcctgagagaggctagacggcatgcctaaaaataaaatttattttttttgggattatactcatctgtgactggcattaacttaggcccgattgagatgactcatctgtgacgggcattaacttaggcccgattgagatgactcatctgtgacgggcattaacttagacccgattgagatgactcatctgtgacgggtatagttaatgcccgtcacagataagggtcatctgtgacgggctatagtttaggcctgattgagataggtcatccgtgacaggctatagtttgactgatcgtctgggtcaaaactatcggtgacgggctttaattatggcccaattgagatagg

SEQ ID NO: 40798 - DNA, 564 bp, Oryza sativa
gaagtaatacttaactaatcacacgctaatatacggctgtttccgtgcatataagtgattagtcgacaaccttggctgccagcgcagcccaagggcccctttaaattgcaggattgagaaaacagagaaataggaaaaacgtagaaacagaatgccacacttattggattcctatgagattttaaacacattaaaatctccaaactagcgtttgattatcacacaggaaaatcgtaggaatcttagacatacgaggaaaacatgaggtgagacctcacacttatttttctctaaaattgctctaggaaggtccattcgatgcaaatttcaaaggaattgttaggaaataatctgtccaaaggggtttcctgtttgacggttcgacctcgccttcacgctttcagccaaaacacagcggtggcggcgcgacagccgacttggtgatcggcaaaagcaccaaaccatccccctcctgcctactccccttaaaccctactcctctcctaatccttcccttcctcgtcgccccgcggcgacagcgagctcccctaaccaaaaccccac

SEQ ID NO: 40799 - DNA, 717 bp, Oryza sativa
tcatccaaaccagagcaatccaagaggtcgaatgtactgatgcagccttgaacaacgccgacgtagatgagacaattgcctgggccggcggaacattggacttaccccttcgccggagatcgaacaccgatggagccccgcgtcaggtgccaagtcccgttggacaataaaataaagtagaaaaggtaaaaggtggcgatgcgccgaattgtattgattgtggagattgtttacaatgaccccggtgttgatgcgaaaaacacacactggcctggaagatctgcttaactcctgtgcaggtccaaaatcttgcttttaggttcatgagcgtgccagttgatttgatcctgcaatcaacaagaataaaagacaagaaaatgaggttaaatccataaacgataaccgatcggctagttgccgatgatatatcatttatcttcgagccgatgtcatgttggaatcgatcggcagtaatgaatgaataagataagactaaatctacttggtcggctgtagatattaacgacatataatctttccttcgacgtatgtttaaactaagtgattgggatagattggtcgccatgccgagacagtataaatcacttaagtcgaaaaatacattaaagcaatgattatataggcgtttatagcatagctggtcagatagaactagcatgtatcagctaatactccgacaccactttatactaagat

SEQ ID NO: 40800 - DNA, 1005 bp, Oryza sativa
cacttttgtgattagaaaaaaagggctcgatgcatcggctcgaaattaagccgatgcaccgagccaactctccatcatcatcatcatcgtcacaaatcaacatcatcccatcaactaaacacaatcaatatcatccaaacacaatcgcaaaaaatgtccaaacacaatcacaaaaagattacaatcacggtaatcccgcggcctcccatcgtcgcgtcgtggcggagaggaggccgcacccaccgtggcggagaggacagtgataaccgaagatctaggttgccccccaagtatttaatgggacgacgttggtttgtaagggtctgtttggttgctacccgaaaaagttgtgcttctggatgtacggatttaggatttatttgactcttccattgcgttctctcttttttttttcatgctttttctttcaagatttcaatcctcgtaatgtacgcaagatttgtgcttgtgcatgggaggttagagtaatagatggatcttagttggatcttgtgccaacgtcccattaatacttcatttagttgtataatgatcaaaggcataattgcgggcttaattattcactttatagccaattttatctttttaaaatttggcattgccaaaattttagcaaattagcaacattagtaagttttgataaaattggctaaatatgagatatgaccaatatttaataacaaactaaacgccaccatatatttatcaatttaccaaacaataatatggtttaaaatattgtttaaaatggtattaatctgaacagacggccatgcatatttgttgctcaggcagcaataaccaaccaaacaagcacatactcaggctgcctgaccaggctagatgcattgtcttctcatatgccactcaggcacacagaaatttcaggcatgttgctcagggtagcaagcaaacaactcgtaaagctccagggcaaacagctcgtaaagctccagggcagactggcagtgacagccggagata

SEQ ID NO: 40801 - DNA, 683 bp, Oryza sativa
atcagaaaacttaagattaacatcaaattgcaaacacccctgattcatgagcaacgtatgaagcatttgataattaaaatggcatgcaaagggcatgtccatatgcagacaccccaaaatcacaataatctgttttgtgagggatacgtatccacaaaccacctcacacatagataaggcacaaaaaatataggtctctttaatttactatactccactccatcatgcttgcacatgtatccaatcagcagtgtttcctattttagcggaaaacaaattaataaaacatgatttattacacttatttacatcatagagccaacaactgtgactagcaagaaatttcagaggcaaatacattcaatcgcagtcttttacagcatgattattccagttatttataacattctattacatacattactaattgtcccaactagcaaatacattcatacaaaaaatctcacgaccgaatctaattttcaccaaaagttgaatagctaatgagctacagccaagaacatccccaagaacagccgcaagaacacatgaaacaaaaaacttaagagtatagttattaggaccggaccaaacagactagcaaagaaaaaaaaggaaataaaaaacagaagttgagccttagttggtcccgtttagttaaaatgaagggaccagaccgataa

SEQ ID NO: 40802 - DNA, 727 bp, Oryza sativa
ggcttcttcttgtttttcttcttcttcttcttcctcctcttttcgccggggcgatgaaacctgttgtcgaaactagatttcggcaataataaaagggggtggctatcaagctggaaaagtgtatgggttttgagacaaaggatttatacaggttcaggccttcttataaaagaagtaataccctactcctgtccggggatgaatccgccgagtgtattattgattgtatgattcgagaaaaatcaacatatgcccctagaggcgcccggaccccccttatatatgggaaggagtccgggttacaaaagataatctatatccctaacggaatatgaaaatataggtaagatacagtcgtaaccgactaagtttcagggtgtttccttgatacacaagttaagaaacaaacccaagatacaaataagaaattctatctacattaggtatcctgtgcccagctcgaataccatcgccgtgtagatatgggatacccatgatctccacagtagcccccgagtcctttgcagtcgaccatcgtagccttctcaaagatgataatccgagtacttcaaactcttcaagccaaaatctgccgagtggactgtaaagggcgaaaagataaagaatatggtgcatcgaatagatgcacctaattaggtgtagcccccaactatgtgattagttaacaaactaaacatatagttgaaagacaaaataataacacaat

SEQ ID NO: 40803 - DNA, 1639 bp, Oryza sativa
attgatcatcaaagtggaaactaaagcgaccaggggcaagtaatctattagtagatatgagcttaattcgagcagtaatgttttgagtgggtagcaaggtatcagtaggaaaagcaaagctttcccatagaatggtgtcacctttgctcttcacgatgaggtttccagtattcaagagcttagcttgaacttgctccgcatttgaagagctcacgttgttggtccacacaacctggccattataatctttcaacagcatgccgccatcggatttcaactcaaattttgattcccatgtgtacacagggtggagaggatttgcgctccagacaacagttttctcggaggagtttgagaaccagatggagaaggtggaggcattggggagatattgtagaagccacaggtgaaagtacgatctggtgagtagagcagatccaagctgcgttcaacagagagaggggagcctggcaagagggattcaagagctgaggaggagtacaaaagcagatggatcaatgtgaggagaagcagagaggtgaagattgcatccatggtggttgccgcattcaagctgatctttcaaatgacaagcaatgcaagctgttatcggaactagctgcccaaacttgcagaaaaaagtgagattctaacattctatatactactacgaaggtgataagactaaattcagtctgccagttattttgcgtcaatgggcagtttccttggaccaaactatgcaatgcaagtaccatgttggcaaatgattcgtgtatacatttccaacctgttgcacaagtggcactgtggcatgacgtgtccttgtcaggatccgtaaatctggacagtaaaataagatttgcaatatggtaatgagttcagtgtacttcaccagtccataggtccatcctaaacggctgcacatgcacatattcatcccccatttccaaagaagcctgacttctaacatgacggggaagctcaggctttgaacatttgaacacaaaaataatggcaattggccatgctaatttttatttacatgtggtacttcatgcattgtgagtttgtgattgggtccctttcagctttgagtatactcacgtggaatcttcaacgagagatttcagcaagcatacacagtaaggagagtttaataatatttttttattggctgaacaaatctgtgaagacatttcttccgatcaaatgcccattgcttgaacaaaacatttacatccttacctaaaataaacaaacttaatacgggacgtggacagattcatcgactttgttcgtttgttacctttttcagctcacatccccaattttcacatgcacgctttttaaactattaaacagtgtattttttaaaaaaatttctatacgaaaatttctttagaaaaccatattaatacatttttttaaaaaaagctaatacttaattaattatatgctaatgagtactttctgactgcaacaaacgaactcagccttaaagatataggcaacatatccagacagagtcacgaaggggatatcaatttacaccaaacaatgctgtaaaaacagcttctcagacgacacagcacagcaccagggttcataattccaataaagaccggtcaaatacagt

SEQ ID NO: 40804 - DNA, 1260 bp, Oryza sativa
catatgccaaatcatggacttctgatgtccttgacaaagcttttcagcaggattgtatgtcattcacaatagcaaggcatatggcttcgttttccagtgcagcggttctatcaaagtgcgaaataagctggttaaatcgcttatcccggtgctatgcccagaagcgtcatcgatcatgaggtaaatgctctcctgctttcaggaatattacttgtatatctttgtgttgtatttcttaaattgatcatgtgccatccttgatgttcggaaaaaaaaatcataccgcaggacgtgctcaaaggttttgttctgcaaattgcacaagattcacaatgtagtgatgaagttagctgaagatttgaaatcttgaagaattctagcttgcgagatgcatgaattcttctcttttaggtgagaatccagagattaaagacatcgattgatcgatcgataaatggcccaattaaaaacgtttcacatgcgctaaggcgcaaaagtcttggcgatcgtacataacataatatgtgccaacgacaaattaaacaactagagaatcatagttgcggttgacgagtacaaacctggcgctacaaataaaactgacaacaacatgctgaaggcctagctagaactgttacatggacgcttggcccatttcgccccatcagaattatggatttgtggattacattttgaggacaagaaccatcaattggtgtcgctggtggtaatcctgatgcagtaccgaacactttttcttgtttttgaaaaattgtcgtctcgtctgttagcatgcctgtctcatttcattctgtttatatagtacggagtatatgttgaatgcatcatcagttttttttgcatgtttattcatgagatgatgaaagagttatgtgatgtaacttcacatcacatgatcacatcgaactagagaatgaatgcgtgccaccactacaccatttttaattttgcaaaagaaaacaaacaagttctgccattatcatttgtagtatgtactacgtactagtataactccatatataggtactactccactatgctcggttctcgccggtctgaagcttcacagatcgatcaacgtcacagttgtcaccttggaaagttcaagcagaatgggaccaaattggcaagtagatcagcgagaggcatcggggaagatggctgggtacttcttcaccaacttccatgtggacgatcactaccaacttcttctgcaaacacaagcagtttcatctctta

SEQ ID NO: 40805 - DNA, 726 bp, Oryza sativa
gtaaagatggacctccaacatccaaagtttgataaaaatttaggatgggttttatttactaaaaagaaaaagtccaaatacacccttaaactttgatggaagttcatttatcacctaaactttaaaaccggacattttaaaaccggacatttagatccttaaactttacaataccatttatatagccctctaatatagctttgcatagtattttttttttctaatttgtattatacagtagatgagtttgatcacatcacatgacaaggcattggatatatgtgttaaaatcttcacttaaatatttctttttacctcatgttcactctcacttagaaagaagtaggtaggattaggattcttgtgattggttgagaagaggcagtgaggaaaattgaatggtggaaggttatgatgctggaaaatttgaatgctgaagagaatgttggtggaaaaattgttatattttaggataaatttttacgctataagttgttatattttgggataaaatttgaacattataagtgcttatatttttgggcgaagggagtaccgttgattatatataaaaacattatattagttattcaaagccacccatttaagctttcaaatacacaaaccaccaatcaaaactatctcaggataatatgtgccgacgggagataccacggattataatctagggtattgaggtacgttggtacgagaagggctgcagga

SEQ ID NO: 40806 - DNA, 1870 bp, Oryza sativa
tcctattcaaaataaggagcaatcttttgaagaaaatccatttcgactgcctcaactattcgtatccttttaactgtaaaatcagccatagagaggctccctcaatcactaaaaccagctcactttgcgttctgagtgtattaggttgtgtttagatgctagggtgaaaagtttttgacgtgtcacatcggatatacggacatatatttgaagtattaaccatagactaataacaaaataaattacagattccgcctttgaactgcgagacaaatttattaaacctaattaatccgacattagcaaatgtttactgtagcaccacattgtcagatcatggagtaattagtcttaaaagattcatctcgcaatttacacgcaagctatataattagttttttcctatatttaatactccatgcatgtgttcaaacattcgatgtgacagcaattaagcatatgacaacatccacacactggtcctgtatttttagaaaataagaaataaaacttgtattttacactagctctgtgatggacaaattagaaacctacatgtcccgttcatttctccaacaagagttggatgaagataaagattttcgtggcacacttttcaaactgttaaatggtatgttttgtgtgaaaactttctatatgaaagttactctaaaatattatattaatatatttttcaagtttttaataattaaaacccaatcaatcaaacgttaataccactttattttgcgtaaaaaacttaatctttatcttcatctttagaagaaaaacaccccatatgatgttgcttgtaacaaatcacatggaatgtgcactgactagtacatatatactttatttaattgtttcagatcagacaaagaaagagtaactccaacacgaatttactgagaatgaggagatggatgtccatgaataactactctctccatccaaaaaaaagacaaaccctgagtttccgtgtccaacgtttaactatccgtcttatttgaaaaaattaagaaaaaaaattaaaaaagacaagtcacgcataaagtattaatcatgttttatcatctaacaacaatgaaaatactaattataaaaaaatttcatataagacggacagtcaaacgttggacacgaaaactcaggatttggcttttttttttttctgacggagggagcacttttggaagatgttgaaactatctgttggattatgttattttactatgtaacggactgtacaaactacctgttggatgatgttattttgctatgttgacttgttgagacaatttttggactggtgatatattgttaagcacattggaatgtttgaaacctttgtaatggactgtcaaagctatgtgatgaacttgtaatggatttattggtgtatgcaattgtaatggactgattgatttgcaagatgacttatttttttttttgaaaatcatgaattatctgactgcaaaattgtgctcggagcgccccaagtttttatactccaaattttcgatcgaaattttcatatttgaattaaaaaaatttcggaagaaaaaattccgaaatttcggttctttcgcccagaaaaaaaacgttttgtaactgcaaaccctggcgcggcaaaggaggagggagacagaagggaaagaaacgcgtccgtcaacgctaggccacctaatgcaatgcggactccgacgccaagccggtttggaattggatccataatcgatcggtctatatattggcggggtggaccgtgggccgaggcgaggccagaagctgcttccattcgttgccacgaggaaattaaagcgcacgcaacggatcgatcgagaggcgcgacatccatgcagaagga

SEQ ID NO: 40807 - DNA, 697 bp, Oryza sativa
atgcaaagatggcgatctttgccgcatgcgaaaatcgttgccggccgtatgtaaaaacgtattctgtagtagtgcatgctcctcacactgaaacattttattttaataaaaaaactattctttcttgaaagtagtgaaaaaactaatcccagccgtgataattacactggtgtaacctcctttggctaatatacatctaaagtatgtagtgaaataactaatctttctcaatacggtaatatgcctgccatgtcatcaaagaaatacagaccatattcaatttatattttcagcaagaatcctagagctgaagccattacagacacggcctaaggatagacaaacgcggccttgaatgattaataatttttgttttgtttgtagaacacaaagatatataatggactaaaatgcatttttgttctcttcaatgaaagggatgtatggcctggcatgtaaaacaatgagaaagtgcggtaacttctaagtaaaagggagccaaaatttattatagccaagtccatgcaagcacaccaagtcatggccctcaatttgtaacctattattgacaatattgagtatttccatataacggaataatttgttcaggaggggttcaatttagaaggaggatcgaattacagaattcgaatcctgagggatttaacatttggcaagatttgggattcacccggat

SEQ ID NO: 40808 - DNA, 1317 bp, Oryza sativa
gcaagtaattaatgtctccaaatgggaacagctagctgcaaattgctcaataaggctatcgacaaaaagtagtatagctttcatgaatgttgtcttgaaatctgagaaaaatatcgtaatatttttaacataaagcaagcatattatcaaaatatattaaattatagttttaatgaaactaatttggtattatatatagatgttgctaaatttttctataaatttagtcaaactaaaaaagtttgacaaaaaaaagtcaaagctagttataatatgaaacggaggaggtagagcttatatattcttacatgggcctggtttagtttccaacttttccatcacatcaaaactttcttacacacataaacttccaactttttcatcacatcgttccaatttcaatcaaacttttaatttttgcgtgaactaaacacacccataattatacgtgacaggggtatgaaaagctagctatgtgataaaatgtacggtgatggaacatgtatatatgagttctcgtaggcctgtttagatcccacctcaaaattttacaccctatcatatcgaacatttaaacacatacatgaagtattaaatatagggtaaaaaaataactaattgaatagattgcgactaatttgcgagatgaatcttttaagcctaatttctcaatgatttgacaatgtgatgctatattaaacatttgctaatgacagattaattaggcttaataaattcgtctcgcagtttacggattctgtaattagttttttttattagtgcccgaacacctcatgtgacaccccacataatatccgatgtgacacgctaaaattttacacccctgaatctaaaacacactctaaataaataaaaaaggacccccacgaaaccaaacatcgatagtcaagattggaagcaatacagtgaagtattactccctatgtcccaaattataaggcatatatttttttacacggtcttcaatgatatactttgaccattaatttattccatattatgttactaacgaatatgaaattagcattacatgaaagtactttaaaatatgaatctagtgatataacatgcataatacttagcatatatatggttagtgtgattgttagtcaaaagttatcgggtttaatttttcttaaaaagagagcgccctatattttgggatgaagggagtatttcatttcctcgggataaacgagaaaaatccacgaggccccctttccattgatctgcgggcgaatttcccaggtcttctggtaaaaaaaaattcccaggtcttgtactaatgaattctga

SEQ ID NO: 40809 - DNA, 682 bp, Oryza sativa
ggtacacaattaatgaagcagtggcacttagcaggagcatggtttgttactttcttttgttgttcagtgtgaaaatggacttttgagtaaagttcaagggctaaaaatggactttacccaatgcaatacaacatctagtttctctttagtatttttagagatattaacctttgcatgtgaatggattttgttgtttttttttttaaatgtcatatcatgcataactgagatacaccatcatcgcttaatgtttttcttacatcatttctaaagtgtgcctccaaaatattgcaagataaataaatgtaataattcagtttttacgttcaaaccataggttcctggacagcgcgtgcttgcgcttcagctccttgctttgattcttaatagggccttgcagaacctacataagacggatctaattgataactttaaagaatcaaatgatgatgacaagtttaatgactggcaagcggtttgggcatatgccatcggacctgaacctgagttggttctctctctaaggtaaactggttgttttcaaactataataataattttaatttggatttgcttattccatgcaagagtttattagttaccaaagtgaagagtacttaactgaaatataccggacaattctattaagactaaataatcaagaaaccttaacacatgcttt

SEQ ID NO: 40810 - DNA, 617 bp, Oryza sativa
cattcaagatgatgtggttgtatcaggtcaagatgttgctgctggtcttgttagaatgggaatacttccacggatctgcttccttttggaggtgagggtctggccatctgctctccctcatcccctatctgccattgtttctttcagaatcccactgccatgcatgcacccagaatcccaccgccatgcatgcacaatatgggtgcattaggtcatcttttgtttactatatccgtgaattgtctggttccttgatgttcaatcctgtctagtacttgccatccatccttgaaatggcagtgaaatgcctccttacctggttgacacatcacttgttttcaccaggaaatctggtttgcagcagaatttgtggctggctttgattgttcttttaccatcggaaaattacaattttgatattcaacaaccaaactatgataaattgtgtatagcctttcatttttagcaatattttttatttcctgaagctatgggccttatccatttgcagttttaagtattttgtagttctatgatgtcatgtcatctgatacccgtaatctttcaaacttcttatctggttattggactgtctcgtagattgttctgttcaccct

SEQ ID NO: 40811 - DNA, 505 bp, Oryza sativa
tgggattcaatatgttcaaggatgatgtgacttgccttgctcagagataacggccttccgaaccttcggcgacgaccacgaaccacgcttcgggaacctccggaacgacagaagctacgcgaagcacacaagcaaagctaaaagcctataaagaagcaataacacacataaaaagaaagcacagggttctttaggttataacaaacattaggagacttgaacgggtcgattcagagttcgtatgaccaacatatgatcatccgaagtttaatgctgttatatggagatttgcaaattattataattaaactttgcaattataaaacatgtgtaaacgctagcctgtaaaagacaggaaggctgcgccgttgacatgcggaccccacatgtcaacctaaaggaccacggtagaccgggtacacagagacggtccacgggccacggaagcggaccccgtgtgtcaaccgaggcgagtggccgataaacggactccactagacaccac

SEQ ID NO: 40812 - DNA, 509 bp, Oryza sativa
ctctacgaattacaattattgatgatgtggcttcttacatgccatgatgtggcttctttcatgctttgctttatataggaagataggattgttcaagaagtgagtgatgatattctaattaggatgtgtttgcactacaacaaatataccttgtagagagattttactaatactatagagacatttttaaaatgccttcctaatactataaagacagttttaaaatgtctttacagtgttatagagacattttgaagagtgtctttttaaaacgcctttacatgcatttttaaaatgccttcctaatactataaagacatttttaaaatgcctttaccatgttatagagacattttgaagagtgttttataagtgccatttggtgaattttacggcaactatagcaaatcaatatgaaaaagaaagaatttacggatattctaattaggatgtgtttgcactacaacaaatataccttgtagagagattttactaatactatagagaca

SEQ ID NO: 40813 - DNA, 801 bp, Oryza sativa
ttgtgacaccatttgcattcagctttccacgcaccatttattttcttcttaacaaaatcttgccatgctgcagatttcagtctcttattatcatgttctacttctgtaccttgtgaatcatttatttcgacgcttggagcattggttggagtgggagtggaagtggaagatggtgtcaatgcaacttgtgactcaacggtggcagcagggttcgacattctgtccacaaataacataattcaataatagatcacaatctgctgctatgtgctatgtactaccaaatctaccaaatatacactgaaatatacactgaaatagatcacaatcttctgtttcataatttcattcacaaatcacaaggcacatttggagtattggagatggagcaatacctctcactctttgtgatgtgctgcaacctcgccgccggccgcgccctgtgcgccgccgccgccgccctgtgcgccgccggccgcgcccttgctgccggtgtcgcctccccgccgcgcctgtgcgccgccgccggcccgccgtggcgccgccccgtgtgccgccgccgctgactccggagggagaggacgagctcgagccgccggacgccggaggggagactggagaggaggggagaggagatggtggcctggcggctggcaggcgccggcgacgccgagagggcgagatccagaggcgagccggcgagccgcccacgagcgcgcgccgccgcctaggtcacgcggctcacgccacagccgcacgggatgagtggatgaccggaaggggaggggaatgggctgcagg

SEQ ID NO: 40814 - DNA, 2095 bp, Oryza sativa
gttgatggaaaagaaaaccaattaaactgtgttgggttaaaaagccaatgagacagtagttggggaataggagtttggatacgccttttacagatcaagataaggattgttggatgaaacccataagggtacccgccatgcctctacattgataagttcggatatacctgcaaacagttaagaagatccaggagacatcaatatttgagaacataatagtcgatggttggtaattagtcgatcaggtatcagaaaagggtcaaaggtgatatggcagaagaacaatatggatgtccccatcccaaggaagcactaaaccctagtggcatagatacagatagcaagcaatgtatttccctgaaggtagtcagtgcagctttttgacgaaccacatcaaggtttcaccgaaaggcagcaagccaaaggacctcatcgtccccagaagcgtccgcaatccacattaaagaataccacctgttagagataagccgaaagatgattgataaaagagattggcaaagatgttctctagcatgaaagaagtaggccgaaaggtgattgataaacagaaacatgtctgcatcgctcaaggaagacccctgatagtaattgcctcccccacaacagtcacctttcattaagtaagcaagatgacctaggtaaaagtgtttctatgaaggcaaggagtgaaatcttcaactcggtatcagatgctacacggagtgaaaagtgcaagcgcaggttaacaggcgacgccatgtcttgggagatgatccaatgggaaagaacacatcaaggctgaaggtgcacaggaatacgttgaatgctaaatgatgacaacatgaagagaatagcggaaagtaaactgaacataaagaaagtgaatctgagttgcttgttcgtgggagctattcccagttatgaaccaagtgatatgatcgaagatagtctacagaggtcagagtaaaatcacatctaacaacgaagcttcaaatttggccggataacgatcagacaataagaagtccagcagtaaaactatttgggaagacgtcaaagtatatcaagtgggataagttggttcccttgggaagcataattcaaaggcaaagtatcgacccttgcatcaaatagcagaagtagctatcacccggagaccaggaaagctaatatgaggcagttggtggcgagttagaagcaaatgacaagcatggtatcttagtaatgacgagctgatctcgacgcatgacatgaagtgggtaacttgtatgaggttgactccaaagatatgaactatgcaagttctggaactgaatccccatcttcaagtgccgcaacccagtcgaagtcagctaaaggttcaaccagggataagtcaggtgcaagaagattccatctgcaataggagatcgagccaagcatccatatgaagaattttatttatcaatttttttatacaaaactgatcggaagaagtcagacaagaagagaagaccgcccaacctatcttcttgctagcctcctcgaatctcggggacgagattcttgtaaggggggtggatttgtcacgtcctgataaattcatcccaaaattaaaattcattcgctaaaaggaataatagaattaattaaaattcgaaaaagaaattggcaaacactaaaatacgtgcaagaaaaattcaaatgtggcccggagaatttttgttaaattctccttggtctaaaaggagccctcaaattttactggaattttcagagcaccggaaataattattaagcaacaaaaacaattatcaaagtttatttaaaaaaagaaaacctaaaaataatctctcttcctcctttgggccaagcccagcccaaaaatctccctttcctccctctttttctctccctctccttctctccctccttctctggggctcccctttccctcggcccactccctcctccctctctctcccgggctgcctttcccccccctcttccctcccggcctgctcggcccaggccgctgtcacgtcctgataaattcatcccgaaaataaaaatcatcttctaaaaggaataatagaattaattaaaattcgaaaag

SEQ ID NO: 40815 - DNA, 557 bp, Oryza sativa
cttgggttatattaatttgactagttgagctttatttatattggttcaactagatattagatataattgcttaccctgcttagaaacattagtacacttatgggataactaatgattcactattatttcatgatggcttattgatagttcacgatggtcaatcgtgattagttaattaattaatgtgccaactaaaacctgataatggtgggttgtgggcacatggttttgatggtcgtgctcatgacaattaaggaccggttcacgagtttcggttgtgaaacatttatcgtgccaaccacaagccagcatgggcaacggctttatcttttgtatagcatggttcattgcggggcaccagactgagaagtggcggagataagcccacgggggtcgctggggagtccatgccttgtttataagggggtgattatgatccaggaaggtgcgctgcagtgaattgtgttatgcgaggggtattgtcacaactcctttccgagataccgtggtggtattgaggcacatggtgacatgatgtggggttgtgtcttgtgggt

SEQ ID NO: 40816 - DNA, 605 bp, Oryza sativa
tgtccacagccgaagcgtaacctgcgtcatcactccggccattatgcaagaagaagacaagtcactcgccttgtggtcactggagcaaacgccgtacctgtgaggcctcatgttaattctaacccatagtagaaacaatgtaccgatgttaagcaccttccctttttgtttaagacagtgccttgtattcatgtaatatgggagaaattggtaataaaaacaagttctaagaggattcttttggaagatgcggatatgtgatcatgtgtataattgtttactgacaaaggagacctagggtctcgtgccagaggaactatattctaacctcgagctaataaccaacctgaggatggaaaagaaaaatcaagtgattaaccaaagagacatttgtttggactaagagttacagatgcgtccttttcggatcaaaggcaacgacagttagtatagcttttggcgaaacacttcaaggtttcacggaaaggcagcaagccaaaggacctcatcgtcaccagaagcatccacaactctcggagtgaagagtacttggttgacaaagtttaagaagtgattgatagaagataccagcaaagtgtttatta

SEQ ID NO: 40817 - DNA, 801 bp, Oryza sativa
aaaaattcaaaatcccttatattgtgggacggagggagtactcagcatcatcggcccttgatttgctaaagggcaacttagagataaaaaagcactacaatggtaatttagtaattgtgtcagtcgtaacagcctctaactccttcctggttgtttgtgctacgccctaattaatttttagccggacacgaactggccactggacacaagccccaattcactaattctcatttccacttgttgcttgatcacatcgctatatatgttttcatccactatatcactgccacttacgtaggcttcatccactaaaccaaatctattttcttcttgcctctaatggttgatgtctaaaatttgacttttagtcattcttgtaaacccatttgtgcgaatgcaagatatatatttttctggggaaagcaagatatattctaattttaaccatgctttcttgcacagttacatatggcgttaactactaatcaattaccaatttattgtcatttacacaggttacgattaatggatgactgatcaattacatagctctatcagtatatgcaatcggccttctcttctacctctaaacgcatgtttgtttccctgtaatcgatgattggaacttcataatatgtccggggccatgcatccaccatacataactgctgtcacgtcctgataaattcatcccgaaataaaaatcattttccaaaaggaataatagaattaattaaaattcgaaaagaaattggcaaacactaaaatacgtacaagaaaaagtcaaatgtggcccggaga

SEQ ID NO: 40818 - DNA, 1273 bp, Oryza sativa
gtatatgtagtattagcctgtattgctcttattttcaaatgtataccctacatttgatttttttagacggacaaaccgaccgcctagatacaattgacaagccacatcattttttttccacaaaatacacatgagtatgatgtggaggatttaaactctagatcggtctcatagtccacacgcatccattattaccgtcacactattaagtactcgttgtttggtcatcaattacaagaggttgtagatttcattgagctctaaaacattgatgtagagcatgttttaatcatggatcatttgaaacataaatctgagatgttgtaataagtgggcagcataagctagcgagcgcatgtgaaaatcaaccttcatatacggaccgtgaccggcgactcccccagtattttcacatgagggtcttcttttgacccacttataaatataaatagggtgttcacaaaaattattttttacagtgtaacttttgtacacattaatataaacaactatgtaaaaagtcacttctagagaaatgattttggcagacgaccaaaacatttttttttcaggtcgccatctactatgtctatagttcaaggcctgcaaaaatacacggtcaaaatgattttcgcagatgctacatccaccctcctgtgaaaatattcacggcggacgaaaaaaataaatcacccccaccccaccccaccccatccacaccgccaccatcctaccaccacccatcccaacccgttcagaccccttgctaataacaaatcacaagttcttcattcattcaacaaattcatgttatctagtgtttaatactatgaaccggtttttgcaagccggacctcatcatgcaggggtagcattatggggtatgcctgcgataatatatgtatcttcgcagccgtatgagaagatgtattttcgcaggaggacagccatcatatcccccgtccacgacaatgcaggcggcatttttggtacgaaaatttgatctgcctatatatagtgaaatgggtgttgcctacgtgatgtgaccatcaagtatatgcatacaacgaagcataagaaatataaaatattgtcaaagaatacatcgagtgaatggagtatctataacatattaaagtccaataagttttggaatacagttcggcctccggagacagcaatgactttaagcagacctagcgtcttcacgccaactccgatttgggtgatcttggacttcatggaaatcttatctcgctacctttcaaacgca

SEQ ID NO: 40819 - DNA, 1768 bp, Oryza sativa
tttccatattgtaatcctgcccccatcctgtataaggtaggcaggaggccctctagggggcatatgattcacaactagattgacagatcaatatacacttggtggattcaaatccccaaacaggagtagggtattacctctcattgagagggcctgaatctgtctaaatccttgtctccacatccatccacttttaagtctcgtgcgctacccctttatattgccgaattcttgtttcgacaaacatcacacaaattattgaaaaaataaagatgtttacattagagtaatcataaacatccctaatcatatttctaacacagttaaataagattcccgcatatatgcgcgggctaccttcctagttaattaaactggagtgcagttatacgggcttgatcgatcgaccaacgaaatacttagcttctgacgtgattcaggctggaaaatagtggggcagctggtgctgatggtgatctattttgtgtttggtcgttgacgctttattaatacaaaacatgcatgcatatatagcagggaaactatatgtcaaattgtcaatcgttcctactacgagcacatgcataactcgcgcaatatgtgcaataattaatactcccttcctccatctatttttaatagtcatattttatcttgacacatagaccaagaataagtaattccactcatcatccaatttaaacatgctactaattatttctcgtaaacaagtgattcattaatatttatatttctcgatgcccatacaaccaatcttgtgtggaagaatagagagtcatacattaaatctgaaaaagtcattaatatgatagggtggtggattgaaatatacctatccaaaatagatttttcatatttgaaaatatgactatcatgatagaaggagtaataccaagcactttgttcttcaaaaggttaggcgtactgataactgaacccccaactgaattatatacgcatatattgtttttgacggcgcccattgcagagtgccaagtccaagctagctagccagccagccagatcagtgacactgacacagccagagacgcatacggaactattttgatttctcgaggcaatgtttcgtcgtttaattgcttaaaaatcatctaaacggttataaaatattctggaaaattttgataggacttatgcaacatatctatacaactttataaaatcttagattcaaactcaattcatatattgagatataaaaaaaataaatttatatataaacagtagcgcacgcggttcacatctgaattggtcaaatttgaacttgatttttaagtagatcgatagaaatcactgtactctatattgttattttttttaaaatttatcacatactactatttgtatcgaatttagaaaaagaaaagtactctaggagacatccccgagtgattaaaatcactccccacgcagatattatatatgtcatgcatgtacagatacaaacagaacgagtatatggacagatatgcaggtcctactctccgtcgtcagagctacaccctccgtctaaaaaaaattcaattcatgggtttccgtgactaacgtttgaccgttcgtcttatttgaaaagttatgataaaatttaaaaaaataagtcatgcataaagtattatttatgttttattatctaacaataataaaaatactaatcataaaaaaaattatataaaaaaaattatataagacagacggtgacggagggagtagttgccatcgatcaatg

SEQ ID NO: 40820 - DNA, 596 bp, Oryza sativa
caaagggacatctataggtataaatacaaggccccctagaagaagaggggacacacccaacagactcggacaacatagacgccacaaagccacaagccaatacaagcctacataggccaagacaagctgctagatatcgacatcagagataagcctaggaaaacccgatatggtacctacgggacccaaagagaggaatctagcgctatctctgatctcgctggatgcggatttgaggaggaaggctaccctgttgtcgactacgagtcagatcttcaggccgccacgtcgacaacagttagataggctaccccaaatattgtactggtgtgattatgatgaataagatcaacgaccggcttcggccaacaggatgtagggttattacctgataattcaggggcccgaacctgtataaaaatcctcgtctctatctcttttacctcagtctcacgtatatcttagtaccaacaatcctcatactatgcaaataccagaatcgcgacatcaaacgtcgatagtggcgcgccaggtagggtgattttggtgcttcaggatttcgacgagatgggttcaagagatagattctccgacaa

SEQ ID NO: 40821 - DNA, 1723 bp, Oryza sativa
attaaagttctcctctcctttttcttttacaagtttatagattagtttttttattactacctttattccttcttctttctgtccgacaatatcgatatttatcctgattaagtcgatattgaagagagtcgatgatgaattattgtcgtggaattattaatttatatcaccttttctctgagttatctcccggcgattgtcggtcggggaatattgtttgtgtttactgatcacaccacacgtgaatcttgtccatttgtaggacgggaaagctgcaggttttggagaaaagattagtcagagtaaaacaaatttgtctgtctgttattgacttgttgggcgaagaatcgactccgcgaatcaagcctgattcacaacctctatataattaatttatcgatatatgcatatatcctattgttaaacagaggatgaaagaggagattccatgttcactatgttaagtgctaaaaattaaaggatctatatgcatgtttatgttcatgctacatctacattataacatgtagattaataagtatatatatatatatatatatatatatatatatatatatatatatatatatatatatatatatatatatatatatacatatatatggacagagagaaaagtttattcgtctcttaagggaatgccctctcattttgcatgtcgttgaaaaagttttaaaaattctaagaaaataaacttgtaaatcggatacgaacttgtgtgtttgtggagtaaaacatcatatattgttcatcatgtcaaaaaaaattttgatgatttttggagtgatatgtatgaaatgagggggatatcaccttgagcgacaaatatccatcttcgtttgttaaggttgttttatttgcttaagagatagtactacaattgtatttctagctagtttttcagttcttcgatcagttttctttcatcaaattgcaatcgttacttaattgatcctgaaaactaccaaaattgcaaatagctagaacgtatggggaatgcgtcacatgaacacagtatcacaattaatacgctagggatgtctccttcacagcccatacatagctgatcacagctaattaagcacacattatttggaataaatccaaattgcatgccggcttgcttgctggcttgcttaatcatcatatataccaataccttttcagatcgagacagttgctgctcgtacgccttctctcgtgaaaatccccttgttaagaaagacgtacgtactagcttgcacggcatgaatttaatcatggacatgatcaattgatcagaacaacaaacagtgagttagtttggtgtgttcatgtatgtatcaatgcatgtggctctcgtacgtaggtgatgtgtatatatgtatatgtttttagtattcaacaattcatggtacatacatacatacgcaagtagtatgagatttggctgtttgtttgggcatgcgtccaaagatagtataagtataggcgacattgacatgagtctctgcaagctaataataattaattaataatcttctgtctgctaactcatgcatgcatgtagtgttgtcccggtcccacgaggtttgtgatcaccaaccaatccatctgtagtgctaccaaacaccacatataccggtaacaaacactgaccagcacgttgcactggtgtactgatggcagcagcatcttctagtacatacaagtactaattact

SEQ ID NO: 40822 - DNA, 694 bp, Oryza sativa
ggactctatactctacctgtaatattccttatttttaattttgaatttctattatttcttaatggtatttctatatggatactatactctacttctaatattccttatttttaattccgaatttctattatttcttaattgtatttctatatggactctatactatacttctaatattccttatttttaattccgaatttctattatttcttaattgtatttctatatggactctatactctgcttctaatattccttatttttatttccgaatttctattatttgttaattgtatttttatatggacttctcctcttccaatattccttgttttttaattccgaatttcaactatttctaaattgtatttctatatggactctgtttttctttttctccgattaatatgagaatttctagaccgtgagaacgaacatggaggctcttttttctattccattaataagttaatagattttatattactagaaagagtgcccgtgctttgtaacgaaaaaaactactactagttacaatcgtgacatcttgtatgtttaatctttgagcgttatggctcgtgacattggttgcatggctgattattacatcacgatcgcctcaccccgatttctagaatcgcataacactaaatggtggaattaagggaatatacattggaatcctagaaacaaa

SEQ ID NO: 40823 - DNA, 644 bp, Oryza sativa
tgttcatggctcacatttgttagacttttgagctgtaataggctgggaataatggtacatgaggagggaacttagcccaacaaataaagatgtttcttctagtctgtatttcaattggttgttataattcttctacacgtataaatccaatttggtcgtgcatgctaaaagaaatcggggagataacataagctgtggtttttctaaccatttacctcttgttctacttttcgtgatgcatggtcaattgaaaattttggaacggattattcgtagaattattaccgctgattttctgattgtatggataaatcaaatattttaagaaataaagtgaactaatagtctaaacaattcgatagaagaaagtagttaagaaaaatatatttttagaggtgtggacccaataattcgataaagtagttgaaaagaattgtaccaaaatttggttaattgggtaactagtaattcagtaatttattttgcaaatgcaagtgttggtagtggttgcacattgtttactttgattcgattggtcatataataatatcagtggtttttttataaagtaaaagttaataagtaatatgttgatgtgatgtacctgactttggtatttgtaatgtaatggggacattggtatg

SEQ ID NO: 40824 - DNA, 2988 bp, Oryza sativa
tttagtcttgtggcatgacattccctattaggataggctatatgcgcaatattttggcaactgtgagctaaatctcttctggtagaagacttagcttattttgctagtttatccgccatcttcttaaattatcttgagatccatcgcacctaaatcctgtcaataggaacagaggaagtgatttgcgtccaaaaaggtctaagactccagtggcctggatcatccatgaaattcttcttctttgctgtgtccgcaatagtagtattgtcagataggtaagtgacacctgaaaaattcaaacacatgtcagtttccaaagaaagttgtaaagcaagaagttcagcttgcagagcagaatgagctttgtttgaacaggcttgaataaacatggcattatgattttgaggattatgaaaaaaaaaaattcctatgccagtttgtccattgtcccaggctgcatccaggtagcatctgattccattcggaattgtgtccatcctccttgtgcctgcctctgattgctcattatcctgcaaggcaaattgagaagaaatctgggaaaaagatgaaatcagagcatctgccaggtagctaacttgagagggttccttgaaggtaccctgaaacttaaagccatttctggctttccaaagttgccacataatgatgaagagattgctcaaattaattctacttggaccattgttaacagtaaaggctataattaaagagagtctagagctggcctgaaatctatcaatatcaaagtgataaccagagatcatccaagtaagtctactaaaaggacataagaagaaaaggtgaagatcactttcaggcgtaccacatctacaacaagcagcagggatgtcacttattctttgattaagtgtgagagaggagggaagagcttccctgagaaatctccaagcaaagactttgactttgggaggaatgttcttgtctttccaggtggccttaataagagcaagggtttgggaatctacctgttgaagattttgattatcccttttgtagaattccctataagcactttttgagttacattctccattctttgtgaatctccaacatagtttatcactcgaagtgtcctgcatcaaggggatctgcaaaatcttttgaacagcttcctcttcaaactgggagttaagcttcaaattgtccctctctttctcattattccataaatctgcaactttaacaggtaattgactaggcatggggttagtttttataaaattatagatatcttcattaagatcacaccatggttgattccaagtggaaatgtttccttctcctagctgccaagtgacagaatgtcttaaaaccttcctaatgtttaaaacagagctccaatagacagatttagaaatattttttggagcatcccaaaaggaggaattaggaaagtatttacctttaaggatttgagcaatttgttcctgtgggtttgtgatcaacctccaagctgagttagaattaagcttttattaacagcttgtatatctctaataccaagacctccctttgaaatgggcctgcaaatgtccttccaagctctcaagcataaaggatttttgtcatgtccttctctaacacctgcccaccaaagttttctaataatagctgtgattttattaagaatattttttaagagaagaatagtagccatatagtagacaggtaaagaagcaaagacagagttaatcaaggtcagacggcatgcatgagacatattattagccttcaaggtggtcagcttggctttgaatttatcaatgatgaatttatagataacaaacttgtttctattggtgacaaaaagagggtgacctaaatgtctagtgttggcatccatgagattgatagggaaaatgagccttatagcctcttgaatgtgggaaggggttttcttactgaacattatactggatttatcataatttggagtttgcactgagttcctgcaaaagttttcaatgatgttctttatctgacaagcttcttcaatattagctgtacctgtaatgatgaggtcatttgcataaagaagagagtgaataacaggtccagaatcacttagtttaatgccattgatgtgttgattatgaagaaccttattgagttgatcagaaagttcatttaaagcaagaaaaaaaagataaggagaaagaggacagccttgtcttatacccctgttagcattgaaagaaccataagattgaccattaatgattacagaaaaagaagaggaactaatgtaggatttaaccaggttaattaaatgatgatgaaaaatctttcctttgaagagcagagtcaataaaatcccattccaatctatcaaaagctttagaaagatcaattttaagcataaaggcattctgagagtaagagttcaggcaaacattggagcttcgctgttttgacacttctagtggataacaaatgggcccatttgtgtctatgaaatgtgggtccagtgtcattttagaaaagattaggggacgattttgatgacaagttgaggggccttcggtgtactttttccgcacacaatataaccctgttcaggcccaaccgtacgacaaccgcctccgatcccctctcctcactccttctcggcggcgaggcgtctccgacgaaaaccctagcacgcatctcttcccctctttcccatggtgagtatccacaaccaagacctcgccgtttcgatccgctcggatagttgcttcgtcggctcggctccagatccatctgaccgatcctgtgatccagcttgttctgccttttgggtgttcaggatagaccacagagctacgcgggttcagcaagaaggggagcgggtatgattttagcaagtatgtcgagagggagttgatggagaactcgatcgcggcaacagcattaagaattttcctggagctccggtggaggaggatgaggagggggatggagtgt

SEQ ID NO: 40825 - DNA, 2039 bp, Oryza sativa
gggataccagtgacgggttggaagcaaaactcgtcactggtatacctctgacgggttttcctttcggcccgtcacaggtgaggggatacctgtgacggtccgcggccggatggctcaccggtgacgttatcccgtctgacccgtcagaggtaatggtcactagtgaccaaatcgtttgcctgtcacaggtatcccgccgccaaggtaataatattcttggcggttcgaaatagccgccaaggtaattcctgccacccgccaaatcaccgatccgcgcctaatgccacgtcatcgatccacgcctcctcccgcgatctcaatcttaaccgtccattccctccccatccaacagtagattcactaatgagttaaaatactcctatgagttaaattttaactcatgacagttaaataatattttgaagtagtaaatgatttcaactgaaaaagtcatcaacaataaagttgtataactcatcaagatctataacttatattttggtcagttctttatctgacaatgtgatagtaacattttcataaaatttacatatatctcttatagtttatagaactatataagagatatgtacattttatgaacaatgttacaaatcactttgttagatgaagaagtgaccaaaataaaagttatagattttgatgagttataccactttgttattgatgactttttcagttgaaatcatttattagttgaaaatgttgtttgaagtagtcatcatttgaaattcaaattcaaactgttgaaacaaagtcatatagtaaaatgaccaaaccaaaagttgtagatcttgatgcgttttacaactttgttgttgatagttttttcatttgaaaacatttactacccaaaaaattatttgaatttcatatattttaaaattcaaattttttatagtttaatcaaactcggatggaaaaatgaccaaaataaaaatggtagatctcaatgagttctacaactttatttttgacaactttttcacatgagttcatttattatgataaaattcgatttgaattttttcattggtaaaatggcctcatgccacgtcatcgatccgcgcctcctcgcgcgatcccaatcccaaccatccatcttcatccaacggactgaagatcgctgccggttggtctccatgatcgatccgagtgcagtgagaacaaaaaacacctacttattcacctaacaagacaatgcaaggtacgtacactacactggtcaaggtcacctgtgacgggcccaaaccctcacctttgacggttttgggcttggtcaatgatcagtggtcactggtaagtccagtcacctttgacgggtggccggctgtcagtggtgacatccacctctgacgggcaagttaatagaaggccgtcagaggtgttggtctaagctagactagggcttgttaggacccgtcacaggtgtctcatctctgacgagcccctaaataaaggcccgtcagaggtgatgatctccggtatatagtagccgtcacagggtgacccacctgtgatgggcccgaaagtaaaggcccgtcacaggtgggtcacctgtgacggtccgacgtttgcgagtccgtcacaggtgaggttacctgtgacggatgtttcttccgaaccgtcactgatgagttaattccagaaaaaaataaatgctaaatattggctagcctcaggaattgctagccatgccctctgaaaaacagaaacatcacaggtgccagtcaccccccctccaaatggcacttaaatccacattcaagttgcacttaactaacagttgcaaccataggcagcagcatgggcaaacatagacagcaagggcaaacatagacagcagcagttgcacttaaatccacattcaagattcactgcaccaaaatcatgtatataaaatctagcccctacattcatccaaaacatcgacagacaacaaatcacatttaattcatctatacagcagcaccaataatcgaaacaacaaatcacatttcattcatctaaacaatgca

SEQ ID NO: 40826 - DNA, 792 bp, Oryza sativa
gcagcttgcagcgccatatccatgtccccctcctatattccgtcctcacctcaacatcctcctgggagttatctcccagctcagcaggtggccgccctggtctctctctctctatcccttcctcttctggtcatgtcctctctatttcccttgattagttagattgggcatcagctgctgggctggtgccgcagacctcttattacaaagatcacctgtgttcaaattgcgtgttgtagaggatgggaggatgtagccaccaaaattgtgtgttgcggaggattaaaaggtgttgctggcgagctgtacatatatgtatgcaagccggtgtgtgtatatgtatatatgtatatatgtatgtatatgtaatcttgactcatgaaattaatcttgtcatatgtgatttaaattttgctatgagatagatttgaaatattgccttgtgtacacaattatggaactaatcttcgtttattcatgacaaatccatgcgctgcacgtgcctaatcttgcatgccatatgtgattagattttgcttaatttcgaatcttgtctccaaacacgattatatatggaactaatcttcgttagttcacgttatggaactaacccatgcgctgcacgtgcgggcccctagggagttctcaactccctcgatgtgccacgtgatgacataagagcgttttgaggaaactacgtgacagtttgagagcgtttttaggaagtttaatggacttttagtatataatagaagatttggtacctcttggtacctaagggctgcaggaatt

SEQ ID NO: 40827 - DNA, 556 bp, Oryza sativa
acttttatacacacatacatatatatatatatatatatatatatatatatatatatatatatatatatatatatatatatatatatatatgtatgtatgtatgtatgtatgtatgtatgtatgtatgtatgtatgtatgtatgtatgtatgtatgtacaaattcatgcataaatgttaatttgtttaagtttggaaaggaataccctcaaaaaagtttgcaaaggattgagaagatcgctagagtaaaatgcaaacatgagagtgcagcgagattatacaaactatatatggtggtactattgaataaactttttgttgtaattgttaaactcccatgtggaactataaagattgctttgggaaaaaaatgcgaatattaggaaggacctaatatcaaataaatagaagggatgagtcttcgaactcaggccggctagctcaccaccatgtggaactggccggagtacccctgggcttttctctaaagattgctttggttctaaagataaatgcagaaatgtatgaaataagctctttttatgttttctaaagaag

SEQ ID NO: 40828 - DNA, 1046 bp, Oryza sativa
taatatgaagtagaatctcatgaaattttcttttgactttttatctctcctctaattcctgtgtttttcttgtgatccaatcaaacgaccattcttattatttttctgtgttttgcaatgctttatttcagtgccccttttaattggaggaaaaatggaagaaaaacaaagaaattaaaatcgtacactgttcatgcctttaattgctaggaatgagtaaaggaaaaatgtaggaaactttcctattcctatgattctggaggaaaaatataggaaatttaacattcactctaagctaaagttctagctatctcgcttaggatcgagacaaatctagtagctcatggtcacttttctattcaattagtgtagattagatatgtataagtaaataaccaactcaattaactccaataatacagacccatttacggtccaatcaaacactgtgttttccaattctctgttttgcatatgtttcatatcctatttctttgtttttcctattcttacaattttttcgatcatgcatttcaaagggatcctcattattgtcaaaatcctaagtttttccaatcccacgtttcaaaaaggccctaagtttgaagatactagaaaattattatttatagattattctaaaaagtactttaataaaattgaatatttatttatttaaatattataacaaaaaattatagtaatattatcagtgtcaatgataaggcatacctcctatactttggtttatactatacggaaatactatttacctaattatatacggaaaggtaccctttgattagggaaatgcagcacatctagaaggaaattatcttcccgagacagaaagtatcagagtcctagtcgggaaagataaggtctccttaactcgtatgttgtcctatatctccgagttaacttagagaagaaggtgatcatcgctataaacacaaggcctcctcgagaagggaggggcatcgagttacaagctatagtcaaagccacatcaagatataaatccagagaaagccaataccctagtc

SEQ ID NO: 40829 - DNA, 520 bp, Oryza sativa
agtcttgctaggagattacaggaaagctaggtgatctgatttgagcaaattcgcacagttttgccagccatttgttgcattagttagagatccatctgatccatatacgcattacgattaattgtgttacagaacgtatttaaaaatactgatcgatgcatgtgtcctactagtatatatgtacggcaagacaaaagcatgcaggatcatgagttggacaaggagcaggtgaaccgacattatttacctttttctttgcgggtgggccccacgcagcagcctatgttgctcgctgagctgttaaatttacattgtgtgtccaatgccattgttaaacatctacttccttcgtcccaaaataaaacaacttttatacatacatacatatatatatatatatatatatatatatatatatatatatatatatatatatatatatatatatatatatgtgtgtgtgtgtgtgtgtgtgtgtgtgtgtgtgtgtgtgtgtgtgtgtgtgtgtgtgtgtgtgtgt

SEQ ID NO: 40830 - DNA, 547 bp, Oryza sativa
gactttatccttcacaaaatatatctgtttacaatcgaagaaatataggtcagatgcccacaccacaaacacccaatctagtctagagtgccacctgcaaacacaaaatagctacttctgatggctttgcatgtacaaaagacgatgaccatccttccagtagatttctccatccaaagcaagctatcctacatgcagttcttcaacaagatgtgaaacattgctagaattggttcagctatcaaccacatcccacctagaaaagatattacacataataagcacaagaggaatgttacatgatcattttgtaatactgaaagtaaaacaactatacataagaaaaagggtatttgttttttgagtaaatttcataaaactacacgttttgtggtccaagttatagaaaactatacacactttgacacttgacgtttaagtacatatattttggtagtgtatttttacaaatccacactatcaatgaatgtattcacccgtgatatgacatggctgttccacttaggacgaggatgtggcatcctat

SEQ ID NO: 40831 - DNA, 1073 bp, Oryza sativa
gatcccttgcgttagttagatggtatttgttgctttataatactacaaactcaggcctcgcaaatagaaagtccggtatgtgggagagagaagttacatatatataatatactatatatactaatcaataatggatgcgacgaagactatttatctgcaagattcttggtgcctttgaggccactactactaggtgactgccaatagtaacatgttagttgagagggacttaagattccagcgtgagctacacctgtttatcttcaatagagggcatgtttagttgttgaaataaaaaattttggatttcacatcggacgtttgaccggatgtcagaaggggtttttggacacgaataaaaaaactaatttcacaactcgcctgtaaaccgtgagatgaatcttttgagcctaattaattcatcattagcacatgtggtttactgtagcacttatggctaattatggtctaataagactcaaaagattcgtctcgcgatttacatgcaaactgtgtaattagtttttctttttatctatatttgatgcttcatatatgtgtccaaagattcgatgtgatttttttggaaaaaattttggggaacaaacagggcctgattttagaaccatgggattggactggacctcgtcgctgctatattttataacaacatcgatatttctagtgctcccatgcttacatcttttcgtgattctctagatttgtcctttagtttctctctaccgacagcgtctatatattcagtcacaaattcaatggtatacttgatggtaatgttccctgcttttaccaagttttatttaggcccctttggttagaatgaaaaacatactcactcagtcccaaaatataagaatttaatattggatgaaacgtttcgtagtatgtatcttagatggacttcctatccagttctatattcttatattctgagacggagacagtagcaattttataggatggcactttagaacaaaggatcagacacattagaatcctattcaattcctatagaataactcaatccatacaagatttgaagtaaatttaac

SEQ ID NO: 40832 - DNA, 662 bp, Oryza sativa
cctgcagcccatcgccattgatggactgatgacttgattgtcagctagcttgttggtggatttgagtggcctcgatgctagcttgttatatggaatggaatggatggctgtgcttagcttggtccaagctagtgaaggtgaagctgcagccatggttgaccaaggtagctagtgcatgggcctgcctcgtcgattttttggctgcgacaacgcaggctcatgcacaaactgacgaaccatttcatttcgacccattggatgcatgctgaaattaatcagagatgcacatgtgtcatcttctagatccctcactcattttggtctccatcgacatacatggtcaactagcaaattaattaagtttttttttaagaaagagagtaactagtagagcaaattatgcattgccaagtaagtatatccttatctcaaatagtttggctactatatatacatctagagtatatatgtttggtcaaacattttagacttcagttgctagcgtgaatatataaaactaattttctcttcaaaaagatgtacatttattgttgcagtagtatatctctgacgacctcttctctagcaacaagatctctaggtaattaacacttgtacacattcaactcgaccaaccaggtctgcatttctagaggaactat

SEQ ID NO: 40833 - DNA, 695 bp, Oryza sativa
attcctgcagccctggttgtttttgtgatgtgtcaacttaccaaaattcatttattttgtagaacaaatttaatactagtggctcattaacagagtttgaatgattgttgtttagtatagggaattgtttacctcctagttcactgacctttcagcatatggctgacctgcatgttagtttacatatacttgctttatgggctttcattgcttattttctgagattaattgataatgattatgactcttctgatttatgccatcttgaatgccatttacatatttttactattgatattacagtgtttttctttataattattgttctaattcattgtaaatttaatatgtcactgcactattatgaattatgagttgtctattttcattttatgaaatcaatgacattgaagaaaaaatatgtactgaaattttcagatatcttttgtttggtatttttcaactgccattgattgatatgatttttatgaattgtaaaatttttgatgtcagacatcatttgagatgttttatgattttattttcttttttttgtagatttgactatggtatttttactctcaagttcacggaggtttggggccctagagtgctgcttccaaatatcttttcgcaaagagatattcctaatatcagaatacagttaaacctttccaaaaccccaaaaaaaaaaa

SEQ ID NO: 40834 - DNA, 679 bp, Oryza sativa
gtaaggagttcatactatttgcatgtcgaagcttaaaggttatggtcatacatattttcgttaactacggatgaagatttacaaatagacttcaataattgtttactccttatgtgttggttttgtttcgatgttgtcggattgttatgctctcttgagagaattttgtattaagcggttgtagcttcttttgaagtaaatgccgaaatttttttatattatctgaaaaaaaaaattcctccagcgaaaagtctcacagacaattgtttcccacccaattggcgttgcgcgtactcaatcggattactcacattggttcccgagttggattggtagcgatccacctaggggctgtctttcgaatgaaacataaatacgagggctatttctgagaaaaggccgcacaaacttggaaatacacgttgaccaagttcacttgcctgtaataactctttttagatataatatataatattttcttacataggtttgtatataatctctcatatttctcaaactagaggtgaaaaagtcattttaagtcactctcgctgacatgacactctaaataggaaaaaagctatctctcccatggtgtttccgtaataaaaaaattagaagagtggtatctcgatagtgccactcgtaagagtggcaaatagttaaaaaaaacccatat

SEQ ID NO: 40835 - DNA, 586 bp, Oryza sativa
ccgatcaccctaggagcagctacgatcaggttgtttttttctcacatgttaacatcacttatcttcttagttctatgatcttgcagtaattcttcttaacttctcttttcctgtagaggtttgaagcagtgaacctattattggctttgatcctgctattcacttcatataaggtggatcgatcaatgcttcttttcttctattctccttttggtgtactaagttactttaccatgtttgaaatggacatatatgatgctattattgctcacccaatacttccttttatgagaatgacaagttctcactgtcattttacaaaaatctacctgttttatttcctgtgaaatttcagtcccatcactgtctctaacaacaatatactctaatactcaaccaatcctggactccaggtgcatgtattacattattaaaaaagtatttggcatataccttccatcagtcaatggctaacagcatgatgacttgcatcttttggggattcttgtttgttccagctatcttgttatagttcaacctagtccttccatcatttagtgagcactaagttgtcacacttcaaaaa

SEQ ID NO: 40836 - DNA, 647 bp, Oryza sativa
ctctcatctgcaattacatcacttgacactgcttgttaccaagtgctaaagctagctagatgaggttgatgcaattagcctctgagaaaagtgtagcatcacaaacgtacgcgtgcttaattaatgcagtctttgtttaaaacgaaaaacaaaactaatataatgttcgaatacttagaagtcagttgtattttataattgcaaattaacaactctgagagatatgtgtcacaatcggcaccgtcaccaggacaaacaagtttgcaaatatcactactgattaatggactaatattatattggctggtcgtttgtacagtaatgaaggaattgttggtgattgatgaggtgtttcttttctgctaaagataaaaataaagttaagacatggtgaaaacaattattacttaattaattaagttgtaattattacaagttcaaaattttaatttgtctaatattttagagtaatttttacgtagaaaacttttatacaaaagacactatgggctggttggtttgaggcctaaattaagcttaccaatatttgtcaatttcaatagtgtttagtgtctatttggtttgaagccaaattttgacatgcctaagaaaataggccattttaatagtgaacttagactattttg

SEQ ID NO: 40837 - DNA, 2355 bp, Oryza sativa
ttgggaggaagaggagaggaaggagtagaagcctcctctctctcctctttatttcatttcaaggcagcatttttattttaaaaaatgtaatatagtacttattagtagtgaaattaataatttgtgcccaattagttgttttgatacttactacatctgtcctaaaataattataattctagattgtttagtaatatatattaaggtttgagaggatgtgtatttgtgtgtaaaataagaagaaattcgaataaaaaatgatcaatgaaatcatcagtattctaaaattctataaatataattattatgggacatagacagtattttgacacatttttaataagaagaatagtagtagtagtaggtgaaattaaatactgttttggctagacagtctgacccaattaagttctttgttatcaaaggacttaattatgccaatcgattttgctttcctcactggaacagtgcaccgaaacaaccggctaactctgactgacaggtgggtccaactcaaagttgagcttggagaccccacatctcagtgacattgtgtctgagaagaatctaccaggaatttggcgggcttaacgcaggaccaaaacgtgtgctaagaatagtagttgagcttaagaaattcataatccatgtgcaacctttggggctacttataagctagacttaattaccaacacgcaataatgttgcctcgccattagtttgcaaattttgttgactcggcaaatgttggtttggctatgattattaatttttgttggtgttgttgtgatgaacaggacatatgatgtagagattgaaaagcaaaaggctattatttctagagccagaggtcgctgtcccccaaaattaagtttgatttcattttctctttacgtgtccaaatgggctaattagcaatcccttgttggcatcatctaggttttttatataaagttccaatctacctgttcccaaatacggcaagacaagacaatttctcttttatttagatttcggaacacggctaataatttaatactgtatcttgctggattttatgaatatataatatagtacttatcttgatgtatgcatcaccacgagagaaatgcatggaagaaatgcgatgctcttgagatctacatcatataattgagatgtcactgtcttacaattggcctactagcatgaagctacaggtttttctttgacaataacagctgcaagatgctgactcagcaaatataggctggttacttttttaataatggaacttattgtggactttacttaaaaaattacaaccagttgttagaaaggttccaggacaaatgactgtttgagttataaaattatagcttgaaaagaaaagtgaaaactaccttgacaccaatgtaagaagagatatgttcgtctatgattgatcggagtatgtataaccgttgtttctcctaataggttataaaaatattgtttattttagaacttataagagtattgcatgtattaattacatgtcttcctcaaactaacaaagcagattttttgaaatcaattattgatctttttatcgattgaattttgctcccatcaccgctggcgacagactcagtaaatatagggtggttgtaattagtaatgtaaattataaataaatattatatatattcgggagagtatgtcgccgaccaattccacgtgtccaagctgtttcgttcttatccaataggcttgcgttttgctagcttgtggtctaaattaatcaggcagttggtgattagccaaagctcgggctaatatgaactttgacaatatgaataactaattaagtggccaggatgccaacacgtacgccaacttgatcttaacgcgtcatgcgagtatatatatgcagctctctatatacacagtaaaatcacatgcaagcatgtcttgccactaaggacactttactgcctttagtacttaattaattattaattaaacttttatttactcaacacttgctagctaatcattgggggtttaattggcagggcaatactactgccactgggtggttatttttcatctactgcttgtctgcacttgttctatccaagtacagagatcacagaacagaagatcatattagattaaaaacagaagatcagagctctgcaaaactaattatctggtctaagaacctgtaagattcttctattgtaaactactagtcattggttacttctgaaaaggtttgtctgcatgagaagcaacattttatactagtactactatataggagtatcatactatgttcttcaggatgagagccttgcaaaattggcctcaattatctccattccagaagca

SEQ ID NO: 40838 - DNA, 1200 bp, Oryza sativa
ttcctgtttgcaacgagcaggcaatttttctagtaatgatagaatatcagaacagaaatagagaaaaacataagtcaacccggactaaacctcagcatcagatccaaaacccaaccaccggatggatagacgagtgagtagtgaacaaaccacgcttggcatgaacacttgaaatttaaaataaaacctaaactttttcggcggaagaaccgcagatccaatcgtaaccggacccatgcaacacacaccgacagaaacaaaaaaaaaatctaaataatcttccactccatttccggagcataatcccccagatctaagcacctaaccacacatcattcagatcggatcccatcaactcggaacaaagactctcgatcaatcaatccatccatgcatccaatcaagacgacgaacaggatcgcaacgcgaatggacacggatcgacgcacgaacgcaaaaaagaggagaggaagagaggcggcggtgcggggcttaccgtgggagagggggaggaagcgagcagcggcgatggaagagaggaggaggaggaggacggacgggagggagaaggggtttgggagggcttatttataagagaggatatatatgctttgctttttttttcttggttttttgtgatgtgtgagagtgtgcttttggatggtgggggttgggggttggtgagatcgatctggtggtgcacggttttttagatgaaaagtttcatctttttcatggagtaatatattgttactgtgttgtaacggaattttaattaaaatttgttattaaactattattatcgttagtttttacctatataattcttatttctatatatatttattaccgacatataagctctttggtccatgtgaaacttctgaccccgcatgtcattttactttctacagggaagggagttggtggtgggagtggtggcacatttaccagtttatcgctcaccaccgccactactcccttttaaaatgagtatagatattttgggattgtttcttcctttatgtcttgtgttgtttggtatgattatttatgttttcttttatatgtatttctagcttcacgaatttttatagatttagatttgtgattacattaatagattttgaataacatttagaaacttgaaaataatatcgagttgtgccaaacagggcattagactagggctgcaggaat

SEQ ID NO: 40839 - DNA, 1422 bp, Oryza sativa
tatacatatatacacatatatacatatatatatatatatatacatatatatatatatacatatatatatatatacatatatatgtacatatatatatatatatacatatgtatatatatacatatatatatatacatatatatatatacatatatatacacacacacacacatatatatatatatagtaaataaacatgagaaatatgtatttattgaaaatagtcaatattgtgtacgcggctgtgagaaggaaaggaaatatcacataatttcaaaaataatgatagtagttacagagatgaaagaaacaatatattgtaacatacccaaattctagaccttaaaaatttcctgacaaaatagctggaagctaaattttccatttttgagagccaaaaataaaatcaattttaacctaggcgtggtcaatctaacttgaacctaaccaaaatttgaggacatattaaaaccttttacatgtctaacctatatcatagatgcaaacacaagtgaaagcatgcaaacttgcataaaacgtattttgacttgagtccttcttatgcatttggattttcaattcacatttcataataggtcccatgaataataactaaaatctagacaaacaactaaaccattagggcctagtgctaattattggaaaataatacatagaaaccataatacaccttaaaatataccaacaaggccaatgtcaagccccgcaaaactaatttggtcatccatctgaagacaagtcatgatcatggaagtaaactaataaattaactcatatagggtatattctatcttaatcatttttataagtatcctcttaatttaatactaaagtaaacttatacataaataggtaagaagcttgtgacatgtgtaagtaacatatcaacatcatttcaggttaagaagagtccaaatataatttttataaatatttacatgcatttaggaaagggaaacacatataagagataagtcttactaattatctaaaataatttgtgcaagataaaatcacgggaaaattcttgtaggctattctcactacattcaactcactgtaattttggtataatttaataactacatttgatacctcaaataaatcagacaaaccagtcaaaaactagattaactatagttcttaataggctaaaacaatagctaactaaaatatgcattaaactgcatagaagtatatagaggaaatagtttattcaaatactaggacatttatgatgagtaaatataaattttctataatttatcttctctgtttagttctcctaaaaattcaaactatttttcaaagagctcatcttctcataatttctgtaagtaatctatccataatttttaagtgcaaccaaagaaaatggaaactaggtagggctgcaggaat

SEQ ID NO: 40840 - DNA, 616 bp, Oryza sativa
ctaccgcccccgggacagtggagacccccctaagcccccactaaatttttttccatagatccataggatgtggggactggaggttcgatttatgctgatgtagtttattcagcccccactactattttttttctagatccgccactgcgtagttgcattgtttcagctgttttgattggcgcgtacgtgcgaatgcggccggtctccaggtatacgtagcatgcaagcggtggtggatctagaattaatttttcttgagagcctggtcaaagcctaagcgaatgggctagataaatattatctttatcaagaatagataatgggtgttggagagctgtgtgtagctttggccttatgctcatgacagcaaaaacgttggtgtgaaagaaacagattaagcagcggtattaagtggtaattcactgactagctaatatggcgatggcggagcccaggcacctgccctagctccgccactgaatgcatgtgttgtcctctggtggtccatcagtccatgtgggtccatccaagctacaactactttgtaaagtgaaaatataaaatgcaaatcacgtatataatggaaacttgaaaactaccgttggatcgagaaatg

SEQ ID NO: 40841 - DNA, 622 bp, Oryza sativa
aagaattcaagagcatttgatcaatttaaagtgatctgatgaacttttgtttggagtcataagaaataatcactgatttataattttatattctcattagttccgaaactcattagtctcattcaaatttcactcggttgtaaggtcgtactccctccatccatatttcattttctgattttttttttcaactaggatgggcatatttgcattcttcatacatctaagacttaaatgtcctagaacctgggcaaccatattattacttattggttgcatgtatccatacaatttttttttgtctctacacagaatgaattgatttgtccttggtttcgctgaaaaaagtaatatgccttggagggtatttgttttttttttaatttcatcgccgcattagaattccatgtgcacttgtgttttggttgtaatgagtgaatttctttttaatcttcattttgtatggaaataaaatgaggtttaatttcttctttgttttagtgatttatttattgttagttgtattattagttgaatgcaataatatgttgtatttttctttttcatttcgagctagaatggaaataaaatgaagctggataactttaattcaccactaaat

SEQ ID NO: 40842 - DNA, 740 bp, Oryza sativa
ctttttaactgtaccatatctcccaaaccgatctcgcacgcaagggaggcgagatgtcggctctatttttgttctgccgatcgcgtgagggaaccagcagctagctagtagggctgaagccaatcacagctaggttaatttccttgctcaacaagatcaataagtggtgttcatcaaacttcgctcttcatctcgtctcccgcatttgcaagcaacataatttgtgtagtagcagaaggggtattcaattattttatcttcatctcttcctttgaggcagttacatcttgcctgtatgatttctatttccaagaggcaacaaattaagtatacgcgcccaactaataatacgtacgtgcgtacgttaatggaagccagaacagatcgattaatttgcacgtacgagcgagttgttcacacagatggaacggtaaatgatatacatgcatatatatttttggagatatatatatacatgcatattggtagcaacaaaaattaagagtgagacatttttagcgaaacagaggctcatgtcatgttctatcttgtacagctattctattcattgttgcgttcaacacgtatgcgtacaaatacatgcatgatcagtttagcattattcgtatgacccgcatatttggtgcgtgcggaatattaatttttactatctaatccaacaattcaaatatatatgtccgaaccaggttgcgtttttttttttttgggtgggggggggg

SEQ ID NO: 40843 - DNA, 656 bp, Oryza sativa
tatatatgtatatatatatatgtatatatatgtatatatatgtatatatatatatatatatatgtatatatatatatatgtatatatgtatatatatatatgtatatatatatatatatatatatatatgttacttcgcatttatcctaatacattttttttatcttgcagaaaagacgtgttgtcggagtcgtccgtcaagcctgagtggaagagctagccctagaaggaattggagcaggcaagtgacgtaataatataaatgattgttatatttataatgcaattaattaagattattagacctgtaattagacttatcatataagattgtgtagtgttctaatattatttgagttttaatataagattattttattgcaaattagacttagtatgacattattgactacggaattggtgcgactcctagcaattgactattgtagtcttaattagacttagcatatacgcacgaaacacttagcatacattactattttagtcttagcatgtaatattatttgagttttaatataatattactttatttgtaattagacttggtatgtaattattgactacggaattggtgcgacaagtagcaattgactattgtagtcttaattagacttagcatatacgcacgaaacact

SEQ ID NO: 40844 - DNA, 759 bp, Oryza sativa
gaaccccagagtccgcacatcctcaaatacaaagcacgttccctagttagatgtaggttagacttcccgttcgagaaactctaccttctacctgccctcaatttatgcacgattaatgaatgccacctgggtggaagcgagaggtggaaatggaaggtcttagttcggaggtgggatctctacctgatagttgcattgccattcatgatgatcccctggcattcgtccattcagccattcaccattcacccattcaactggaattttggttgaatgccggaattgtgtccacaaattgtggatggatagttggttggctggctggatggctggctggatggctggctggatggatggtgaatggctggcggcggttcggttgctttgaagcatttgttgctatctaaattccatttaaggtcgtaccttatcgcccaccatcatcttattctctatttgtattccctccatctttcagatacggatgtagccttggatgtgcccgtgcccaatgaagaggaagagcgcaacatgaaacgtaagtacaaaagtaccggacacccacccagatcccaatagaatccgccaaatcctgcgggaaattgtaatcccattcaccagctcctacatttaattaacaagagaactattgtatttatctaacacctggattatctccacctttcatttgatccctatttatagattacgctgcgttgctaacgggccgcacctcctatttcctcaagggtgaggaaa

SEQ ID NO: 40845 - DNA, 532 bp, Oryza sativa
ttcctttgtcttgtgcctttgggccttgtcttgataggattagggtcggtaacaagagggagcagttgattacaagccctgatggcagattggcagaggagccttttttttttctgtcaatggaagattacaaagcaggatcaccaaattaatgggagtaaagaaatgttctgatcagatcgtggttgacgtcatgcgttgtttgttttgtttgtccgtagcttgttcaaagattcctcggatcatgcgatcgccaagagtaaatttagtactgctactctccaagttggtgtgctgaaagtttcagaaaatattttcaggaatcagcgaactgcctcttgatgatgcccaagagataggcatggcatctctggatggttcagtatactagttcattttggtgtgataattgttttctaaattcggcaaatcaatgatggtttaggaaacacgttagccaaatgctccgaactaaacttctgtctactgattgagctcgtcagatcagcagacaatacacagttggtgtatt

SEQ ID NO: 40846 - DNA, 2089 bp, Oryza sativa
ccgggactaaagatggatctttagtcccggttgtttataccaaccggaactaaaaataattggggcctgacacgacctgacaacctcttcaaccgggagtaaaaatgatctttagtcccggttggtgttaccaaccgggactaaagatcaaaaaatacccctaagtttttaaaccgggactaaagatgctttttagtcccggtttttattggaaccgggactattgtggaattgggccgaccgaccaaagatggtttctccactagtgtcagcataattgttatattgttaaaagacaggtaaaaaagtagcaaatagttttattactatatagacctagaaatcctcacataattggagaaaaaagtttgcatagttagttcgtatatagttagtctagattatagtgtgtagatttattgttcgtatacacaatataattatatttaattgagaaaacaaaagcgatagttttatatcaaatacaatattattttttatataaacaaaagctagaaaaagttgtatatgttctacttttaagatctttgctccgcgtaaaactgtcataggaaataattgtatactgctatagtgaaaaatcgttttgcgctctgtctatctctctataaatatattaatttgttattactgctctgtagtgctccctccatttcaaaatatttgacaccattgactttttaatacgtgtttgaccattcatcttattcaaaatatttaagtaattatttattcttttcatatcatttgattcattgttaaatatactttcatgtacatataaagttttacatatttcatattttttttaaataagatgaacagtcaaacatgtgctaaaaagtcaacgctatcaaacattttgaaacggagggagtatgatattaatagctaatatagctagcctctgaacaaagaaaagatgcttaggcttacagtgcgatcggtcgagcaagcttaattaagcttgcggggtaggactccagagcccagacgtgtacgagctggggtagcttaattagcttattaggcaaagcgaaccgaatacagaaatgatcgatgtgtagttgcacgccgcgcggttcttaatttatagctgcaacgaagcagtacttgaccagtagggtacgtatggtatttactgcgtgcattttccatcctgcgatcttatactgcatgcacgtccttttttgcggacgtgaggcggttaattaatttctttttctgaaacagcgctactaattttattgatcgacattaattaactgtaagatctagaagactataatgtgtgaagcgagcgacgaggtatatataagatcagtggcggatgcaggatttcgaaggtgggtattcaaaaatttacagcttgcattgattaattattgattcatttacatatggaaagctacaacttagtattgattctgatatgcgtacatccaaacttgcagaaaggactaggagcttggccacttgtttatgatctgttaattactatataattataacctagtaggaaaacctaagctcctggttcctgcagtatacgtacatataaattaaagttgacttaattggttttgacatataaagttattgatcccgggcggccggccagttccgacgatgacaaggactttactgttaggcattagcaacttgtgaatactcctacatatataccagcagttgaaaacggtgggttttcactgcggcttcgtgtcctgtttcccatctatgccatcagaactcattcatccagcgtccaatgatttgacaaattttgtcctggaccgaatttttttaactattcggtgacaacgtgcattcacacggatatttgtattattttgcacatattcatgtaaattttgttttcatatgcttaagagaataagacaatttaattgtattaataattacatattttagtaattacattttcaaacttaaagattgaatccactaatttatggtcactcatatttgataattttgactataatttagctacgaaaggacgggccacgccaccactattcaccatttgaggatccagaacaaa

SEQ ID NO: 40847 - DNA, 4779 bp, Oryza sativa
  unsure (1)..(4779): unsure at all n locations
ccaaccgggactaaagatagatctttactcccggttatttcacccgggactaaagatagcgatctttagtcccggattggtactcccggtttggaaaccgggactaaagggggttacgaaccgggactacaaagggtttctccaccagtgtgatgggcatatgccgaggtggcaaacgatggaccggttagcatgatgttgccctgttttaggagaaaaaaataatccaattgaaactagtatagacattatttgaaagcgagaattttacaagattttcataaaaatatatcgaatcccacaaaaataattttaagagtgaaaatttcagagtggactccttattgaagttccatgttacacccccttcagcccatttttttttgcttttttaatacatttttcactttggactcctttttccctcatccttaagattacttatttttttcacgaacactcatcctcaagattactctccgtgtaccaccgtaaactgcaccctggtcaagctcatctcgattatgccgttgcattgatgtcctttgtatacccaaagtggcagggtattcaggataatgggactaaagtgaatcaagaagatgtttaaaaagggtgtccaaagtgaaaatatgttaaaccaaaacgaaacttgggttaaaaactaaaagtaatctattgctttcttgattaatatgcatgcatgaatgctagttgcaaatacgatttcataaattttgagtttttcatttgcactataataagaaaacaaacaatttatatgcagcaccaataatgagtggtctgaaacatatcatggagctacacaaatcctgaattgctcattcgccttcactagtcatccgatttgtggattaattgtcttgggtttagactctgttttactccatttatgtacagttttggctattatagatatatatttcagaattgaaagtatagaacaaattaaggttgtgtttagttcgtgtgacaatttttttaagtatacgtacacacatttgaagtattaaacatagactaataacaaaacaaattacagatctgtaaactgctagacgaatttgttaagcctaattaatccgtcattagcaaatattcactgtagcatcacattatcaaatcatggcgtaattaggctcaaaagatttatcttacaatttacatgtaaactgtgcaatcggtttttttcatccacacttaatgtttcatgcatgtgttcaaatatttaatgtgatggaaaagttagaattttgacgaaaaaaaattaaatctaaacacggccctaagtgtgatggtttatgcatgaaagctggtttctgaatcagattacctagctggtttctgggtgtagtggcaggtcggtggtaggtggagtcgtcagtacggctgcggctatagatgacgtcgttgtagaagctgatggtgccgcagggcggcggcgtccggcaggcgcacggcgaagatctccgccatgtggcgagtggagcagttggtcgtacgcggccagatcgtcggcggtcggggcgtcaccgtaccccgtcgccgccgccatcaatgaatccagacgcaaacggaaggaatccaaaaatcaaaaccagcaagcaaagtgcaaagaggaggaagcttgatggaatcttgtggagtacctaccaccttcctattccgaagaaggggaactagagtgactactcgaccgtggatgtctggatgtcgggcgagttcacaaggggtgtggccagcccatctcaacccaattaaggcccagccttcttacacaaagtacggtggtgtgaatcgaaaaggaataagttcactttgactcccttaaattaggggccgaatgtaatttgtatccctgcattacaataccagatatcttgacccccataactattaaaacatgtgtaattttacttccttgatggttttgaaaggcggtctcgttggcgttgcgcctacgtgacagtgttgacctgatcatctcacgtggcatttgacatgacgcttgagctaatatggcatactctctccttcccttcttccttctccctcccccccctctctctctcccttatctctctttctctttctctcccctttctattcaccttcatccttcccaagggagcgggcgttggagcggcggtggcggtgatgggcgggaggacgttggagtggcaacagtggatcgcctccagctcaaatgtcatgtcagatgccacatgtgacgaggactaggtcaacaccgccatgtagacgccacaccagcgaaaaccgccctccaaaaccaccgagagagtaaaattgcattggttttaatagtttcagggtcaagttatccggtattgtgagtcagggatatgaatcaaattcggctactaattaagggagtcaaagtaaaactattccaatagaaaatacgtccactgtccttttcttttgtttgattagaagaagtgcccatgcgttatacaccggataaaccaaaattacaacaaacattaggtagttagagtttaatattcgtcatgttcatctgtcaggcaacttctttagaataggatatttcttatctgctagttacaacttcagctgaggttttgcaaaaaggaaaaaaaatcccgcgtactaaaataggtccagtgacatatataatattcatttgctacacattttcattcacttcccgttccaatatcatagaattgtacaccataatcttggcatgtggaatgcaatcaggaaggaaagagaagatgaaaaagtcttgaagagagagcatgttctttttttttttgaaaactcataaatttatttatttttaagagtattaccgacagagctgaagagaaatatcatctccaatacatcaccaaaaaagataaaatatacacaacgaaaccatccattcagaagataaagccaattgaactaagaaaaacttcctccaaaataatccaaacagcagtaatgaatgagatcgacaaggactgcggcattgccacgacgactacgtgagcatgttcatcaaaaggttaagcaagatgcgcggtagtgtgaaaaaagagagagcaattgttcaatgatagagggagacgatgagacatgctaaaatcctaggtaagttgagaggagaggacgagggaaacaaaatcagaatcaaaccccaacacatacatactacgaatgttattccattatccaaaaataaagtaccccatgtaactgtatagctaccaaagcaagattaagcctggtatagatcacaccatggacttacgtacgtacgtagtacgtagaattgattagcacctacagaaattagtacgatcaaacacggaccaaacagacggcacggaaacaaggatacgtgatgagaatataagtcgctcatgacccagaagcccaaagtttacaaactcatcgtcgtcttttaccccttttcttatcggtttatcttatttctgctgtaagcctaagttagtatctaaattgacggtctgataatctacaacacaatactaatctggtatgtccatcttatttgcttgggcctcacaaacatattctttgttacgctagtccctttgtttttttctgtgcaatgtctaagaataagaccatataattaacgcttgtatattgacgaacaggagtttttccattgtaaatgagtacggagcaatcaacgaattccggcgaaatagaagatctacgtgaccaaattttcctgctcatcagactttctctgttcttctttgcaaaatatgttatcataaactttactttgcaatttttttaatatatatatatgcatatgggccgagcaatacaaggtaaatccatccatatatgtgggaccaaacttacagctcttactaaacactggagaagtgtttcatcgtacaactatcgtacaaaacatatcgtacgtatagcagccctcgtttatcatcatggaccataagaacaagtttaatagttacccatatgttagctattgacgcatcatctataacaaatctaatagtttaacacattcaatagtttcatttaacatcattagtacttggttcatttatcacgcacaattttttggagctagtgctacaacatctagattcgtgggtcctatctagaatcgtagtactagtttacattccatccagtactagtttacggttagctaccaagaaatctgaatatccctgactctctagacttggcggtcggtcaacggaataatttaccttgacggctatcaggctatacttcgaccgcgaaggacatgctgttttgttttcttgcagtgaatttaaggttttggaggaggaaaggtttactattacacatgttaatagtaatgatgcatgtgtttgaaccgagaaaatgtgcgagggtcgacatgtgaagtttctctttggaatatggtaagaaatgataaagcaatggtgtggttgtacactgttacaaagaaatactgtcctgaaataagaatctaaagtacgtatccactatcaaagcgacgattttataccgtcctcaaataaaagctaattttaacgtgtcttgtacagttgtacgtagcaaattctctcaagggttgtttagnttgatgacatattttgtcacagttgtgattgtaaattgcatggtttgaaaatatatcattactatttacttatttataaccatatcatcccactatatctaaaattgatccccactactatgacccaccacctatcaattact

SEQ ID NO: 40848 - DNA, 618 bp, Oryza sativa
atatatatatatattcttgtctaattacttatttcagactcaggatactattttagcctaggaaattattttcctaaggatttgtttggttaattcctcctcataggaatggaagtctatgcggagagacgtgaaatcaaacgtcccttcccctaaaaataaattccttcctgtaggaatttactgaacaagccctaagggatgcccatgaaagaattatccatgagtcatatcaaataactcacattgtattaactatataaccaggttaaattattatctagtgtaaatgttactccctccgtcccgtcccaaaatataagcatttttagcatagtgtgaaatcaaacatttttaacattaactattagtagaaaaaaaattaaaaagaacaataatgtaaaattaatgttactagatttatcattaaacaaactatcataatatacaactcttttttatttaaaacatcttactttcatagattttgttggtcaaaatagtatctcaaagaccatgtcgaagtctaaaatgcttatattttgggacaaatggagtactaattaaacaagacccacgagactatgatgcatatgctagctagttgatcataggaac

SEQ ID NO: 40849 - DNA, 760 bp, Oryza sativa
gaatgattaaatcgatctgcatacgaatacctgagacccaaattagaactgccaaactcatgtcttccagtgcttatttttgagtttcatatcataattataaaagtgtattaacccttgaaagatccattatgacccacgaaaacaagaagcataaggtagaatggtaaactgcaagattaactgcacatattgtatactgaaacaaagaaaaattagttgtgtgccatctacagattttcgttgttttgcttaatctacagatcagttaggaggcaattctaatgcggaatatggaaaagcactaatccattcatttccacataattatgttaatcacttatagaaaattgtgcatgtgattattacatgctatccacctaacaaaacaagtgtattgatctcgagtaactagagaataaattgcaagatttgaccatctaatgaaatagtttattttgggtctagctcaaagaggtaattcctaacaagtactagtaataagataggcagtgtgccgaaacattatattccccataggagaatgcataccatcggtatcttgtctattaaatgatattcttcctcaaaatccttcaaatgaaccctctctggcactgtcaagcagtttaaaaaatgaatacatcgctttgcagtatgttcctgtatacaaaaaccttcaagtgaggttctcacatattttcctggagatgtatggaaaatgtttaaattgacggactattataaactcatgttttct

SEQ ID NO: 40850 - DNA, 967 bp, Oryza sativa
cgccgtcgccacgccgccgccgtcgccacgccgccgtcgccacgccgtcgccacgccgccgccgtcgccacgcgtcgccacgccgccgccgtctccacgtcgtcgccacgccgccgcgccaaccgccgccccgatgccgccacaccgccgttaacgaacgagaacgagaacgatcgaacgaacgagagcgagaacgaacacgtcaacgtacgttgccgcgagaacgtgaacgagaacgagaacgatcgaacgaacgagagcgagaacgaacacgtcaacgtacgttgccgtgagaacgtgaacgagaacgagaacaagaacgatcgaacgaacgagagcgagaacgaacacgtcaacgtacgttgccgcgagaacgtgaacgagaacgagaacgagaacgatcgaacgaacgagagcgataacgagaacgatcgaacgaagacaagtgagaacgagggaacgaacgtgaatgagaacaagcgaacgaacgtgaacgagaacgagcgaacgaacgaggacgaacgttaacgtgaaatgcaatatatatatatatatatgtatatatatatatgtatgtatgtatatgttacttcgcatttatcctaatacatctttttgtatcttgcagaaaagacgtgttgtcggagtcgtccgtcaagcctgagtggaagagctagccctagaaggaattggagcaggcaagtgacgtagtaatataaatgattgttatatttgtaatgcaattaattaagattattagacctgtaattagacttatcatataagattgtgtagtgttctaatattatttgtgttttaatataagattactttatttgtaattagacttagtatgtaattattgactacggaagtggtgcgacaagtagcaattgactattgtagtcttaattagacttagcatatacgcacgaaacacttagcatacatgactattttagtctta

SEQ ID NO: 40851 - DNA, 1070 bp, Oryza sativa
ctaaataaatatttttcttcaaaattttgtattttttattccgatatattttttttataaattatattcctacttgaacttttataattgtttttatattttttgaatttttttatttttattcagaattttaattaatctcatcgtgggttctagatggtctcttctttcaatagtctttatttttctattagcaattatttatttataaattgtattcctagttaaaatgttatttttctttttctaatttcaatttgttttttatttcgaattttacttgatctcgtactgtgttttatacggactattatttttatatttcttattttcttttccactttatgttgtttcaaaatggtattcctacttgaactctacttttaatttttctaatttcagattttattttattttttattctgaattctaattaatctcgtattggtttcttctatggactcttctttcaatgttggttatttataattctgaattaccgttatttttaaattatattcgtacatgaactcttcgttatttttttctaatttcgtattttagttatttttttattccgaattttaattaatttcatattgggttaattattatctggactcttattttaaattccaaatctaagttatttttaaattttatttctactttaacttttttcatttttctaatttcttattttattttatttttattctgaattttaattaatcttgtattgggttcttatatggactcttctttcaatattgcttatttttaattccaaatttcaattatttttaaattgtattcatacttggattcttctttcatttttctctgattaatgtggaaatttttagcccccaagtgaacgtgatacctcctttcaaagctattataataatataatagataaatatcattactattcgcgatatcggttagatgccactgaaatttttcaaaattgaaaccgtgccatcacagtcacattttaaatccttccgacttcttccttcttccttattttttcctttccagccttctcttcgtctcttttcctc

SEQ ID NO: 40852 - DNA, 1374 bp, Oryza sativa
agcttgatgattcataggggccatggtgtcaaaaccgggttacctaactagggaaaaactgttcctaagctcttccaaagcgtggcaagctggacagcttttatcgaagcggaccccccgcccatagcaaatgtttgttgtcatatttcaatctagggggctgcggcataacctgggtgtggagacatgaatgagtcgaaccctattcatcatgacgtaatgtcaaagaagtggctcagcgaggggctttatgctgattcaaggccgaaggacaaagctcttcctcttcgtgcttgtcctaaataatgatattcactgaggtgtgctggctctgcttcaatctgttttcttgctccatgccaatcgaagatgaaccattcaccgagccgagtatgtgcaagacaagacacgactagataagtcaaatagaagatattgcttttacacgagcaactcttaccttcatgtaggtacagcccacttttcctttgatgaaatgcgaacacaaacttcaggcatcgaagaaagaagtcaagatcgaaatcaaagcattgtcattgggttgaagatcaattcatatcgacaagactttccattcatctttttgttgatatttggattccgttttcaaataaagtcatcttctagttttaaatcacctttagaatcatcagcctctgtccctacactgactcacttatccgggatcgatcctcactacggtcctttatttcgaaacgaggatagggcttgtgaagattatggataccccatatctacacggcgattatatttagactggatataggataccgaatatagatagaatatctttatttgtatctcgggtttgtttcttaacttgtacgtcaaggaaataccctgagacttagtcggttacgattgtattttatctgtactctcatattctgataaggatatgagttataccttgtaatacggactccttcccctatataaggaggggtccgagtccttcctgggacatcaactttcttggagattatacatccaataatacactcggcggattcatccccagacaggagtagggtattacttcttgaataagaaggcctgaacctgtataaatcctttgtctccaaacccatacacttttccagcttgatagccacccccttttagtattgccgaaatcttgtttcgacagttggcgcgccaggtaggggttgcgtcaagcttttcaccgatcagtgcaatgggttccgtctccggcatcgaccacctcatcttcccacccgggcaggcgtttcggttcggcagcctctacttcgtcaccaataacttcagcaagatctctctcctcgactcggaatcggaccactcgagaga

SEQ ID NO: 40853 - DNA, 680 bp, Oryza sativa
gtagatcgactcgtggcaagtagctcagcgatgtcgatttagcaaaccaatgccttatgccactcagccatacctccaagttgttgatcggaatgggatgtgccgggttggttgcccgaagatccactgcgtaagccggggcgcgcgtactcttctttactgagcgagaaagactctatccagatctatggatctcccctgcgtccaagcgagaccccatccacataaccccttattttctctccaatggtagattcgaaccccaaatcatagaaactacactatatatgagtttctgtcccgcgtttcaatgggactccctggcagtacggtgctgaattctctggcttttctagcacgcacggcctttttcatatagcaccaggatgattaagacttttcataatactgggtgaagctaatacttttcataagtaagaacgagtgaagctaatactttctttgctgtgctatctcaagagtttagctttgagagttggaaaggaaatagggcggtgggtaaggcctatttcagaattttgttgatccccattttctacttctcttatttacgatcagctcatttcttaatttcattatacatctttctttgacggaatgcaacatttgctcccaatggactccctctggtcataattttgtaactggaacctgatggg

SEQ ID NO: 40854 - DNA, 573 bp, Oryza sativa
tcatcaagtaatgttctgtgtacatgacgaaaacacaaggggaatatataaggccaagccatgttgggcgagatgtgccccatgcacctggcaactggcagctggccagtgatggggatgccctaacttcgtgtccccctacgtacgtctccatggacggatggaccaagcgtgtaccccctttcccattatacatcgacgtcattttttttttcaaatggtttctttaaagtatttggttggaatttggaaaaaaaatatatacgaggggacatccccttagggattaaaatccatccccaacttaattcctatccccctaaatacttactctccccatcacaaaacaactccatttttagcatctaccccatccgtctcattttaaatgaaaccaggagtttccgtgtccaactttaaatgcttatcttattacattttttttataaataggatttttattggtatgagatgataaattataaataatactttatgcatgaaatatgtttttaatttttttcaaaattttttcaaaaaaaacggacaaccaaaattgggcaccaaaaaaca

SEQ ID NO: 40855 - DNA, 650 bp, Oryza sativa
caatcgtattcctcgtatgtacatgtttcgtattgtgataaagcacctatgccgctagaaatagtagcgccttaaagaaagcgttatttacaagatggaatagtgctacgtcataagcagaaagaccacaagccataaatgggttacctagccacataattacagacagggacccaactcttaggccagtccgaagggcattgatggaacaaacaaaggtagaagatcttgattctctgcaattcggcttcaacccgatggagctctcttcaaaacatatctttcggcgtcagtctttcctgccttaccttaaccccgctttcacgtggcgattcggtatgaggtttctctgatctgtttacggtattcttgaagctttctttcttggtcaccggacagagtgagaactgctctgctttctttccctagcacacacttagtagatagtaggcacaactccgctaagagctcatcgaacttgagttctagagtaagaccacagctcgatatggctcattcactagtatggtttaccacatgccagtgatagatctctctcaagtgaggtctggtatcggtgaagtcaatcattgaattgaagtggtagagtgcataaccgggcataaggccccatgtatttcttatcagtg

SEQ ID NO: 40856 - DNA, 581 bp, Oryza sativa
aaggggaggtaggagagaaagggggatgggattgtaaaagagggaggaagagatagagtagatagaggtagaagagttttataggtgactagtttgttatgtaggattaaaatcatttcggattgagtcagagggttaattatgcggtttgaataatttaggatgtaaaatatctagtatttgagtttaggagggtaattagattgattgtaatagttcaggggtgtaattagtactttttacaaaagttaaaagcaggtatctttccatatgcatttatttcattaacatcattgaatgcatggttgttgatttcttgacattttttcttgatatccatttgattatccaagaacaaagaaccacaggctgtatatgtccaatcatattcaattttttacatgcaggtgaatgaaggagagaacatgagctgcccagacaaaacaagaactgtaaactaaggaaattagcctttctttaaagacaacattcaattatgcatacatgaatggacccttgtaggattaagaggcatcaagaaattgaatagaacgatcttaggatcatgccaccatgctgat

SEQ ID NO: 40857 - DNA, 810 bp, Oryza sativa
caaggcctggatccgcctacagttgatttatatataatttgatgatatttgctccaatcaattaaaaagtatctcgaggtaccagtacctgatcacgataccaaatcgttttcgatcgttggattatcctgccgagctagatcaacgatcgaaaacgttttggtactgtgagaaaccagtacatcgagatactttttgttggaccggagcaaaatctcatataattttgcagctgttggacaccacatgcgcaggtttactatctgtcagaggaaagaaccactctttacacgatattattcgtcgcttccttttacattctgttagtcgatcatgatctctgacaaaatttcaagtgtagcaaagtaaacacccattcttcatttaattcttaatcttatgtccaccgtattaataactagtagttctactaaacaaactttcaaagaaagcaagcaatcatctcagaaggcattggacttgtgactggatttgcagcttatgtatacaagtgcttttgaagacgacacgcatatcgaaaaggaatgcactttcaaaacacattgtatatatagaatcaagtttgaaattggctgggttaatataaccaaatcccccaagaacacacggcctcaagcatagcggaatggtgggaatctcttaattatgctccctctcaccaaatgccgcaagaacaaggatcctaggatccttactgacgagtggaatgtttagctagaaagcaatctacgaattttccagcaatctagcttctttgtaaaacaagagttaagtatctttcatagttaa

SEQ ID NO: 40858 - DNA, 581 bp, Oryza sativa
gcatctattaatgtatacaaaaaatttgtctatattttttattcatatctactcggcttcaaatattttcccagtatattgagatcgtgttcctttgctggaggagttgggaacacatctggcagatgatggcgtactgtacaaaacaagaagacaatggtgagtaacattctgattactaatttactatcttgtggattatgttttcaaattaattttgatcttgcgaacctacctttgctcaccagtcaagaacgtctttatagatgatattcttggtgctcttccctgcagggtcaacttctttctcaggcttagccaaaatccttgttgtttgtcacgacacactgttgacaaccaaatttggtaaattataaaccaggttcgacattgggatcgaagcggattcgataacgagattgattcgaagaacagagtatgcatcggctgcgaaggcatcggctggagtctgcgtcagctgagatggatcggacagaggacagctgatacagccggtagaggtggtgcagccgattccgatgatgatgatttcgaagatgcttctagaatcgatcaaggtg

SEQ ID NO: 40859 - DNA, 755 bp, Oryza sativa
ataagaatgtttcaatgtaagcaaacgctgtggatgccacattgaggaacatgtcagaacagacagccaactaagcctatcttcttacttgcttttgctgtattcgaactcaatatgtaagcaatcctcaattccaacttccatctgaaaggaacatgcaagatcaagagttacataaccaaatatgtcttcatgtctttcacacacactaaataaagcatcactgtgaccatggcgaatagcatgttagtcaagaaatagaagtgccgaacagtgtatgttagtcaagaaaaaaaatactgttggccacaacggaataaaatattatgcagctacaatctacaggaatatcagaaaaaacaatagcagctgataagcacaattaaaaggtacgatcttaacgaagcgatctaatcagcatatttcaggggaatcaactataagaattagtcaattaaccatcaaatgcagacaccatttgcaaagtggtgcctattgttgaatacttgactgatgaaaaatcaaaagtaggaagaaccaccatttgtgagatgcacaaatcacaaatttccagggtccatcctggagggttgtagtgttttaaattttccgctactttaggaaatattatcaaaactcataatatcatgccagacaactttgtttctgagaataaatacaattgtcacttgcccaaaaagaccaaaacaaaaataaacttaaggcatacattaggactgtacaatcctggtaaa

SEQ ID NO: 40860 - DNA, 510 bp, Oryza sativa
aactggatgcacacagcccacacgcacactaccatatgcacacgcacgtgtgcgcttcctctacacgctcctgaaatattaccaaatgtatttgcatggatgcgtgaattgtgatctccaggtaaactactagcattacacaatacaaatactaggagctgtattgttttgtgaagacgtgccatagacagacacatctgaaaggtatgaaatgaaaagcatcttacatcatcaatgacaactcaccttgatactgttgttgattgtgggggcaggagagtaatttcttacctgtaaataatataaaaaaattaaaactcctatagaaaaatattatgcagatgatactacaacaccagaaatgcaatgtgttgaatttatttttgaaatatgaaaatactactgaagtttcaggaaaagaatatcaggaatcatgtgacaattcacaacacaataataaataataagcctacataaaatccaatgaaatccatgaaattaccaaattta

SEQ ID NO: 40861 - DNA, 2287 bp, Oryza sativa
tttaaattttaaaaatgtattaatatgattttttaaagcaactttcctatagaaaatttttgcaaaaaacgcaccgtttagtagtttgggaagcgtgcgtacgaaaaacgaggtgctttctccctcagtatcctccaaacgaacgctacctaaatatttaacagtaactagaggaaccaattaatgactgactacatcttgttcaggtacatatatgtacagaaagaaatagctgaagttatccaacaagtgcacagctagaaatagtactgtaagtaatacctactctttgtacatatacatttgtatctgttagctaaaatacaagtgcaattcgtacaaatttgcattggctctaatcaattcatacacagtatagtatactatcttcttttcttatagataacgccattaacttttaacataacattcaaccattcatattattaaaacatttagtgtaaatatttaaaagtataagtcacactgaaagtttctttaatgataacaaagtcatgacaaaataaatgatacctatataatttttaaataagacgaatgataaaatatcatgccaaaaatcaacgatgttatctattaaaaacggaggactacctcctaaaggactgtaaaaaatcacttttgaggaaaacgtgaactgccattgtcagtatttctctgtgaaatgccaactgagagaaagtgtaaaagaaagatttttcccttcatggtcccaaactttttaccttaagacccagtgaacttccatgaaaaattgcatttcggaagctggtgtttttttgtgaagaaaatggtgtagttgttgccgctattgtgtatccgtccagtccaaaatcctgaaatcaattataaacaaaattatgtagccacagcacatgaagcctagtggtgctagcaactttaatactaattcgtctcttgaattctttggatagtgagtgtcatggttgggagtgttaaggatagacgatagagtacttgtgaatattccaaataaaacataaaaaaagaagatgatttggttgagaaagtgcaggcctttcataagaacaaatcccaaggagcacatgagtacattttaaacaacttcaatacaacgattcatggaacatgctaattggacagcttgggtgctaaagctgcatcatgtttgggattggaataaatacatggctaccagtagttaagcatattgcagtggcacatctgattgttctgtgaaaggtggtgccatcatgaatcctagccttttctctgaaattcggaaacatggaacattcaagaagctgtagtaaagcgatttttatagagataatctaactcttactagtaaacaagaaaaattaactaaagcaaaaaaaaaaaatcagctcatgattgcacatctgagagctgtgttggcttgtcggtgatgcaacacaaacatcaccgattcataagcatagaattgtcctttttaaaaaatggtggtgtggatgcttatcaccagctggttcaggatcaagcgagacatttttcaaactatgcctgcattttgtctacaaaatcatgcgcattcccggctttatggccacaatagcagatgggtagatctaggttaagcagagagcagcttctccatgatgattggcactttgacagcagtgcatgccctcatgtcctttggctttgcttgcatatgctcctctttcttggatcactctggtgttcatcagcaaaagtgtaatgatttgtgtgatcttgggattactaccctctccatgacctatatctgtccatataaaagaatagaaaattgaggacaggtagctagcaggtacatgtttgaattttaaacttgaattgtgttatatatactgtcatatactccctccctccgtgtattttaatgtatgacgccgttgactatacgaccaacgtttgatcattcgttttattcaaaattttcgtgcaaatatgaaagtatttatatcatgcttaaagaacatttgatgatgaatcgagtcacaataaaataaatgataattgtataaattttttgaataagacgaatagtcaaacgtcggataaaaagtcaacggcatcatacattaaaatatagaggtagtactattttatttgcttttcatctgccagaaaacactgttgccttcagactaattgagagaattttttttatttataatttttttattaaaagttttacaaaaataattttccattttgaaaattgacggaaatagtcgcctaccgccctctgggaggg

SEQ ID NO: 40862 - DNA, 2488 bp, Oryza sativa
aaaaaaaattaataattatttaaattttttatataagacgaacggtcaaacatatttaaaaaaattaacggcgtcaaatatttaggaacggagggagtatattttaaaacggtgggagtactgttttgtttgcgtgacatgcctcagaaggtgctgggccacactgctgcagaaatgcaggagacaacagctaacagttcatagggagaaaaagtgcagtgtggtagcagaggttgtttcaggcaaccactgatattcctagaaactaattgtgtctatttatctgtatgcactgttaacatcattcagtaatacatatcttgctagatgcatgaatgtgacggatgcaactctgaaataaagatggggcggagatgtttgataaagataatcgagcacaatacataccatatcatatttgtattgaaataggataaataatagaatgtaatcaataaattaagacacaaaaggacattcaacataaaaaaagtagagtacaatttcggagtcgcattgcaaccacagggtagaccggtagaggcatggccctacgcatatcacgacgtcacgcagatacagagttatagcggtgaagaggatgagcggcgagccacaagcaacaaagacaaacaatcaagggttggaatcatgcctagccctgagtgcttctttggtttgatggactacttatgggctaacgggtgatggctaatatgggtgagccaatattagaaggaggttcgggggatgtgggctatacctggacttgttgacgcattgtgtagtttggaggatgctgaaagttcctaaatgtgttaaggagctgatgctacaggattgtaattttcactcacaggtcaccaggacatgaaacaatattcagttccttgtctcgagattgtcccactattttgacattttgaccctttctaagaatttatttgaaaatatatcatgaaaaaaactaacaaaaatacacctcagtcccagcgtcattgttcttagcgctcaagtataaaatctcagcgccatattctttgcgctgataatgtttatatgcttcgtccctcatgacagaggtaatggaatggtggttaggtagccttcaatccaacacaatgttgtgggttcttgactctctctgcccacatgatatttttcttttactcaactatacagtccgagcatacttcaaacatataaatatactttcattctttctcccacattattattttgaaacatatactttacttcaacagtatattcaaagttatatatagtacttccgttgtttttttctcacagtattgtttccaacttttttgtattaaccgcttggggaaaacaaaccgaaatcaaatttgaatatatttcaccgcaagaattcgatttgcttctaaaactgtacttctacctcttgggaaaaaaaagtaaaatcatatatattcaaatgcaaggattcgagttgcttaactgtacttctacctcttgggaaaaaagtgccggaagaaaagaacgaaagatttccttgtaccgctaaaaagtgccaaaagaaaaaaaaaagaagcttaggctgcttgctacctcacgcatgcatgcacgaaggccacaacaccacaccctacaacaacattattactccctccatttctaaatatttaacatcgttggttttttagcacatgtttgatcgttcgtcttattcaaaaacttttgtgaaatatgtaaaactatatgtatacatgtaagtatatttaacaatgaatcaaatgataggaaaaaatttaataattacttcaattttttaaataagataaacggttaaacatattttaaaaagtcaacagcgtcaaaatataaatattttgaaacggagggagtagttaatacgatatatgctagctagccattagttgtgagatcagctaacgagcatcaaattaagatgtggcgctgagatataagtacttcaacgccaaggattatgacgctgagattgagttttatttttattttgtaaaagttttttgtagggtctattctttaaataagtgtttagaaagggtcaaaatgtcacattttgtcgtccctgtcccaagaatgcggggacaatatatcgtcgtctctgccttgttaaaacctttcgaaactagtgctacgcatttctttgatccccttacttgacctattgatccaggaacttctgtgactacttgcatcattttccctgccaaccatcacgacatttgatcaattataagaattaccaagcctatggaacctgatccagggagccataactctggattttactatgcgtacggtgatgaaattatcgatctggagatggtacaacaaaggatagtactcagccacatcggcatacaaagttcagttccaaattccaaggatgcatggttatactatccattgttctgtttgacgcgtatgtttctcaaactatataaacgattcatttttt

SEQ ID NO: 40863 - DNA, 711 bp, Oryza sativa
cgttgaaattttcttcgattgatttgattaattaatatatatcccgcgtggggtggtggtggtgcggggttcttcgcgcgtcggtgtgatccagcgatttggtgcgaatctgtcccccattcttttggggggctttttggtggctgggtgggtggatgcgtttgtttagttggttggcggtgtgcggggtgcgttagggttcgtggagatctccgtggttcgtaagatagacgatctattagtgttgcgctgttgttgctcggctcgtggggtttagggttttttggctggagggatggagggggcttgaatggtggaggagggtgagtagatgtcaccatgggggtggtgatgaatggaagtttttgggtcggtatttgagggcctgcagattctcatctgttgcaatgtttgatctttgagtaagttttggttaaaaaaaagaatcacatgttttatggttgaagatgctgaaagcccttagtaacatgcttgatttttcatgttacaaagtgtccatgaaatagtgttgaatatcaaaacttgttagtcgatattcttccagatatcctattattagatatgagatttgaacgaggatgaattctgtgaatctttaaaaccagcactatgtgccataaagtcaaactatcttaaatcttcctttttttttggcctccatcagtgaatatcttaggctttgtccttttt

SEQ ID NO: 40864 - DNA, 514 bp, Oryza sativa
tcacaaaacactgggatccctgtccaaccgattgacacaattggagaaaaaaggtcctattatgggaccattcaagaaatatgggaactggactatggcctaaacatccaaatccatgtgctccgtcggaaatgcgtaaaaacacaataagggtttccactcattactacgggctaaccatagtccatcacagtaaaacaggccacaaggatgatccatgggttttagcagaacgtgtggctcaggtgttttatgtgaaggacccttcagataaaagaaaaactattgtcatatccggaaagcaacagatcgtcggcatccacaacatctaagaccccaatgattacaaccagttcgacgatgtaccattgtttactgatcttcctatgcgaattaagaaggttgagagaacaatcgatgaagcaaatatgtcgtacgttcgagcagatggtgttgccaaggttattaagtcatagttatttcgtaacctttagttctcattgattccaaatgt

SEQ ID NO: 40865 - DNA, 1019 bp, Oryza sativa
atcacactttgtagtgttaatttatggtaattctgcagatgaaaggtaccactacatatctcaggggcctactcattactcaaggatcgtaaaacaccagttaaaatattaattgccatgtatatacagcaaaaacatgttactgggatgctctggcagcaagtcaataagatatcaaagaaggtttaccaacatatttgaccaatgcaagaaaactgtaagtttctctatcctacatgcaacataactggaataacttaaaactttgcataactactcaaatattgaaggcattcactgtaaaatggtattgaagttctggacattctaaccaacacaacaaactgataagtgatactctcaagtgtccatacttattgacaacataacaaacctatagagtcctacagtttaagaatcacagatatacatccttgctgtattacaatgcactggttctccaaaatactatgtagtaagacatgaaaagcaaatattgcagtacaacaccaaaacattcagataaagcagtgaatataataaagcagataaatgctccaaatagtgcagtaaataaaatgatccaaacaacgcagtaagtaattgaaggaccataaacttgctaaggagtcggtgtacagttacttgaaagaacagagcacaagacatactgagttgctgacatctaacaattcttaccagtcaccactcagattcaaactaacaagtgaagtacaaatctagcagatctttgcataattcgaccacatattagaaggcaaaatatgatctgcatattcataactactcacaattaagcacaagcagagcggcaaccaattagctacagccgacgaaccagatccatgccaattcgtactcaaaataaattccacgagcccaagaatcctaccagatcctgcgccgcatcaaaccccagatccgggcgccccgaggaaggagagcagcctgctggtagtgtgccattggagccaacgctcgggtcgtcaaggaagagg

SEQ ID NO: 40866 - DNA, 1382 bp, Oryza sativa
tatcatcttaatggcttttttggattaatgtgtgattcttcattcttccacgcaagattggctactggacatcgaggaatataaatattaatgaatcgcttgtttacgaggaatgactagtagcatatttaaatggataataagtagaatcacttatccttaatttatgtgtcaaagataaaatattactatcaaaaatagatggagagagtattatcattagtgttaagtgttaaataaaggtagttgaggccttaagttaagggggtgtgcacgctagcgcgccagctagccacccccaccgcgagtccgcaactacccaaccccacagcaccgcgtgcccgcgtgcgatggcattcgcgccgcgcgtaggccgcgcgggctgatcagctgatggtccgcgcggggctacgattctgctacgacttcatacgagtctacgaaccagtcgccgcagcccggtaacgatcttggggcaggcttgcacacaggtgcaaagatacgtgtggcagacatccgctcgacggcaaccgcctggcagtggagccaccgtgtcactgtcacctaccaaagctctgcaaggattctaactttccaatagcccgtgagtttacgttttgtcctgatgcatgatgaacagcccatcatcaacgggagaagccaaccaatctatcatggacatgtcgtcctgtgtcgtatggcgtgcagtttgtactttggattacaggtaatattgatctgtacatatactacttttaataatactccagaaactaaatactactagaaaggattttgttcgccttttagtacgtgagggataattatcccttgatgttattggtcggagtaccattgcatcaccatgaatgagaaataataaagaaatgaaaagaggattgcaaaccaaactgggatgctccccgcatatgggttctgcatttagcagcataacatctaaaaagcagataccacaaatattttcaggggactactccaggaccaataggaactagagattactaccatgaagggcacatgcttgcatcgcatgctaaccatctactgtagagtagtaaatacaaaatctccagttctgccaaaaacaaccaactcgagtcaagaaaaaggacagcagtttcatgcaaaagaaaacattaaatagtacatatccgggagatatgcattacttactgcgaatcagctaaatatttccccaatttattaggcatgtattcccccctggaaatataacaaagaaccaactggagtctggagagtattaaaaccaaggcaaggggttccttctcatggcgcacaccattctactcctagtagtgctcctcctttcctccaccaccaccatttcgggctgcaggaat

SEQ ID NO: 40867 - DNA, 758 bp, Oryza sativa
actaattgggatcatgtgaactctggagtcctagagcaactaatgctaatatactactgcactgttttacccaggatttatcttcttctcccttgctccatattgtaagacattttagttttctaagtcagacttcttaaactttgaccaagtttatagaaaaacacactatcaagacatatttcctggtagattttaatgaaactaatttgatgttttagatgttgatgtgtttttctataatctaagacattttttattcaacactgaatctatcccatttataaaacagaggcataaaaaatgcacaatatgtgccagttcgttctggatccatatggtagcttagtttgtttgtttattttgatggaatttgcagacctctcgaccttttatttagcggaacccttgcttcaaccaaaatgttgatttcacagtatggaagatttatagaaaactcctttcatcactcttacaaagggataaccctgtagtcgttttgtctctatagtcatctcatttttttcttatccagtcaaagttttatgttcttcattctatatttcaccttgtaaacagtttaaacccattattgggactgccaaggattacagtgtgtcatacataagcataacacgattaatggtaaatgttcaaagggttctttcttgttatatggacttagtgcacactgcacagcaaaaagaacgggcagaatgcatcaacataaggaatgaaatattatttgataatttgat

SEQ ID NO: 40868 - DNA, 1325 bp, Oryza sativa
  unsure (1)..(1325): unsure at all n locations
gagtcagcgtaggacccacatgggccctatatatcaagatgccacatcatcaccctctctccccatcctctcccttcctcctcttctctcactctctcttcctctctcacttttctcctctcaggtaggcaggctggtgggtggggaggaggtcgccggggtaaggcgggggaggaggtccaacggttggcgatagcggcgcctgccggtacgaatcctgctgccgcgccgccatgtcctcctcccgtgggccgtaggaggtctgacggccggcgatgggggagaaggggagggcagcgcctgcgggtatgaatcccgctgccacgccgccatgtcctcctcccgcgggttgtcgtctcctccgtcccaccagaaccctaacgatcccttcgccgcggcgaagacggaggcggaaggggaggcggcgccgcccggaaaccctatcatgcccagtgaccctccctcaccgcagatggaggccacttcagagacactcacccaagaggagatgttgcgtcggcggaagagctgtaggcgcaacaccggcgtctcgtcgacatgtatcggcggctctactggacgctcgggaaggagcgtcnggcgcggcaccagtagtacgcctgggagcttgtgcggagctcgcttgagccgagcagtgtcacgccccgaaccagttccggctggaactagcccgtgacgctccaaattaacctgttaatcgataccagtcccaggaaacagtgctggtatcacagggagacagaatatcatagcaacagaggtctctttattatagagtaggagtacagtcatgttgggctacggacagatcccgagctcacaactgcattacaaaagcgaaacggaagccaggacttggaccaatcatcacaggcgcgacttgggaactaggccgaaaccctaaaactcatcgtagccggcttgctcctggaagaactcctcatcagcaggatccacttcatcttcttccgcaactgggggggggattatttatatagagcaagggtgagtacgggagtactcagcaagccaggggaaaataagtgtttaatgcaggcttcaaggaaaggctgttgtttttgcaattgattttatttgaactcttttctaaaagcaactaagtgagtgcttctcaaacgacacggacgaggcagtgcgtctcgtccggtcggagtatgtgcaatgtatcagtctttagattttgaaacaaggttggcacccggccaaaagctttttaaacggccacccgggccaacacctttcaaatggccacccgggcctagctgatcccatcagctgcaggt

SEQ ID NO: 40869 - DNA, 628 bp, Oryza sativa
attcctgcagcccttgatttagttgtagacttgtaaagcatcactggtcgtacaaaagttacagaaccgacggggaggagcatggaccagctggaggatgtacgtggtagcttggcttatgtgacctgtcgatgcgctcgtgaacatgataggagtaggacgacgctacagtagtgcaattccattattgtccaccagaaatgcataaatggccagcatgggactttctgtctgcgaaatgacatggttgaacagtacttctgttacttttcaagagcagcattatcagtattgttttgcaagaagtgtactctaagcagcgcgtttttattacaaattaagttatactggtgtagttacgatgttgttcggtgggtgtagcaagaagtggtggacgtcctggaacggtgggaactggtcatgacggcggcgaggcgaggcgacctccagagcctcgagtccctcctcagcaagcgcgccggcgtccggggacgtgaccagtacggcctgacggcgctccaccttgctgccatcaaagggcactgcgacgtgatcgcgctgctcgccgggtcaggctgcatggacatcgagtgcgaggacgtggaagggcaccgcccgctgcacctcg

SEQ ID NO: 40870 - DNA, 554 bp, Oryza sativa
ctaaaagttgctatattttaggacggatggagtatatggtggtcttcagaaaaaaaatcatttaggatgtactttcattgttactaaacacactataccagaactacttattttatttttctaaataaaaaaacaagctgagtactttcttagctcaacatatatcaactgcaaatctgaaagtaaaagacaatggaaataggaagccaataactgaacctacctgtgtgccgtaccctgagttatagcagtccataacaggttgagaggctagaccagtttcttgaaagcaagattgccacgcgttccatttttgagtcagcgctaaatgctcaatgcaattaatgaaagggaaatgctgttcctgcattcagaagaacagatactggtggcacttcagtgcattgtctcaaattctatcgatgtgagcaatagatgagcttggcagatctaccatatgctcattcatacagtacatcatactactactatatagatggattaaatgccagcatgttttgtcacataattacactacaggacactgaactatt

SEQ ID NO: 40871 - DNA, 1744 bp, Oryza sativa
taggatttaaattctacgttttgtatcggtgcccacgaatttaaggcatgtatttagtgggtatgcatgcgcccgcactatggggggtgtttggtacctccaacagatttaaatcatgtcaagaggatgtgcatgtgtgtgtggcctaagtgtaatgtgtgttgagtgtccaacaaactatctcaaaaacaagaatgaaacaactcgatgctagcaaagttagaattctcaacataaagcaacggatattggcaaacattcaaaagagcacatgtaagtatataggattatgtttcgtaatcagaaatgatttgatttcaggtgagattataaccttaactactagtactataccatattgaaaggaaagaagtcttcttacaaaaagtgaagaagaatagggaattccgcttggagaggaacgactagggaagtattggactaaagtcaagatctactaaagaatgaaaagagcacctaatacacctatgtggattagactaattcttggaacttcttcaaacaatttgtgtttgccagttttgaggcaaggagatttttttagataatggaagtttttattgaactcaaccaatataccaaggtgacacaaaagcattgagcacattcccgagatgaggcaaggggattgctttcacaaatgtctacctcttcaatgtcttgaatgcaataaggtatttaaatcccctatgcaaactcttgttcagtttctcacaaccattttcatgtaaactctttgccattttagttgaatcttcatctcttttcaccagtagtccatgattattgattaatcccctcccccctctcatatcctttcctttatccataagctgacattcatatttaccctaccatatacatttcttatattaaatctaacattcatttaaccatgtaattgttcataatcttgatggggtgacctttcattattgtttggatgatcttatcctttatgaaggttgtatcctacaagaaaatgattcaaataatgcatgttcttttctttgattatcccttgactagataaatgaaatagttcaaccaagtattaattacccaaaggttgtcataatgtcatcgacatatatcgatttatcccattcctatcttggcttctttttaattcctcaaataacttttttctagaatttatctggagatggttcacaattatgaatgcctattttcaagtggtataagtcaaaactacctctaataagtaccatactagagatggctttatgaattggtcgtgtttgctcaccctttaattaccatccgagtcattaattggtctctaacaatatttcaacattcccgcccatgaaatttgaatttctctcttgaccgatcaaaaacttctttaaaattaccggcccaaatatcctcatctcctcacctatcctctcctctctccccctcctccacccgcctcttgtgatgtcatccttctcctccactcctcttatcctcctctcctcttcttctccgctccttcaagggaatgatgagtgcatggatcccaatgaccttcaccaggtaacccctccttgcctttccccccttgttcatgatatgctttggatctctagatttttgtttaggtgatataatgtactagactttggatgtttaaaattagagatagattttggtatggctatggacacatgaatgttcggaaggagtagatcaagagtgattctactccattctg

SEQ ID NO: 40872 - DNA, 729 bp, Oryza sativa
attcctgcagcccggcatcaacaccttagttactttaggatggatatagataccttgtggggaaacggtatggaagatactttagcacccccaattttctcatctgctcataagttttgtaacttggatgtcaggtgatgataatgctagaatttagcttcagattatatcatctcatgcttctcgtgggctcatttcttctgaaccttttgtttgttatgaccaatatttaaatgataatcatcagcttgtagataattttcatactaaaagtttttagaaaatttctaagaaattcacaagctagtaatttattgaagttctgaaggatccagcttttgtgtcatgtcatcagttgtttcactgctatttgcaagaagacatttcatcatgtagtccaaaagataaagaatcgctttaatatgtattaccattacttgtcagtgttttagatgcacttccctaatgatatacaaatgattcatgtcacgacctgtctattttctattcggcatctcctcaatataaatctaatggaactgttcctgcagttaggcatggcatcaactgttgccatcaatttgattggtgctcacgctggcattatctcaaagttaaggaattgcgacatcacaagctacagtggcttaaaggcaagatcatctattagttttgagtcaaggtcatcattcctgggtcagaatgcatctcttcgatcatctatctctc

SEQ ID NO: 40873 - DNA, 502 bp, Oryza sativa
tggaggtgtcactgctccttcgcaccctcttggctcttgccatgcatgaagccagaagcagaatctcgattagccggtaaaattcgagctccaatcattttttcgctgatttcaatcaatttttgataaatttcgaacgaagttcaacagttgaacagaccattcgaaatgatggctcgagatggtcgaaattcgtggagatcgtgacccttggctagaagttactcaaataccaacagcgcaacgttcttgccatgcaaataagtagttcaattaccagcggtgcaatgcgagggatgatagtcccaaaaatcagtgaatcgtcgtcatcttggttgttttgaggaatggtactcaggaaaagggaatcgtaactattgtgactttcatggatcctcagaccaaacaactctagacattaaaacaaaatgtttctataagcaatcatgcatgctcaagtggcgctcacacagataccatgcaaataagtctaaaaaagcag

SEQ ID NO: 40874 - DNA, 521 bp, Oryza sativa
aattgccatacatgtatgcacgccttatattatgaaacaactttaaaaagtagttgtgccctatattttggaatggagggagtatattccatgcgaaaactttttatatataagttactttaaaataccaaatatgttcatttatcagatttataataattgaaacttaattaatcatgtgctaatagctttctcgttttacgtacatcaacttaatatttatcttcatgagtttcaaacatcaccataatgtaatcaagggaatgattatggaaggttatccaaagtttgagaaaaaaaaaacatcattggacgagaacactcctttatcctttcttggagtagttttttgatatctcattagcattctaagatttcgggatcgttcaaggtaaccgtggttagccaggtccgtgacagttgctaagggtaaccgtggacgtcacatggcatcgccaggtttagtaggtctgcagaatcagagatagatcgcgagtcaacctctccacttctccaactct

SEQ ID NO: 40875 - DNA, 2346 bp, Oryza sativa
agctagatattgattggcattacatacaccgcgactgtagaagttatcagaggcaaaaagttttcttatgacgacatgattagacttgggatgcatctggaatataaaaagaacagtgccatagtggataacttgatcgtttgtgctccctggcattgacgtaatatcccaattaattcattgacgaaggcaatgacgcaaattaatccctggctttcgtgataccctatgaattgctgttgtgcaatatgatatataattgggaaatattttgactctgagcaagactttgtacagatgataatgacgcagaaagagaggagtgaattaaacatatatgttctgaaaatagcattcaggacagacaccagcaacattaattagctcgtcatcagttcatacttctgaaattagggcagcgtgagctgtctgtacctaactactgcatctatgcaggcgacacaacatgttatacttaaatgtttatgggagagtagtttcattcattgaacaaaatgtgcattattatgtgcagggagatacttgaatagatagcatcggtgttgtgcaaattgagtttcaaattctcccattgataaattaattctacaattaattgaacagaccaacttaactagtgacagttaatttatttatttaaagatgcttaatttgatctgatatacatatatatatatatatgcatatatatatatgtatatatatatatatgtatatatatatatatatatatataaattaagcatcaatgggagaatttgtatatatatgtatatatatatacatatatatatatatatatatatatgtatatatatatatagatatactatactacagatgaggtgcgttgtattaaaacacaacccacccccacccccacccccaccccgctcccccacacatttcttgtagtactgatagtaaaatgattactgtaggaatatgtatctaccctatagtaatgttgttacttcccgcacatattagccattttctttacacctgctttgtacggttataccccgaatttttaggatctgggaatgggcgaccaagggagcggcgtcggtgtgctccagcggcaggcagcgggagaacggcgaaatcggccagcgacgggtggaaaggagtcgccaccgcagccgccggaggtcagagctgaggggaggtgggcggacaacaacgagcgacgcctcgagggtatctttcctcttcttgttcttcttgttcctcttcttttccggcgtggccccggccggaaccctaaacgggggcacgtctcattctccgtccgcgcgtccgccgcggcggcgccggcggcagggtgtgatgccgcgggggatgggggatggggatggaggcggccgccgtgccggaggagctgcggcacaaacgctctgacggcaagcagtggcgatgctttcccatctcctgcaaactcgtgttctcatttactcagatcctgtatggaaaggagggcggcgacgagcagctgtagcccctcacccagttgtcggctcgtcacagccccacacggatacatcttaggcttaacataaggattgccatattaaatagtttccccctaacttgttgtcaccatgaaactttaccacggattaattgttagaagtaatagactccaataaaaattttggcttgacacctgtatcatgcacagtacacacggaactatgcgtatataggcttgagaggcactgggaatggggtgatgacaagcagaccggaagccagaagcttgaaacccaagttttttcaggttgtctaactactaccaatcagttgcttctcaggctatttgttgtatgtgagtcgatgataacaggagtgtagatatgctcgatcgcttctatggctagactgaattcgtattctgtcttccagtttaatggcatactatagcaacaaaattggtcacgggtgatttttcttttgttcttattgttctccatcttagcacagtcacggagttttgccatttgcatgcacgaaatataggccagcggtgtacgtaataagcatcgatctctttctttttctttttttaagagatttgtcggatatattagaaggaataaagtatgccaagcatgcactagaagtagaaagtaacacagaaggtgaaaaaacacctggggtataacagctccattaagagattaattacaagggggctgcgacccaacccactgaaattcttccaaccaggagaatctctagattgtgcgatttggtttcacattttccttaactatgaaagatacttaactctcgttttacaaagcagctagattgctggaa

SEQ ID NO: 40876 - DNA, 2575 bp, Oryza sativa
taggataaaaaagattaaggcaaaaaaaaacatacggagtaccaacgggaaaaacatcgacggtttttaaaacagatgtttctataatgtaaaataaaatatattactacacaaatatacgcaaatatatatcgaacagcaagtcgagacaatataaatcacttatgtttaaagatactttaagataatgattatacgtatgtttatagcataaccgatcaaatagatctagcatgtatcggctaatactccgatactactctatattaagagattgaaacagagaaattttatcaaatcaatttcttcaccaatatacgcaaatagaactagatctataatataaatatcaaatatcaaatcaatggtctttaagcattcatctttttaatttattttaatttatatttatattcaatttgtgattagtttcatgctttaattaaatgaaatatttatgtcttataaaaggtatattatggtcctaaatacatcatgacacatgggaccaacatataataattaatgttgtggtaatttttaaatagtttcacattatattttaggatttcacatatcacttgataaatatacaacactaatttatatctacaaatgtaaaaaatgaaaacaaaaaaaatagtctattttttaagtaaatccgatttaatttaatttttttggattaatttatcgaagtttttattttgaattttttagaaccgtttgattggtatttaggtgatgagcaatatacgatacataggtgtgataaagataaaaatatttcctaccaatcatctttgctttaatataacccgttcatccatcataaagcagtcatatatgtatgtttttttccctttaccaaatagtttaacaacaaatgaacaatcaagtatgatgcgcagtaaactacacatgatatatttccaaggaatttcagcatgctaagcataattgatgaatgtatactcccacaaatttttagttattgtaaagaagtttgaaaaaaataaatacattctttagtaaaggtgtttaatgtgattatcaataataggtattgaaaataaatcaggtgctaaactatagatatttatcaatataactaataatatggtgatatagagattattgtggtggtatacgttttttcagtagcatcgaatgatgaacctcatcattttttttcaaaagagagtactctatgtatactatgaaaatttgaatagcgatgattaacaccattaaattgtgtctactgtgtgctacacatctactcaaagtttttttaaaaaactattattttgatcaccttgaatttatgtgtcattttctaaagggtatcaagcattaacaacagagtttgctacgctgtctagtaggggtatacaaatagctgagtgaggtgaccccaatatacaaatacaattctccatgagggtatgatagtaaattagacattacttatgctcctggatggtctttaggggcacgactacatcgacgagggagtcatctttcaactcaacatagaaagaatgtcttggtggctacgatcggcttcacccgttagaggagcattcatgtttatctttaacagtgttattttattaattagtataagtgatatttttaaaatatttatatatggattcgaaaataagtgaaacatgaactcttagataagtagtgaatgttttagtgtatcaataatgtattaggcttattttattggtacatctccagtttaatctattaatagatacacaacttttaaaacagtaataataacttgtgacaataggagaatttatacgtaatcgggagagactgattttcttttaatcttggagacattcttatcatttactaagtatattaaagtcagtttatctcacagcacaaaaaaagatgaaacatgacatcttttagtattatttcataaatcataaaacaataaataagatacacgcgtatctgcacgggctttcttccttcctagtttgtttaaaagccaatggttcaaaatacattacgataaaaacccaacaatcaacttctaaactaaagtttaggacttaaacttctagccaatgggtgttctagctactggagttgatcggaaagttacctacttcggtgattgtttttttgggttccggtacttcaaattttgtcgggagatctaggaccatcagtggctaataaaaagaaaaggtgtttcaaataaaattgtctaaaaggcaggtctttttttctgacaattagtaaaacacatgtcgctaaactaaacagaataattttacggatagatcaactgttatatgtaacctgttatttcaagtttgtttgatgcaaaaactgattgtaaattggtatatagctaagacagaggaaagcaacaaattggttcttaaattagcatctttaaatacatggttgttgattatcaaaggcaaaagaaccatagactatatatatccaatggattacctactagctcgatgaaaacgaacatgcacagacaaaagaaaaagactaggcctcaatcaacctaccatctgcttca

SEQ ID NO: 40877 - DNA, 577 bp, Oryza sativa
aagcatcaaagaatcatccgcaatcttccgctcaggatgttgttcaaactgtttcagtgctgagctcgtatgcaagatcaggggcaaacatcgatgggttactgcagcttgataccatctccattttaccgacgcctccaaatccaacatgcagagctatacacagttctactgtctatgttctcttgtcatctttctttacttgattcccccaaatccaagatgctgggatacatacaatttttcttactgtgtatgttcaatagcaatgagcatgcatccaggcaaaggactgaaggaaatttaaggaaaaaacaagagtagctggtgtttccaaatgggaagaatctgatatgtattacatatgttccctgcccttctcaggtcgcaagatatataactctacacacataacattggtaatatgggatactgggaacaggtaaccaacaacaattttaccatccaacatttggtatctcgaggtaccacattttacacacaaattttaatatctcgatataccaaattttacacttaaaaagtatctggagggatcaaaaattaatggtacctt

SEQ ID NO: 40878 - DNA, 1566 bp, Oryza sativa
aaatagttaactgcatgttcagaaaccgatagcgatgacagttttgaattagcaatcaaagtgtttcatgtggtcactgctggcatatgtgcgagtcgactctaatgccaaatatgctagggaaggggtcaaaattaaacacctggtaacactagcacatggtttttttttccctctcatcatcaacttacaggtggactactccattattcagtcagagtgtaatagcatataatatgttgcatataacataatactcggtaagttactttcccgttacagtcatgaacaatacgacattctaactagaggttccctggctataattgaggtgcacatggtaatctctctgacttccggtctgttaatattgtttacgcaatgtttccataaaacactcgtcaagttacctgatgccaagagaagcactcagtaaccttttgttagaccctgggagagcatcccgttctgctagcgaactctggtcttctctaacgcctcccattctcaacctgtatggctcaggctgtgttgggacgcccatttttccaccctatctccctcgttttccgcgtgcacgcttttcaaacagctgaacggtgtgttttttacaaaaagtttctatacgaaagttgcttaaaaacatcaaattaatctatttttgaaaaaaaaagctaatacttaattaatcatgaactaatataccgctccgttttccgtgctactgttccaagttgggaacaacccatggcaaacacagccattatgactttctcctatcttcttcctggatgcattcatccatatgctagccagcttatgttatcttcatctcgtgctttgttctctggcataatttgggtagagcgaacttatatatacacacatgtacacatacttacttacttttacttgtctatttcaattttgaactaaaattacaaccaaaaagtaaaatttttgaagtacctaccaactaaaagggagccaacaggaaagtggtacaccatgcgctaattaatgaaagaagaaagttaatattcaaacgaaaatgtataaatagacacatgtggaccttcgtatgaattgtagtagagtttgaaatgttggaagagctcagcatataaaattttcagctactagctagatattgattggcattacatacaccgcgactgtagaagttatcagaggcaaaaagttttcttatgacgacatgattagacttgggatgcatctggaatataaaaagaacagtgccatagtggataacttgatcgtttgtgctccctggcattgatgtaatatcccaattaattcattgacgaaggtaatgacgcaaattaatccctggttttcgtgataccctatgaattgctgttgtgcaatatgatatataattgggaaatattttgactctgagtaagactttgtacagatgataatgatgcagaaagagaggagtgaattaaacatatatgttctgaaaatagcattcaggacagacaccagcaacattaattagctcgtcatcagttcatacttatgaaattagggcagcgtgag

SEQ ID NO: 40879 - DNA, 628 bp, Oryza sativa
aatagttattttatacagaatggagcgggtggtgagaatcgaactcgcatcgttagcttggaaggctagaggttatagtcgacgttggttgattattattaacgtctctaattcaaaaccgaacatgaaattttgatttcattcggctcctttatgggtattctcaccacttaacatctaagtcagctttttttgtatgaatggaaccaaggctctctgctttctagatgatccctaaagagtaggagatagaaatttgcctaaatctatctaatctaattacttcgttctctaatttcatttaagagatcatgaggaaaagaattgggtttccaccaagctgaaacaatatgctgatggttcttgtaaaccaaaactaccgttttttagctatttggcttccatttcctttttttaacaaaagaagatttagttatgattggaaataaatttttttgtatcttcatccatagatcctttactcatattttaaaaattggaatccatgcttcgtgactctgtactcgtaatccaaatccaatttgttttttgcatgcaatttcaattagtctttgggtacaaatcgcgaaaatgcatattcttcctcaatatgctattgagagaaaaa

SEQ ID NO: 40880 - DNA, 1770 bp, Oryza sativa
tacataacatgatgaagactacttggcttcaaccatcatgctctcaacacatattacaacgcatatgtaacaattccatcaaaggaatatcgacacacgagcaaatgctatcgtcatatatattttgcacctgtgtttcggaattattctcatcccattactctgtcaagtccaaacagcggcttcagaagtatagagccggtggtcagggatttctgaattgaacaaatagaactagataagcattcatgtgctcgaggaagtcatataactgcagcatgtgttcctgatgccgctcatgcacatgttctaagcctgctctttgccatctgctgctctccagactatgtaccatacaagcatactccctccgtccgaaaaaacctcaaatcatggctttaaagctggacgaattaatgcttgtccaggttcttagtcaggatttgagtattttttgggacggagggcgtatatgttaccgcaccaactggctgcctgttctgaatcaaagcaaggtgaaacaagaactgacagaaatgagcttgtcagtacatgttcaaacttctaactgagtacaagtagttgtttaccagttgacacttgagagcccctagaaacttcattatttcttattgtagttgtaaataggattttcaggaaagcaaatcaatgatgatataatgccatccaaatagtatagattggagagtataaatgagagtgatgaaaggataatgagaataatggtgtgtgcaggaggtaggtgaaatggaagatagttataattgtgatcaaattacttttctctgttgtatgtactgctatacctactataatgagaagattgaaaagtatgattgatacagtacaatgcagttacagctaggtcgctgtggtaaaggacctgggctgtcaaccccttgtcactggctttcattcacatccatctgttagtttttcaaggacacacaaattaaattgtaggcaccatttgtacgattccaattcaaattaaattataatcaccatagtatatcagtttgagtttttcttttctcttcatcttgagtggctgatatgcaatgctgacatgttcatcaccgtcaccaaggtcaaacacattttagataaagataataactacatacgtgagggagagttaattagcttgcgatttgatggtgcagttatttgtgtggattcactgatactagtatagcacaaagcttcatactagtgctcaacccatgattcactgataagtgtttctagtatagcgcacaaagcttcagtgtagatataccagccactactagaaaaaaaaattttcatggcgttggtctatgatttttgctggcagaaaaatgccaaaaccgctagcaaagtcataacaagggggtggggggcaccgaccgccagcgaaaatggatctttgctggcggccacgctataccggccgccagcgaagatatgttcattttcgctagcggtcacttagatgcaccgccagaaaagatggataattttcgctagcggttgggttatatagtccggtagggaagatacaattatttttactggcagcccacttaagcaaccaaaaattgatttttgctggcagtagaacaacctccatcttttatcaccacgtacccatgtgttcttatccacccacctctccacaataaaaatatcttcctctcctctcagcaccaaatccagatccaaatcctctcctctcctcctcacctcaacaaatccactcctccc

SEQ ID NO: 40881 - DNA, 6055 bp, Oryza sativa
caccaaccgggactaaagatattagaggggtttgacatcacctaccgggactaaagatcaaaaagtagctctaaccttttcaaccggggctaaagataatctttagtcccggtttttattgcaaccgggactattgtggaatttggtcgaccgaccaaagatggtttctccaccagtgtaattagtcaagatttgtattgattagacataattattttatttcattgttatttagtgttgattagacacaattaacatattttattactaattattctttttattttcattctatccaaacttatccatccaaccaaacaaaaaactgcgatcatctcatccacacaaccaatggaaagaacgggacaaccatattttcaaaaaaatagatatatccaaccttgatgatgaaccaacaaaccttaaactttccaacagacccaatactggcaccgcaggttgccattgccgtctctcgtttcgtcctggttcttctcattcccaacctctctcctatgatcggttgtattgtttcctaggagagcatggcatccatgatagcttatgttaactattctcaccttgtgtttggttgtccgattgacatggctttttattggtagtgaactcagatatgtataggtgagtgagtagagaagtaaactatagtgtggagcaagtgggtgtgaaagctataagtgtcccatcccccatggtgtgattttggtgggtttttcccatataaagtttggattggggaccactatagaacccatttatttcctaaccatagtttcattggtaacctgcagtttgtatgaagagagaatgcaaatgtaagttgttacgcatgaacaggtccagtggcagacacaactttaaaaaaagatggggcggagatgctaacttcataagaagaactgaacgcaacatatatcatatttatatttcaatcgtataaaaatatagtataattaataaatcaaggcaaacaagaacattcaagataataccttttatttaaaataaagcaataatctttgctccatatataatttcatcatacaccaaaagaaaagtaaacccgtcaatttgcaaatagaagtcaattcataaaacatagatgagagatatcatttaaaattgattaatatatgagaaacatattgctatcaaatcactaagcctttctagggactgtagggacttaggcaaatctattcttcaatcacccatggcttaaaatatctgcataaccttttcaaaatcaagtcctctaaaaatctcattcttaatgtagcacaatattgaaccattcattggacaccctattgcataaatatgtattatattcatcgcccaaaagactcatttaaccgttgccattgccatatataggcagaagcagtgctaagtcaataaagatgatagaccaatgaaaaagcaatatgcatttgcgtttcaactatctttaaggccaaactaccaagatcatgacacgtagtggaaatatcaatacgttgcacgtgtagaataaatgtttcaagtcaaaatgtgagaaatcttggtcatagatctccatcaatcatgcgattttatcgacattaaactttagaggactctcttagatcaagagaagacaagggaacaagcaacacagatgatatatacctcattgaatcgatgatccatcttcatgataatagaatgtagaccctattgcagaagacctgaagtaatgcagattttacaagacaacgtgcattacatgtgtatatatggcatgcattttagaatcgtatcctattggtttggctttctaaaaataatagaatgtagaccctattgcagaagacctgaagtaatgcagattttacaagacaacgtgcattacatgtgtatatatggcatgcattttagaatcgtatcctattggtttggctttctaaaaaaagccaggtagtaaaacatctgttgtcgtaatcttgagataatagtcatatgcagctttttgtcaacttcgaaaggaggttcaaaaataggatccaataattgtgtactctttatcttgtattggtgtttattagtttgtgtttgcttcatgtttgggagtgtttctataagttttctttgagctgcgcacgacttaagtgaattggtgtaataattggttgtaactcgttgagcaaaggccgagatggtattctattccattatctaaaaaaatatatgttgtctaaaaaaatatattttagaattcgtggggctttatgtgtaatacttttgggctcctaggtatgtctgtactcggcatatggcattatattgcatatttatttgttccctgcctttgcactctgtttagtgttaggttattagttccctaatttttgcactcttcttagtggtagccatgcctagtaggtggagataatttcatttacggcgttgatcatgatctagaattcattccttttcatacttatcggagattgttgagcactactcaagtcccattgaatctcttgtttcttattttgtaataggattaggagacatgggaaatttggtaacttgcttatgattgagaggcgaggaaaagaaaagattgagaattttgccaaatttcacagaattaacgagctgaatgcctcggtaagagagtttttgtggtgcgatgtactcatcaacatttctcgttgggttccctagaggaaattgtaaattttgagactggtaatgtcaataaagagatgcatgaactgcaactttggggaaatttcaacataagattgttgttcttttggatactttacttatctgctacttggactttgcaattaaatttcaaccaagatataattgagttttgctaaaatttcagtaatggataccactctgggggaaccattcaatcagtacaccatgtactaatgacacaaaaattttagtggacttaacatgaataacggtgaggtttaaactctatgtttctctaaaaggtaaagtgtgttcaaaactggttattcccctgaaatttgaaaaaatatggttatatttccagttggccatcaaaatgtttcaacagtccaatagggccaatttgtgggataagtacaaaaatttttttttgttaggttcaaaatgctgcaaaagtgacttataaatcctcctcattcacctttctcatctgggacttataaatcatgcatatatttgtgcaacaccaaatcctcttgaaaaatttgtttcaatctgaatatcttccctaacggttacctgctaatccactttaatatacacttcagcccctatagatttgcatcagtttgtctggtgacctaatccttctctacgatgtcaaattactgtagacattgtatgcatctctgcttaggatggaacaacattgcccatgtgtacctcttatgtaatgattgttatgaaaatagatgcataacggatacacaaatttaacatggaaaagcgacgggcaccaaccggtaatgatcaatatagacgagttggatacaaactcaggggatacattggcctatcacaacctccccatatggtttgcaagagatatataaataagaaatccatgagtcctaacaggtaaagacacaaagtcctaataggaaaactaatcctataatacaaagtactttatgttcttcttgttatttatttgtataggggcttggatttggtattcaatactttacatttattttttaatcagttttcagtttaaactccttcatgttaccaaagtttcacgttggccctctctgtgtaatgtctatgtaaaaactttctttaatattttttataaataagcttggttgcaccatcttagtcttgttgagagtttatgtgtcattctatatatatggtagtcatgtgttggggggatgataagggtattattgtctttttcaatttttaggcttcgccatgtattctataagattcaattatatatcaggatgataagggtattattgtgttggggggaaaatgaattcaatctccatttatctcttctccaaattaatcagtctcactattttttgttcaaaaaatatcacgcgcatatccatctagcaccattcctcttgaacattttgttttgttgtaggaactgtatatttcggataccggatgatgcctaatgttgaagctacgctgttttgaagcatcaactatgttgtgcatcaagttcatccattggtggatcgcacttaaaaattaagtggatcagacatggtgaggtgatagggggtggtggtggcgcttgcgctacggtgaaattcctcgatgcattggtgagtgtctcagtggttgtgtgcatttgttgagctgctcgagttggggcgcttgaggtaggcacctcagtggttggccgacagcgaggcacggatatttctaatttttcatgacaactaacgaaaggaaaaaactaagccctcccccgctctccgctactgaaatgcatgtgtagcacatatgtgatggtgaaacttaaatagcaatagttctatcaagtgattgaaattaagcccgttggaataatatatggtgaaattcgccttgactttgcttaattataggtcaaattaattgagaaggagtaagattaggtgccactgacaggaaccaaccctgaatgactgacctgcatgccaatagagacatactccctttgtcctataaaaagagaatctttgatcagatatgacatattctagtactaatttgtagttctagaatatgttacatccgaactaggtcggttttttattgtacagagaaagtatgcctaaatttcactgacctgcagcaacaaggcaccgatcattgagttgttcgcggatcatggtacgaaccatattcaagatgccctagcgctgggccaggtggcctaccctaccatacggagccctccatacagttggattggaacaactatgtatgtgtgtacttctgcttatcggaattggaggcaccaggcaaatggagatggaatggaggtccttctaaatcccataatcacgaacatttcgtactacaacgctataagatattgtgcattgtggatagcctcacagtcgcgcattcacctcccgggtagcacgggcagctgcttgggcttcaatgcaaagttctctggcacatagcactaatccttcactgtgatggattaattcccgggaaagatttgcatgtgagagttagaaacggaaattagtatggagagttaagttagcaaagcatgcaggcatttgggcctgggtcctcagctgcctatggcctctgcctgcctcattgtaaaaagaaaaatgtattagtgcggtatatgttttcactcaaattaagcttcaacgtacttgttgttttatcctttcttttctccataaatatttacatgcattttggatccactggtggagaaaccgtttgtagtcccggttggtaaccccctacgaatccgggactaaagatagctatctttagtcccggatgaaataaccgggacgaaagatcggtgcaccattttttttatttgcatagccctgtttgttgcatggttgattatatatatatatatatatatatatatatatatatatatatatatacacacacacacacacacacacacacacacacacatatgttacaatacatatatatgcataatatataagcatatatatatatgtatatatgcatatgtgtatatgtataaatcatatattacacacatatgtataatttaaagcacttaacattttatgtgcatatatgttaccaaaatatatattaacactaaagtaaatttgtacatatataaatatatatatacatgcatatatagtacaattcatttgctcggtagctatagctacgacttcgacgccggcgttatgacagaagaggaaggaccgacgttatgaattgttgatccgtcgtagtagaattcaccatcgggattaagaacttcttcgttgatgaatcccatcagttgttcttgaacagccgtgataaa

SEQ ID NO: 40882 - DNA, 708 bp, Oryza sativa
tccataatttcgaaaggaatttgatatcgggtaccaaccgggtcaaagacccggatccgtttgtggaaagctgagagagacgcactcgggcccactcccaacggtcggggatgcgaaaagttgaccttacctgaaactttgcagacaagcccctcaactttcctgacatttgattaattcgtgaaatgtttctctcattcaaatttcatataactgaccactcaattttatatggacagaaaacagaaaatgcatagtatttttttaagataatgaaatataacatagtatgaaaaacaatggaatgcacaatggcgaattcatgatgcaaattgagggaggctagcgtaaaaacatagcatgagtggagcaatattaactgaatatttcccgatgaaatccaaatgctcatatcatcaaaagaaaaaaaagaaatccaaatgctcatatcatcaaaagaaaaagaaagctttctctacattaattcacagctaaattaacatatccaaagaataaatctatgaaaaaattggaccttttatataaaaagatatggtcttgatcttttcattaaaaaaattgatattgtctaattagaggcaagtcttccaagtggggctggtgtctcaactagccccaacaacctatccgccatcagaaatgtacaaaacatatatcaaattagaaaatagtattgtctcagtttta

SEQ ID NO: 40883 - DNA, 681 bp, Oryza sativa
tgtactttactctgtaatctccaaaagttaatattgttttagtcaaaaagaagttaatattgttttaatttaaagcatagaataaggctgctggatttattgaagaaatagcacctatagaacctttcaactgatatttgtaactattggttctatagaaatagcacctatagaacctttcaactatttgtataataataactttgggatttgaaggatcaaataacagtgacttcacagtcgaagtatgtgctgaaaaaggaaaaatagaaacgttgttgctaaatgaatagaaatgcccaatccccagctctcaaaaacaaatagaatgaaaaaaaaattgagaaaccgaggttaacttcaactgcttctctgtgtcagacttggcgagcgaaaccttcagccggtggcgagcgcacattactcttcactatgtgtaggtatcagctaaataccagaagcgtccgtattctattctaacaaaatacatatatgatctaccctgcttatcccttgaaatgacaaattgaactgcagtctgaaaatgagacataattttatcaaaatactaatagtaattagagaagagtggcacttacattgtactcggaacaattctgcaagcctttctacatataaaagcatccggtcaaatatcaatggttgatatacatgcatgca

SEQ ID NO: 40884 - DNA, 1513 bp, Oryza sativa
  unsure (1)..(1513): unsure at all n locations
agggagagaaaggaaaagaaaagaaaagagaggagaggaaaaagggaaagaaaaagagaaagaaaaaaaaattaagagggaaatttaaaatatttacaaatattgaatttaattgtaggattaatgaaaatatagttagataaactcttactaattaaatacctaaaatactagcatttaaatataggattaatgaaaatataattggataaattcctatagattatagataacttttagtactctccataagaaatcaattcgcggtattaatttagatgtagttaataattaaacaaatgtatgaattctcggaaattattgtggattatttgtgggaatctctataaataatcgatcaacggtagcattcggatttaattactagggtgttagccgtgtattatatttaatcatagactaaattgagtcgtataatattataagataattttaggattccgtccgacatttagctcgcgataagaaatttctaacctaatatatggatataatgctagggcnnncaaattaaaaacatacgaacaacaaatattggaaccggcaaaaaaatttaaaccaaaatgggggtttgccatagttcgcggttagtaaaataaataaaaaggaattgactttcgcattgaacttccattgggatttactgggatttttatttgaattctaaccgaattcaaatcaattttcgcacgtaactatagagaccgagggagccgcggatccaggtgaaagccaagaccgcaagacctcgagcaaggcaagtcatcactattccttgaacatgttgatcccaattgcgaaattattttgtttataaataaaattgcatgcaatgatgaatatcctacttgggattatgccatgccttgattattgtttacccttaaatctttgtaaccatgtctacgtatgagtccctagtcaattatgacaattgcttagaaatgctattctagaatcatgcatactcatatttatcaaatgctatatgcttgggcaattacctttgggaaggtaattgagatgcggcatgtggagacatgagcaccacattgccatgatgttgatgacatgatttgtgaaaggagaaataaaattaaacaaatgttttcgactggggcggctggaggacttgggtggtgtccggtaaaggctagtgccgtccctggtcagttaaggactgagccatgaagttaaacatgaaacgacctcagtacagccgtacttctcgaatgggtatagacctagcggagtagatagccgagcggaggcagtatccctgcatagtggtttcacttaggtgtgtggacgaacaagcagtttgctggcggatacccgatacggatggccaatggcggatacccgatacggatggctagagactgacttggcaagactacaagactacaaggagataccccaaaggggacagcgtggattgggttcaactacagaatgcgatgttaggcttgcgtgagttttccccctcggg

SEQ ID NO: 40885 - DNA, 1115 bp, Oryza sativa
aatcggagggataagttgagtcggatgaattccgcatgaaaattaattaatctgaatgaaattaatagaatgacgcatcagcataaacaaattcagcatgaacattcgctattgaaatttttggacagaattatcctgagttttcaaaaacattggccacttgtagacatgttcactactaaaaaatggccaagggggccggttcttaaagggccataggtgtcggttttccacctggcacctatgggtcagcattgatactagcaaccggcacctataaaaaaaataaatcggcacctttagcattgctcgagccaaaaaaaaaaagagctggctcgtaccaagccgaactcactaagtgctatcagtgtgcatgcgcccatcccaaaatcaaatcccaaaccccaaaatcatccacatatcgtccccaatataaattgacatcacagaatgaacatattcaacaacaaattcacaaaaacatgttctacaaatgacatcacagaataaacatatactagcaaccgctagccgcctcccctcttgagccgccgcctgccgctctccacctagcggaatcggcagaggggagggcgccgccacaacccgtcgcccgccgcctgccgccttccctcccgccagatccggtggaggggagggtgctgccgccgcccgtcgcccgccacctcccctcttgcaccgccacctgccgcctcccctcctgctggaatcggcggacgggagggtgccgccgcaacccgttgcccaccgcctaccgcctcccctctcgccagattcagcagaggggagggggccgccgccgtccatcgaccggcacctcccacttgcgccaccgcctgtcgctacccctcccgccggattcggcggatgagagggtgccgccaccacccgttgcccggctgccagtctcccctccagccaccgccgtgcgtgagagagaagtgagaagcgagagagagaggcaagagagagacagacgagagagacgagagaggtggagtattagataaggttgagtgcatggttgactcatatatccgtagggtataaggccaatgcgttggcctagatcagctcggaggctcggctcggtt

SEQ ID NO: 40886 - DNA, 863 bp, Oryza sativa
aatataaaacaatgaacaaaccatgtgattaaaaatcaatttagtatccagaatcattgcacggttcaataagaaaagaaaatatgtataatatgttcttatttacaccaaagcagtagcctgaatctaggggcaaaagtaactttctcatccactttgtactaaaagtttggctaaatttatataaacaaaagtagtactgtactctagcaatctttaaccttttttggtacaaatcaaatgaagtatggcctcaaaatctggaaacaaaagccattaacctgtcaggaccacatcagagaattactaattaactgtctacaatccaaagttgcagaaatgcataccatgtgtgcacattttgagatcattaagaagcatatttgatgggtgtaaagttatgttctaaagccaatggaataaccagcaaaaaaatatcatgtgctttgcacaaaggaatgcaaatgactaatgagaacagaacatgaaatttacctatttacttgccaaaagccatacatcaaagtttgcaccaaatgatatggtctaaacaatcacagtggacactaggcatcttttcctcgcaagaaaaatattagcgcaagtcaatgaatatgcacgtaaatacacaagtttctataaaaaaatggataaggataaaaatagataaataaggcaaacaagaaatgtctactacattcatatgctcaccttatatctcgcaacaatattgaaaaaggcataggctaaacaatcaaaacgagtataaagtacttcatcacatttttaacatttttaatagatgacgcaatcaattaacggatatacgtatgaccattcattttattcaaaagttctgtgca

SEQ ID NO: 40887 - DNA, 818 bp, Oryza sativa
tttgcataagtgtggagccacagcccagctaaccctggacagatgcctaggagtggtatagttgagtttgtctaggcctgaaaatatttttggctctatcattgttttgcatgaagaacaacaattgatagccactaagggcctctttgaatcgcaggattgaaaaaacagaggaataggaaaaacacgggattttggtaggaatgcatgtgtaaaacagatgattgcaaaacacaagaaaaatatagggacgaccgtttgattagaccgcaggaaaaatacaggaataagatgagagagatagacccaaggaaagttttccaagaagttagagtagatgttaactttcctacgtttttgctctagaattgtaggaatagggaagtttcctacgtttttccttttcttattcctacgaatcaaaggcatgaatagtgtaggatttcaattcctttgtttttcctctatttttcctccaattcaaaagggtcctaaatctttttgattcatactatctaggtctgttaagggcccctttgaatcgtaggattgaaaaaacggaggaataggaaaaacacaggattttggtaggaatgcaagtgtaaaaacagaggattgcaaaacacaggaaaaatataggaatgaccgtttgattagaccacaggaaaaatgcaggaattagatgagagagatagactctgggaaagttttccaagaggttagagtggatgttaaatttcctacgtttttgctctagaattgtaggaatagaaaagtttcctacatttttcattttctcattcctacgaatcaaaggc

SEQ ID NO: 40888 - DNA, 538 bp, Oryza sativa
tcataattctagacatctcctgttgtgttaggtgctggtgctagaagtggtgagattttggttaaacctgatactaacaaaacggtgtttaaatctgctggtatcatgtctactatgagtgcatcttcttcaaaatccaatgttgtgcatgcaaaatctcctgttgttgctcatgttgctaaatctagtagtgctaccaatgtgtctaatcatcgtgaaaaatatacttgttctttttgtggcaaagatggacatattgttggtttttgtttcagattagctcataaatagaaaaaggagagagagattgcttttgcaaaatcaaagtggcaaaaatcgggttttccctcgaggaaaccggtcagaccgcagtgggtcccgcggtcaaaccggctgaacagcctcggccagaccgaccactggtcaggccggcggtgaagcctcggtcagaccggtccccggtcaaaccggctgcacaccctcggtcagaccggcctcggaggaaattttatgaaaattctaaaattgattttgcacg

SEQ ID NO: 40889 - DNA, 601 bp, Oryza sativa
taaagttctttcgaaattctggagacatgaaaactagcacatatcttttgattgcacattctctctgtgtgagaacgttgcttgccttctaatctctcttcctcctgtgtcacaggaacattttgcatctataatttcccaaataaaatttgttatcgggtacaacaagttagagacctgcatccatttatagacaacagtgagacacattcaggaaatcaggaccaggggtaggggagatgaaaagttgattttgccagaacttttcatataagcccccttaatagtttctgaattactgaaatgattatctcatttgaattccataaccgaatcgaaaatgcatctggaaaagattgaaataacgtttcctgttacacgagagtacaatcaaagtacaagggttccctttgataagagccaatttatcagtaagtgttgtaatatcaattatattatgggaacacgatctaccagataagcttcaagaaaatgttggacaaacgacttgacttcttcggtttgttgcattagagaatagctaagtcgatccgagagctgacagctagaagctagtaaatcatgcataaccataagcttc

SEQ ID NO: 40890 - DNA, 596 bp, Oryza sativa
tttttaaaatctttacatcaaaatcgaagtggcaaaacgtgtacatataattaatcgactcatcagtcacatcaaacgatcaagatgacattgatactgcaatcatgctagatcaaattaaagctggtgaataaataaccaacgggagatccactatacgagtatatgacttgctgatgccttccgtccagttctgaaacttacgccgaccctgcacaattttcatttctgataccacccgatccaagttatgtatatgtatcactggtgcagaaagcttttttactcccggttggtaacccccatatagtcacggttttccaaccgggagtacgaatccagaactaaatatcgctatttttagtcccggttgataacaccaaccaggactaaagagagtagcgcttttttttttcttttgccagatttaatttctataatttctcccgaatttagtgccatgtatatccctaaatcaatccctaaatccccaattcaaagtaacatccaaatattaagttacttataaacataaatcaaatacatcacaaatcctaaaaaaaacactcaaatcaaatacatcacaaatcctaaaa

SEQ ID NO: 40891 - DNA, 1100 bp, Oryza sativa
cgctcctagtagtatctctatataattcatagatttttcttttgttttgtaaggagtactccctccatttcatattataaattgttttaacttttttgggtttaaccaagtttatagaaatattagcaacatctataataccagattagttttattaaatgtagcattgtatgtattttgataatatgttgttttgtgttgaaaatattgctatatttttctacaaacttggtcatacttaaagcaagtttaactaggaaaaaataaacctacttcatatataaagtcacaagaccttttatccaaaaattgaaactttcaactaaaagttcaaaaaaattatactcttggctcaaactttcaatataaaatccaaaaactgaaacttcccaaaaaaaaatcaaaaactttgtgctcttggctctcaatctttcgatacgaagttacagaatttgagaaaactttcaactgaaactcctcacgagggtgtcaagtagggatgaaaacggtcggaaacaatcggaaaaaaggctcacccattaccataaccatattttttctcagaaacaaaaacgatatcggaaatatcgaaaaaccagaaagggcagcttcgctggatgggctctccaattaatcttaattaaataattccctcaataagaagaaaaattatcctcagtcaatttcttgaccattgttctacaattttacttataaccaaattttacttataaccaaatattacttatgactttatagtaataaatcccgtaggctgcagcaacgtgctggatatcacccaacaaacataaaaaaaaaacatgccatgttctagtgagcatcttgatcgcggtaggatagctagctaaataaagggtcggatgcgatatggatgctagcgaatagagcttttctgaatcgtcattaatacaaggaaagagggaggaggaaccagaaggagaggagcaatagtttgggggatgatcccctccattaatttctcattctggatctttgctagggatggataaataatcttatcccaaacagaaaaggctagagtacgggtatgtgcttcacgtgaaatgggaaatatatat

SEQ ID NO: 40892 - DNA, 714 bp, Oryza sativa
agaagcagtgcctccgaaaccacaccttcgcctgatatctgcaccgggtaggcgggtgatcatgtttttggggagtgcctcctgcacgactgctcatcgccatgtctggattgctgccgccgctattggcggaggtggtgcgccgccgccgacgccgacaggagctggatccggagctggtgcgccaggaggaggtgccgtgaacgactacaacaacggaggcaattctgcctcaccatccagtggagggccattctcggggtataatcttctccttctactgctgttagcgctatactgtgtgcgctatgttcttggttctgttctacatgatgcctctagcatgttatcgcattactggtatgttcctgtttctgacattcatgatgcgcatagtatgctactggttatgttaagatcaccctacactgcttatgccatgatcatagtttcaatttcttggattaaaatatgccgaataatgactatatttccaacacggtctagggcgtccgtgatagagatgttgggggcgagttgcatgtgagaacaaggcaaggaacagttgaaagagggcgccgcctaaaatccaattatcaaaccagaagaaagtggaccgaccatctccaatgatggatttcgaaacactacggaagtgtgtaaggcccgcgacgatgtccttccagatgatcgtgtcaaggcgcaaaagatcgc

SEQ ID NO: 40893 - DNA, 567 bp, Oryza sativa
gacatcaagcactaccagcacgccaagaatgtcaccgtgctcctctccattggtggtgaaggtgaccagtactccctccccatgcccaggtcggccaagaacgtcgccgaccacctctgggacgcctacctcggcggccatcgccatggcttgttccaccccttcggcgacgccgaatgaaaacaaacaaaagggaaaaaattgcgccacgtgttaggactgcagcctcctcctgcacggcgacctcgcgactgcggctgtgggcctctcctccccctcatcaccgacgcctgcgggcctctcctcgccggcgcctacagcccccgcaccgcagcctgcaaccgccgtgccgtcgcttgcggcctcctcgccgcgccccgtgccacctttaccgcggacctcctcgtcgcgtgttgccgctccaccgccacaccctaccgcgccgccgccatggacctcctcgctaggatcaggattggtagggttagggttataaattttgtttcatctatctttttctttgacagtgaaaattgggtatattttgcactgtgggcaaaatggtca

SEQ ID NO: 40894 - DNA, 833 bp, Oryza sativa
acagggaggtcattggtttcaggttttgtccccaatttcagagttttgtctacctctttagcttcttggaaaaatggttgcagcacgttctgcctggagtttgtcgcagagtagatcatggttgttctcacagcagatcgtagatggggtcaaagtttgcgaggaggtctgacttgcatggagatagcaaacccagagaaggatcctcctggtaaaggcatgtccatctactgtgctatcaaccacaagtgtttcaagcttccgaatacctcctaaacctatttttatcatgatcccaaaaaatgtatacacatgattattatgggcaaatcttgaattcaataaaagtagcaaaagcctaatgggcgagcaatgggagcagaggcttgcagatcttactttggttctcactcgaaggagtactcctaactttggtttgctctagcatgtatccaagaatgctaatatctatatatagtcggcagtagttgaagaaaagaagcgaaatatatacatgcatggttgttgcatagtaaagttttgatatggaaatagtcagcaaatcatgggcatttccaaaattttgataaagttgtgtttggttttgtcgccgaatttaaactgaatttcttgtagggttgctaggcctattgttttgtttgaagcaaaccacagtatcaagcattgtgcagtaccaaagttttagcattagatggggacacgttaattaactttataaagataatacgtacatatccacgtatattgccctcaaacatgtacaaacatgagagaaaatttctattgtgttctttcttttttttttccatttg

SEQ ID NO: 40895 - DNA, 805 bp, Oryza sativa
caatcattaaaccggcacctttagcattgctcgaaccaaaaaaaaaacagagagccggctcgaatggagccgacctcactgagcaccatcgccatgcgcccaaatcaaattaaaatcctcaagtcacccacaaatctccaccaaaattgattgacatcacaaacatactccaataaaatcattcacaaatccaccaaaacatctaaaaaaatcttgtgccggcggcccaaggcttatctacttcgtctgtttcatcgccggcgggccatgttgtgcctcccctcccgccggatcgggcggaggggagcgcgccgctgcccgccgtcgcccgccgcctaccctcccgccggatcgggcggaggggagcgcgccgctgcccgccgcctcccctcccgccggatcggacggaggggagcgcgccactgcccgccgttgcccgccgcctcccctcccgccggatccggcggaggggagggcgccgtcgcctcccatctcgccgccgctgacgcctctgccaggacgctgccccaccgctgtcgcgcgctacagagaggcgagagagagagagaggcgagaaagaacgagagggatcgagaggcgaggcgataaggatgagacgtctgaggctataaggatgaggctgatgcgtcggcctgatcggctcggctcggtatggatagatgtcggttttttaaaaaatccggtacctataatttattattagtatcggttttaaagaagaaccgacacctatagtataggtgctggtttttctttagaaaccgacacctatattgcattaaag

SEQ ID NO: 40896 - DNA, 581 bp, Oryza sativa
tttcttccataaatcccaagtcattacttccattccatgcttcattgttgtccataatgaatattttgttgctgcaaatcattgttaagtggatgcggtatgtctatacatctggcactgtggtactcatcgtcccaaattgcagtggatctgcaatgttaagtttatgatgaagggcccaaaggtgatgagaaggcaagggtttaagttttgggtgccagcccgaatcctgctaacctacagacttggctgctttccgtttcatacccctggaccatttttttgtttgtgtttcgaagcttatgcatatgatgccacagaactagcctttctcatgttgtctcacattgtagctttgctatttatttgagatattttaccaacagctcttcttgagtagtaatttatttttatttcatatacaatgtttcttctccccctcacttattctttccctaagttgtcattctagtgatagttattcctgcagtgtttttctgtgaaccatgttctgtaggttgcttacagctatggccgccgttcatagctgacctcttttgttcgtctttgcaggatgagtc

SEQ ID NO: 40897 - DNA, 1409 bp, Oryza sativa
tcagaccaaatggaaggcattgggtttgaattcttataaacagagaatgaggattcacttatatgtcttccaaagtttgctactctactagagaagaccgcctcacagtatgtttcattgtaataaccctttaagatattgcacgcttgtaggattctacaatggaatttgaagttcctaagtgcagaaaatcaagaaacattacctattagcaaaatggactagagatttgcatgctagacttagagcagatacaatagcagactattagccaactataaacatattttaataagataaaagatgagagagaagagaagcgggctacaaatctgtagccagctgcagcacggactataagacgcaatatgtgtatgacgggtgggaccatatattaattgtatagtaagcaactactgtattaattggctattagattggctatagatgaattggagctattagtgggctatactattaaacttgctcttaggtgtaacatggaggatccctataggttgtgtgcactgtatgcatgactctcttggttgctacactacaatgtttgacggccacatctgtcctttttggaagctgtgtcactttctcttttcttggaccatcaaatttttttaaatttacggggtatataatagggttcgtaggcattaggaatgcagggtcgagcttgcaagtgaacacgatatcaatcattccacatatatatagtaaaagtagtaaggcccaccatgattatctgctaggttgtgcatcgagagaatggaaggtgaaattggtgaggaaaaataatcgaggagggagacgagtaaaaataaaaagtgagagagagcatatattcctaaagcctgggaacaagagcattatccacaaaagagatatgtattgagtattgtctactgatgagatggctatggggttaaacataccagggttcaatttgtgaaactcaatagatggatgacatagttagagccgtacataattccaatcgattttgctatatatttatcgaaaaatttttctctaaaaatttgacagatgtaattacagtacaatcgtagtgtaattacactgtaacttatatgtaattacactgtaactatagtgtaacttgcatgtagctttcaaaaatctctccgtaacatgttatttcggtaaaatggaggtcgtgggaacaaattctttcacatatgtgtgtgctatgatttgttttcttcctcaccaaaacaaatcgtgtaatagatttaacgattcaaaattatgtgaaacttacatataagttacactgtagttatatgcaagttacagtgtaattacatataagttacagtgtaattatactacgattgtactataattacatctatcaaatttttggagaaaaattt

SEQ ID NO: 40898 - DNA, 2985 bp, Oryza sativa
ggagatgggccgagagaaattcggcccatcaaccccgggggaggcaaattagacttttgcggaggaatttgatttggagggatttggatttggaattgaactcgacgatagatcggggattgagatcttgagatggcacggacactagacaacaagcgaagaaacaaatttcgcaattagggtttttaagagataattttcccgctatgcgccacgacggaacgggcgctacactaaaccgtatcacaataataagattaaaatattcttcacccgttgcaatgcacgggcatttatttctagtatatatgtgtgtgtggttagtatgattattagttaaaagttattgagtttgatttttcctgaaaaagagggtgcatataatttgggacgaagggagtatcttaaatgtatttaaatgatggcagaatcaaataattaagaaaaagagacacaaagatattttttctgatatctgtaggtttaattatccatgatctctctaaaattatatagatgaaatgaaacggccgaatcatctatttgattaacttggtaaatcaatattttcataaaataatctttatacttagcttataacaagtataagcaattaatgcagtagaagatagttttttttttagaatcgtatttttatttttatttttttccaaacatgcatgacagttgtgaatcattttattgagcaaaaaaattgcaatattataagtgtggagcaaataatcccgcaataatctgagcagatttttgccgatcagaaaatctagatgctgagtttggcgggaaaaccaaatacgccaacttcagaaagattttggcaatggccgtgatttggctttccaatattttgataattttcaaaattgctacaattaataatttaatacaaaagatcccaagcttcatgtgggatctaagatactgtaatctgccttgcttgtagctccgtagctcactgccattttcaaaaactaaaaaggttcgaaaaaaatttaatatatttgggaacaaaaagaaaactgattcggcagctaatatcggctataagaaacaataatcctatgcaagtgatctccctggagaaaaatttcagaagaaatttggttcagaaaacgcttccaatatctcattcattcccttactgattctgcaactaatatatatatggtttgcaatccggccaagagcaaagcattagcaacgaaggccggagagatctcagatggctcacttctgaacatacgattctatatcaacaattcgaaatgctcatatttgttgggaaggtttaagcaaagaggcaaagtcactactggccgttgggcacaaatcaaattaggcttagttctttaatttcagctactgtcttgtcacagatttcaaattgtttaatgatgtgttttgtacaaaagctttctgcatgtataaatttctttcaaattaaattcaaatatttttttttcaaaattataatagttgatactgaattggcttaatgactatattgtttcgcgtgcgtccattaagcccacacgaaacgctattacgaacacagtctaaatttgttgaaagtgagggactgatatatttcaaacatgacgacaaagcgcgacaagatatcatgggatccattccatcaacaatggcataaattgtatccctctttaatgtaagtcaaattaattaacctcactcacctctccatcctttcacggaggagcaaattgttgctgccttcgaacaaagaaatgacatggcctgaacggcttttgatctggcttctattaagagccttgccaacgtgcaggcttgaatgcttgaactgaggaaatttgactgaattttatccatccgaaaaattaagtttgatggccagggtttctgagtttcatgccctatcagatagctataatgtattgtttttaattggatagttataataacaaaataatctatcgatttgaaaccgaaattcaaaagtaaatgcatgcaaataatataatttccgagcaattcgactaatcaacatattcattgtctcaggttatgaacatggtaaaacacaaaattgaatccatgagccaatgatctattataataccagaattaatcaaaggtatatattagtgtttttgactaaaatgcacttgattgtcaagttcatgtacccgtgtactcatttttcaagttcttatactaaatcacacacacctaccaagctcttgtaccgttgcaacaaaactttatggaaattaaaaatatctcttaaaataaagatttttatgtggtatcagttcaaaggagtaatattaacgaaggataatttagcaataatgaatgaattggaatgacaatatgagatgttgttttttaatgaagagtgaaactatacatcatttatttttttgagtgccattgtttgctagattcctgtggagatcattacatatttcttttggtttgaaacctccaaatagtacttctcatgtttctgggaattggcttgtacactttgactaaaaaacaaagaaacacattctactagtagcatctactatatgtcgggttctttggctaagtagaaatgatatggtttttaacaaatccctaatgaaatcttatatacaggtactattcaggataatgtactgctccaattttgaccacaactataaaggtgtaaaggtgtgatgaggacaaggaactaatatatactacgtaccagaagctagaaataatggtcatgcagatatttgccaacatcggatggagatttacaaataaatttgaataaatgtcttctatattttgtgttgatatcattagttattgtctagtcttttgatttttttttatgttccccattcagtaataagtggttgtagcttgtttgaagctaaggctgagaatcttttcattatctaaaaagaagtttcatagaatgagatgaatctattcttttag

SEQ ID NO: 40899 - DNA, 1265 bp, Oryza sativa
tattgccttttcgagtagggtgtctgtttagtcttttgcacttttgttgggctcggatttagctatttgattagggagtccctagccttttgcacctttttttttgtctggtcggccaaccaaattttattaagaagaagagagggttacaaggtttacgagttcgacattaggccgtcgagtcaggcaacaattcaattggctgcagccccaaagaaaaaaaaagactaacagctaatcacattgcctaaaagttctagcctccttccatactatgataacctctctgatgtctcaaatagctaacctgctgtgcgcgatcactgctcaaagatacgggctttacgctccttcgaaatcagccaacaaaccatcatgagtgaatcaaaagctttccctgtagctcgcactgaaattcaaccttgccatcagccacaagtccacaagctgagcaccactctctgccggcagctgaaactacaaaatatttttcttagatgttctcaacactgtagctaggcttaggaggcatcaagaatgtagcgataagtttatcttctccatcgacataatatgattatggtgcaaatatgataggccattgataggatgaagtaagcattatcctcatgcgaataatgggccaataagaaggtgatcgatgtggcagtgtgagtttttaattcaccaaagaatgtggtgcaaaagtcaatgtccatgcatccagtggagtatgacctcatatttgtttctctaaaataaatccgcgcaatgcaagcgtatccatgcatgactaacgcaagcgatagagatagaataatttgtgcccagagcatcgaccaattaatagtgagaagaaagtacacaacataagccggttcttttgcaaagcatgtccttgcttgatcggtgacataaattaatttcctctgtgctgtacatcatacatcacatttattttctaagatagtggacattttttaagaaaatggccaaagcgtacacggccaaaactccatgtacaatgtatgaaaacaaggtgttaatttaagagtaaagtccatcaccggtccctaaacttgtaccgctgtgtcatctcggtccctaaactcgcaaatcgaccatttaggtcctcaaacttgttcgactgtgtcatcctggtccctaaacttgcagatcactcgtttaggtcctccaacttgttcagttgtgtcaccccggtccctaaacggggagtccactagttatagagcggccgccgcccg

SEQ ID NO: 40900 - DNA, 1780 bp, Oryza sativa
tgtttaggcttaggcttattggccctagacttttaagtcagcttattgggttatatgatttataagccagtggatttaatgtcctaagtttagtggtggagtcatacatatatctcatataagccaaaaaagcttctccaacctagcttttggcttaatagtgttagagtggcttatggcttcaaaaaaagccaaatgaaaaagctgcttgtttgttttgacttagacttttcgacttataagtaggcttataagcctaaacaaagagggccttaatagtgttagagtggcttatggcttcaaaaaagccaaacggaaaagctgtttgtttgtttaggcttatacttttcgacttaaagttggcttataagcctaaacaaagagggcctaaaataagtgcagtcatggatatccatgtccaatatttgaccgtccgtcttatttaaaaaatttatataaaattaaaaaaaatagtcacacataaagtactattcatgttttatcatccaataacaataaaaatactaatcataaaaaattcaaataagatgaatggttaaatattggacataaatagtgcaaaacaatacttattttaggacggagggagtagtaaataagcgcaatgtctaattgataaatgataggttttgtataagtgtggagccacagcccagctaaccctggacagatgcctaggagtggtatagttgagtttgtctaggcctgaaaatatttttggctctatcattgttttgcatgaagaacaacaattgatagccactaagggcctctttgaatcgcaggattgaaaaaacagaggaataggaaaaacacgggattttggtaggaatgcatgtgtaaaacagatgattgcaaaacacaagaaaaatatagggacgaccgtttgattagaccgcaggaaaaatacaggaataagatgagagagatagacccaaggaaagttttccaagaagttagagtagatgttaactttcctaagtttttgctctagaattgtaggaatagggaagtttcctacatttttcattttctcattcctacgaatcaaaggcatgaatagtgtaggatttcaattcctttgtttttcctccattttccctccaattcaaagggggcctaaattcgctatgtaacaacaagtagttaattgtgtgatgggttactaaggccccctttgaatcaaaggaaaaaccataggaattctagaggattttatcctatgggaaataatcctataaagtcatataaaacaaaggattgtttcctatcaattcctttgaaattcctatggaatgaaccttactagagcaattttggagaaaaataagcatgaggtctcacctcatattttcctcttcatatgtctaacgtttctgcgtttttcctgtgtgctaatcaaacgacagtttgaagactttcctgtgtttcgaaatcctgtggcattcaattcttacattttttctattcctctgttttcttaatcctgctattcaaagaggccctaatttttagctcttggactcttggttaactatatatacgactcttgtcgggatctatctgccccacacaactaaacatggagaataaaattattttcactagaaagtcaaaatgtttattggttaaacatgttatttacaacgaaaatcatgctcgattatttgactaggtagaatgtgaataggggtatatatgaaagcaagattcattcccaatgatgatcagatcaagatcaatatattgcaatctggaa

SEQ ID NO: 40901 - DNA, 591 bp, Oryza sativa
cgctttttcccgctccttttactttttttctcattcttttttattttttacgaactattttttcgccactttcttagggaatcagatggagcttttttagatgtgaattttttaagtagggccggacggaatgaaatgttttgaattttttaagtagcagtgatagagaagcatacaaagcttatatacatgcgtataaaaaaatatacagtttacaaagtttgtatacgtgtatataaagtttgtatacatatatagtattaggaaataaaaacccaaaaaaagaaagaaaaaaaagaaccgaaaaaaagaaggaaaccagaaaacccatacgtgggaataggattatataggaataggattttcccccctttttaaggggaattagatctactgtttttttccggcttgcaaatcggacatgttttttttttcgccacttttttccgccttgcataggaatcggacatttttttttgttgtttttccctttttaaggggaactgaatctacgatttttttattttattcgctattttttctcaagctttgggaattggacttctttttttttttgctattttttattta

SEQ ID NO: 40902 - DNA, 629 bp, Oryza sativa
attcacaaaatacttcttacaattttttcaaaaatcttcgctacattacatcttttcctaagatatttgtcacagggtacgagtactaccaagaggccaacgccagtccatagactggaagatcttctcggctgtaacattctgaaaattcgaccaacaaaatcaaagactccaaaaattcaaatcttcaaaaaaaaaaactttttaaataaattgcatcatgccaattttattcgaagattttattggattttgatttcggatttcatcgatcacaaatgggaggaaattaactaggaataaaccctaaaaatcaagtgggctaaataaataattaaaatataaattaaaataaagattcggtgggtttggaaataaataaaatgttatcgcaaccatattaacaataattaaattttaatacgatggaatgagaattaactttaattaaaaattcaaatgaattatataaacaaaatatgagtgatattaaattaggtgaatcttcaattagaataatataaatatggggtaaaacttcatttatacaaaaaattaagaatttcggaatgaaattcatatgagaaacactctaaaatcggtttattggaaaagtgcattgttcattg

SEQ ID NO: 40903 - DNA, 584 bp, Oryza sativa
ctgaagcagcagggaaaaccaatgacgagatgtgtcgcttcgttgtaatacaagagatagcagaggaatgatgactactaatcaccacgatacaattaactccatgctgccttcttttcttcgctaccaagctcaaatcttcactcctgtgctcctttttgttactgaaacctcccaatcccatatatatatatatatatatatatatatatatatatatatatatatattaaatttgtttggtgctccatggtgcccgggcaccattgttgaaattgagtatataaccaattcaaatgagtatgaaactttttcaattatttaggtattaacattaactactttactaactacttcaaagcaagtttgaactgaatttgaacttgtttttgttagattttgattctaggtatatagcatccatacatataattagttaggtatgtaatcatgaattgtgaaataagttaaatttgagttgttttgttgatagatatatgtatgaatcgaattcttataactacgtatatactccccatttaaaaattttgaaaaatttgagtaattttctgcctttgaaacca

SEQ ID NO: 40904 - DNA, 1233 bp, Oryza sativa
cacactgccgccgccgcctcgcttcgccggagccgtcgccgccgccgtgcgcccagggcagcgcgcccctgcgttaggccgtcgcgcctcctcctctcctcctatagggcccgcgcgttcccgcgtcctccctcgtcgcacggcgcgtgggcggcacgcgcggcaggtggtggttggttcgggagggcggcgtcgtcgccggtcaccgggtggtgcggcgccagggcgcagattggggcggtcaacgtaagttaggctcatggcatacaagtaactccaaaattttttgtggcacacaagtaaccagtaaattttttaatggcatagggataaaagacttttagatgtgccttcttgggaagttcactgggactacggttatctgaactgttgaatcatcaacaaactaaagtttggtgaattatgctttaccatagttttcgtatcacccacgtaataaacaggttcagaaaagaaggctaaacttcagcagaagagccatttagtgccatttttacactataatggtaaatttcacatgcagaggccaatcctaatgggccaggggatctgtggataaggcccaggtgcatggctggggatggccagtggctgaggccccctcatccgcaccgcgcagttccatctccccacttatgttttatttttgttttctccatcgcgcgcctcatttgctctgatcggccatcgcatgtatgctcttattttattgatgtgaatcaagtttgaattgatgaatttaaaccttgtttgcatttacgtgcataaatgctttggaactttactctcaagagatatatatacagacactgaggcaggtgaaatgagtgagaccaaaatcataaacatcctcacaccgatatattttcggggttctgtatgacggttttacagttcaccagcacacatgtataggattgggagctgatctggaaatgaaaatggtgcaaattatattgagatacgtatataggattggaaggtattagagcaggtacaataatcctatgtaagcaggctataacaacaaacaagttatatttatgttgagaaaaaagagtgtgtgcgtgaagagagaagctagtgtgggcacttattttgtcgccagagctaacaccggctcccatgcatgctgtggggtccactagtgctcagcttatgtgggtgaccagctaaccttcctcccgctagtgtgaaagttgctcattcagg

SEQ ID NO: 40905 - DNA, 3523 bp, Oryza sativa
cctcccagagggcggtaggcgactatttccgtcaattttcaaaatggaaaattatttttgtaaaacttttaataagaaaaattataaataaaaaaaattctgattgtattgtggataaaataggtgccaatttcatagaataaaagtcagtatgtggctttttggtgtgtctggaactaatctctatgtgtcgttgatattgatgtttcatcattggtattggtgaaagtaccttcatgtttaaacaagaggtataactcttagtatccttgttactactatatcgaaagaactaatacgttatataaccatcattctcatcaatcacccactctaaatattattggttttgtgcggtgtttaacaccatattgtaagccatggttaaaaaaataacacgattccaccatataattattagcaggaatagtacattgcatcagcaataatagccgcttattgtaatgtctattttagaacgtatttacatgatagttgttctcaagactaagtatacataagattgatataaccacattaatttgtgagattattaatatcaccatgatatcaaccatacacaacaattaatatatagttgcacatagctcatactatcagttactcctacttaatgcgtattactttgcaaaaaatatccataagtccatatatatactacatgttgcctggagctacggtgacaaggatgatgaatagatgaaacgaaagccataagtccattgcttgttaccgttaataatgaaaaatatatataatgaaatattagatgtcgttttatcaatcaagagtaagaaaagtattgacctactagtatttttttagactagtccatctacaaagaaaattcaactatactcagatgtcacttgtacaaatagagaaaaccgatattatgtaatacaactacgggtaaaccttaaatgcaacttttttactatgattcctctagaacgtaagattcttaaagtataggaatagagaaaacatagaattaaaaatatcatgccatgtaaaatcctacaagaaagaaagctacagaatttattcaaaacatgtatttggtgtaccatagaaaaaaacaaaagaattttaagattatatgttgatttgctagagagataatggagagagaaaatgccttaaaatatcaaaggaatttgaaataatgaggttgaacctaatgctaaaattcatcaacattgtggaggaatttttcctatcctttaaattgccttaatttgaagcaatcctgcaatcataaggactcattcctttggattggatcctgtcttttccttaaaaaatccttcaatcccaataagccctatatgtttacccattaaaaattactcctacctactttctccgtcccataataaatttattttgcttgtccgaaaataattttatttttagagtaactattacatcgaagtttgtgaaataagaaataattatattatgagtagataaagtgaggaatagttgtattgaaattcgataaagtaggggaattctagtttttttattagtatgtgtggaataggtgaaaataatgaatttattttagaacggagataggacataacttctgcatgtatgttaatatagtgtctaaaagattaatgtttcttttttctggtccagcagctaccaatctacttctactataccatcacatgcctgcctatctctgacaataccttaccaaaatatcagaggcaccattttacagaaacacatggataggaaagagcaacttggagaaaggggaacaaggggctgtggctcaaacggagcaacctcaagccgcggcttttgtgtgtcgtttgtgtgctcaattgttgagagatcggcttcttcttcttcgtcacctacaaactgctgagagggagagcacgtaagtacgcaatcaaggctgacacgctaacggccgacatcgcctacctgccatcaattaagctttagctatatatactaccactgtatagctaggtcccatgttgcgttggtgacactagctgctgctgtcatcacgcattccgaggaaacacatgtttttaattattttgttaattacaacagctttgatacaatttcgatcattttattcgttttaagtcactgagcgtttcaagagttgtccttccggctaggacaaattaaaatggtagtataagatattgttttttaataaaaatgaaacaatctattatttatttattaattgtctttttgttagatttctctggagatcagtacaaacttcttttggtctatatcctcgtataatatactccaactcatatttttggaaactggcttgtgggtattgataaaaggaccaataaattcattcttgtaggacaaatcactgtttaaatcttatatgtaggtactttttggaggcaacgcactagattcggttttggacgtaactacaatggagtgatgaggacatcaaacttattcacactgcatgctgcaacctaggggcaatggtttgcagatttttttcaacttcggatggagattcacaaatagggtgcaataattgtgaagtcttttgtctagtgttggtggttattagtgggtgcatcacttcatgttttcttttggaggtgccattatgaaattgtttgttgtgtgtgcttatcaatgaactgattttttaataataagctgtagctcttagagcaaagaccgaaattatattccattatttagaaaataatttatggtcagagatagatgtttgacataggataaatctaaaacgacaaataacaagcagtaattcaaaacgatgagaatgttcattcgatgcgtttgtaatgccatttggacttctaatacctatgtggtggtttgtttgcacattccaacaaattttaatgccatgaaagcattctttacatggatgtcgttgaaggtgtatttttaatacatccaatgtgaattaagatattgatactcaaaatttcaatacataatattgacattgctgttgttttgtttgtctcaacggttttcaatgcatatactagcttctcgaatactactacattttggtggtcccacggtgaaagaccagcagatgcctgcattggagatttggagctgaatctgtatttctagagacagaatatgctctttagtagatttatgggctacgccgtttgcttacatccataagattaattggtgagtgtataattagtgatatgtgtttttcaagctctttaagtagcttatggattataggcacacttctcaagcttctaacgatactccctccgttccataatataagacacaaccacttttcttagatgttacataataaaaggcatgcatgcaagcatgcaattaactatagcatcttctccattaaattattacttttttaaatcctccactctcatgttatctaattctattggatacatgcattatatttattaggatgatccaaactacaagatgataataattattt

SEQ ID NO: 40906 - DNA, 608 bp, Oryza sativa
acttatgtttttgtgatttttccaactaagaatgaatcatttgaatatttaaataccactgcattttctgagtttttttctttaattgaatgccatttgatttttttctttagtgtcagttaattctgttatgctgcctgtaatctaattacttactttgttccaaatttctctaataacagtcacatttgtcacatatttccttttagttgccatgatatttggactatgatctgatgtgtgcttgtctgtttaatttatgactccaggcaatctatgagggcatacttgttgatctgccatttgcaacattcttcttgagtaaactaaaacacaagtatgtctctcaccgtgtgctcaattatgtgttatttatcgcgattgtcgattgatggttgtgaatgtttgccagtgactaggggtgataatggcccaattttttagagtacaaaaaataagggctgggtctaaaatgcggtgagctgagtttctatacatttttgacctaaaagatatatgtgggctaggtagggttgtgaaagaacccatgggagacccattccacccctaccaatgactgggttaaattttctttaaagcatatcaat

SEQ ID NO: 40907 - DNA, 1389 bp, Oryza sativa
ttgttgctttatgtcaacagtctgcatgcacgatcaattcttttttcatcttaaaattatttatgatgcatgcagttctttgattggccatacatgtatgaacatggaactaatattattttatttttctcgcaaaataattttatactatttattttttataactttttttaatataatgtatattatgattaaaattcatatgcaatcttcttgaatatgccaagagccatccctttcccacttcgttctggatgttcatttgtggatacttgaattcttaaaatgcacattaaattattttgattatgaatatcttacatatattttatttccaaaccaggcggctgacatcattgcagtctgtacatcactgctggacgcgttgccaaccattacatcacctaccggaagtaagtatcatgccagtaaaaatattccccattatttgataatatgacttgctaatatcatgcagtagcattttctattgccatttgtttctatcagagattcttgtgatactgagtaacacttgcaacatatcttctgaagtctaagtaatacacctgcagaagtttgttggaggcatgcttatgtggctcaatatttgcccctaataagctttttagtacctttttgataatgtactctaatagtctaatgtaagttgtatccttttaaatatatgcaggggcagatgacgacgatgacacacccatggatgatgtcattaatggtcttgatgctgatttggaaaaacaaattactgcagcaattgattcaaggttgcttcaacatttggtatgcagtcccttttctggtcaagatttaatggactccatactattgttgctattatctgacagctgcttggatcattaggtgaatgctctgttcagaggcacaattagtacagactattcttatccaactggaccgtcagatattgaggtggaagctgtaggatctatatgtgcttttcttcatgtcacattcaacacattgcctgcagagcggattatgactggcctggcctaccggactgaaatagttcctgcactatggaacttcataaagcgatgtaatgagaaccaaagctggccacaattttccaagtttgtctcttctccgcctgcagatgccgtgggttggctcctacctgtatctgtattctgtcccatatacaagtaaggcatattatttcatatcactacaaattttctggttatgtctatatatttattttatttgatttattgcttgagcctttttctctcaagcaactatagtgtgggaaattgaatcttttctctcaggttgtatcttatatatggtttgttactttaccatttatcaggcacatgttgaagataattgataacgggg

SEQ ID NO: 40908 - DNA, 713 bp, Oryza sativa
catgaacgtagtcacatgtggatatactactaggacggggatgtattctggctttgtttccatatactgtatgtttcccattaggccccgttggattaatcttctcaagatgaagattaaaagcgggcacataaaactagaattccattaatacgtgattaattgagttttaatattacaaacttaaaaaataatatatttgatattttaaatcaacttttatatagaaattttctgcacgaaacatatcgttttatactttaaaaaaggtggtaacggaaactgagataaaatctttatcttcattagaaaataacgggaccttactagtagaagtcctttttttaagagttaggtcttgttcttttcttcaataaaagttgaatgaaaatttggatattcgtggcacgttttttaaactgctaaatagtgcgtttcgtgaaaaatttctatatgaaagttgctctaaaatatcagataaatatatttttctactttgtaataattaaaactcaattaattatatgttaataccacctcgatttatataaaacaattaatcttcatcttcatttacgtgagtttcgaacaacaccttagtagaaaacttatactacttgtatagtggatacaggatgcctgtctcctacagtatatcaatgttttatccccagtgtatgcacatattactccggctgacgcttgcctgaaat

SEQ ID NO: 40909 - DNA, 653 bp, Oryza sativa
tcatctggtctctaaacaatactaacatgtcaaatatttaaaatgaaccgattacctctttttttttatccataggtatgattgattattacttaaatggcagacaagacgcagttttgttcggcgccgttgcatgattaatttaggtgcatcctgaccggtaccaaacatagatatacattacaaagtttgttgaaagatacatatatgcaaatacaagtatagaacaatgataatttatttatctttgattcctagaacaaattagtgtcaaagtgcatgcatgtaattaaaattttattctgataccttttctttctgcacgaatgcatagagtacacatttagagttggataatttagatgagaaggcaccaacttttgtagacaagagagatttgtgaaatgctaccttagcttctctttctttctctctttttgtctcttgtctccataaaagtatagtagtgcctacagctagctgctctgccatgtggcctctcggttttcgttgcaacttttgggcaggcaggtacatgaatccttattagatatagctttcatgtgcaaaatttaaataaatgtaggccttttcgctaaaaccgtgggcaatcaagctattttaatattgctgagagacatcgtcaatgaaag

SEQ ID NO: 40910 - DNA, 849 bp, Oryza sativa
tttcttggttagttcatgaatgtttcattcaattggttgtgggttcaattctcagtcccctttgctgtattctctatattttcttctttagttattgtctatcttttcttatttgggtatatatataatgttaaaagcatgtttgacaaagcttctgaaatggagccgcctgaatcccactctgctatctagtttatttttttaagatcactttagtccacttcaccttttttagtgcagctaaaactgttcggttggacttcggttttaggaggggtgaaccaagggcggagctacatagaagggcgggattttttttttttgggggggggggagggtaggcagaagggctcgagaacccggtcaaaacaatttttctatagttcttctattttcatcatatgtataacccccttaatccaaacttagatactcgtataatcctaactctaggtgtaaattaaagtatagtaaagcaagtggcacctcttcatttcattctatctccgtaaactggagccctactaaatagatctagatatacataaccatcaaaagaaaaatatcctatgttcgccgcgcggcgtagggatcagctaactagaagtcttgatctaatcctctacttgagaagttcagttgtttcttctctaaaatatcccccaacatactcccctttttagcttacccaataaaagggacaacaaattgttgtctcttcacgtggatgactcaacggcacggccgtttgccgcccgtgtgcatgcatgcatgcaaagcacacgtggatgactcaaagtcacatactacatgtacactgttaaattaatttaacccacaaataattgg

SEQ ID NO: 40911 - DNA, 818 bp, Oryza sativa
agcgccaaatagcgtggcgctgaatatgtgttggcacgctctccaaacacatgcaaacacagtgaggagggctcacaccgaaaaataacaccaagttcacagaggggaactcaccttgcctcccatgcagacaaccacaacaccagcaaaaaatttcacaatttgaccctttgcaaaaactatttttacaaaagaaccgtcaccaaaacttatttcaaaaataacccttggtgttgaatttagacacctcagcgccaaatagcgtggcgctgaatatgcgttggcacgctctccaaacacatgcaaacacagtgaggagggcccacaccgaaaaataacaccaagttcacagaggggaactcaccttgcctcccatgcagacaaccacaacaccaacaaaaattttcacaatttgaccctttgcaaaaactatttttacaaatgaaccgtcaccaaaacttatttcaaaaataacccttggcgctgaacaaaaaagtcatttttaaaataagttttggcagcggttatttgtaaaaaaagtttttgcaaagggtcgaattgtgaaaatttcagcaacaccaaggagcctatataaacaccaccacagccatgcacccctccatttttctcctcccctccctgatcaagctctgtaactaccaccactccgttccctcgcgcattggctgccacctctgcgcttgctccgccgtggccgggtccggctgggcctcagttgagcaagaggacaggaagtccgccgcgccattgatcagtgtgagaatgactaactttgaacgactaacccctaacatcta

SEQ ID NO: 40912 - DNA, 765 bp, Oryza sativa
tcctgcagccccggaccccatcctcggcgatgtcgcccacgttgtcgcccaggttgtccgcgattcgctgcccacattggattcacaccccccttccaaacccttttttaaggattaattttttttggaaggaaggaaccaatgggggtaaatttgtaagcttcccaaacttttaaacggttttttaaacaatccatttatataaaaccatttaataaaatcttcttgtatatataatttctttcaaaaaaactatttcaaaccaaaatcgatctcaactctatattttctccgttatatgttatacaacgttttggcctcttcatacatcatctaaattcactaatatctatataaatttgcgcacatatacatattgtacgtatctgaattcatgcataaatctattcaaattatacccaaaatatcttataatacgaaacgaaaagaaaacaatatttagttcattcgtttgtaacctcaaataatcattacaaatattcagatattgagctattcagtcaaaagaacaatccaaagtggatgcatacacaaatcaactgccaaaatagatttgtttcaatcgatctttttaaaaagaaagttggtttgaattgaattcacttaaatttctaagtcaaattcagtttaaatttgtccacaatttaaatatttcctagcgagaccttttaaataattccttttctccaaacaagacaataaattttcaatctctctcctatatttctatgaataaatccggta

SEQ ID NO: 40913 - DNA, 1136 bp, Oryza sativa
cttgcttgttaataatgtgatatggccgggatatccgaagtgaaaattattttttctcgatcgacacgatgtcatagaggtataggttcaaagtgaaacttatttttgttctaagcgatgtggaagtatatattcaataatcacaaagtgtaacttttctaaaattaattaattaatttgtatgtttcattttacaatgtgttttgatttttttataaataaaaattttaaagtttgatgaagtttttcgaaaaaacgtactaatcctttttaatacaactagtagtatgcacgtacgtactttgcaacagaccatgcccatataagtggataggtagattgaggataaagcactggaagcatggaccatacccatataatcggatgcgtggattgaggataaagaactggaaatacggccaatcatgcataattggggattggattgaagataaagagtggatcctgcaagggtaactccacttttaaagtagtagagaaataaatatactatcaaaatataattaacttggatttagtaaaactaatttggtattgtaagtgtttttacgctttctctatatatttaatcaaacatcgttttttaatataaaatggaggcatatcaattaacatatacttagtgattatagctagggaaggggtaaagctgcttgaacatgcattgtgtcgataattggggtgcaacctaggaatatatagccgtcggacatccatagccgactaggctattgaccttaagtacagaagatcgagagcaactttcagtcaaatcaagtcacgcacggcacgattaacaattatatgtgcatgcacgtgacttagaccacatcttttcattgattcaataatacaattaacagtggacacttttagaatctctatctagctaatctctaccccctctctcaataaaaactttacaacttgcatgaacaataatcgtatcgtttcaatctcaacaaaatagtatgcatatattaacagtggccttaaaccaagagtcaatcaacaatctacaataccccctagagtcaaatttgtttgaaattctttacacgtctattttttttatagaggattaactatttcctcacatataaacttaagtttcg

SEQ ID NO: 40914 - DNA, 1590 bp, Oryza sativa
aaaagatatcaacattttcaacataatacaaatacactataaaaacatattcaatgatgaatttaataaaactaatttggtgttgtagatgttatttctttctataaatttgatcaaactttaataagtttgacatagatcagacccaaaatgtcttttagtataagacggagggatgacacgaagtaaattatactgataaatcatcgagcaaacacctattgagatcacccgtttcttctgcagtgagcaaacctcaactcttataatttctcagtacttaattgacaaaattccctatctagcatcagaaaaaattgctcttccctctatagcacccaaacttcaaaagatccctatctatgcaccctcaaaatttttgttccctatctagcacttccgttagttttgatggtgacggtgttaaccagcatgagaaaagacggttttgcccttctatattttatacttttttcccattctctgttcactttttttttcttctttgttttttcatttagtgtccagccgtgttcaagtctgtgcatacttcttttttggccaatataatatgagaaaattagatcaacaacgtacttcttttttagagaaatttgacagtatgtttgcaacaacagcatgtacgcaacacaataatgaaccaaataaattttagagagcatccaaattcacatccatagataaccataaccatccagatcacattaaagttttctaaaccaaatttgcatatgtagtcctagatagagaattttctctatttaattccatcctacctacatattccactacatattccaagctcatcaaaccagggctgagattatcatggacctcagattatccccattatcctccacagcacagtcctgtacagcttctctgaaatcttacaaataactgtagaaatatattggtaatatgcatatataatccaaaatatccaacaatgacctacaatttacctgaatcagtcactgttcatcaaagcagccgaactgaacatcaatacacataatgtgaatgtcattactagtattcatgctgaaacatcagcaaaacattgcaaagcaggtttgtggaacaatcagaggggcaagttaccaagttacaggctgtgttccaaatctctcacgcgctcgcagaacaaagcaagtcattaacatatgattaattaagtattagcttaaaaatgaattaatatgatttgtttgaaacactttcctataagatgttttttacaaaaaatgcaacatttaacagttcgaaaaacgtgtgaaaaacaatggagtagatggcatgagatatgctactaggctgctaggcaacatcgtgtagatggcatgagatacaggcaacaatgtggggacatgaatatcaaacttcgttcaaaagggaccaatcgggctgaatatgacagttgtttaaattaatattagcatagttcagccagccaaaattagggttaaacgccccgacaaaagatcgtgtcaaagaacattcaagttactaacattcacaaaattatcatctctaggtaacttcagtcttgctgtacatcttcaagcc

SEQ ID NO: 40915 - DNA, 1753 bp, Oryza sativa
aattagttacatatataagcagcatctgtatttcttatatttatttttctaaagcgggacgacaatgctgatgatcagagaacgtgagcagcgtcatcgcactacagattagttatgccaattaataagaaataaagtaaatcaattagaaggcaggagatgttcttaatcttatctattcgttgccggcacacatagtttcaacgcatcactttttttacatgacctcatttctacattgtttatttatgttaagtccagtgacgaagttaggattttttttttctcaacagggctcaagtcttaggggctgtttgttcccagccacactttaccattacttgccaacaaaagttgccacaccttgcctaaggtgaggtgatcaaattgttagccacaacttactaagcctaagggaatcttgccacacttttttgagccattgacacgtgggacccaatttgttgaaggggaatcttgccacaactgtggctacaatcaaacacctgtcaaatttgcataaccttaggcgtggcaaactgtggcaaagtgtggcttgcaaccaaacacacccttacctacagtcttgccacatactccctttctagaataataagttcatttttttccttccgtttatctcaaaagaggttcattttgagcaattgtatcagaatttgtaaaagtatgagataaatatattgagaatagtaaataattacattgagacttgataaagtgaggatattctattttttattttgtattggtatgtataggatggataaaatgagcttattttagatcggagagactaatatttgtggcaagattctcatctcactttcgacgagggtcagtcgcaaatatttcacaaacgtagacattcttaaagcaaacatgtgacattgtttggttgtgaaaaatctgtatatcacaatattgaatgtgttgaaggcacgcaaagattgtgctaaaaatgtttgttaattttgattctgcaatttctacacctaaagcttgatgctcgatatgggcctttcatgagtgcaagactccaaagtaattacttgggccaaacaacaaagcccagtcgagtcacttttctattgggcctatttgggccaattggtatgattgatgagtcaattactagtttactacccatcccccatcattttggacattcatggggttgattggatggaatccataatgagatggtgcttattttttattcctcccgtttgtccaaagataagtttatttttgagtaacattatattggagtttgcaaaaatagagaataactgcattagaaagtgataaagaaagagataattgcattggaatttgagaaagtgaggatatctggtccttttcattttgtattggtgtatatgagatatataaaaatgaaattattttggaatggagggtgtatattcagatacatcagtattcaggaaatagagagcaagcacatacagatcatgtgacagcagacacgagcgtgtgaccggctgaccgctgctgtgcactactactctctgatttctgcttctccatgcaacagaacagaagaagtgaagaacaatatatgcaatgcaatcccaagctagctgcttcatgaacgtagtcacatgtggatatactactaggacggtaatgtattctggctttgtttccatatactgtatgtttcccattaggccccgttggattaatcttctcaagatgaagattaaaagcg

SEQ ID NO: 40916 - DNA, 784 bp, Oryza sativa
agtatatacaatgttttatccccagtgtatgcacatattactccgtctgacgcttgcctgaaatctgcaatgcagtcttacgttcctactgctatcagtatgttctgcatatctatgatgatttgtcacttcatttcaggatatcagtgttgctaatcagggtctgattatcaaaaccagtgcaaaatcgtatcccttttcgaattgtgtcccttaactataaaactggatgtattgtatcttatgactaaaaaccggtgcaaattgactatttcggtggtttgggaagacaaaacaggttgaccgtggtcagacttgctgatcagcataggctaccgtagaactcacatgtcaacgcccactcttcttctaccctctctttcttctcttttactcccaaccaagccaagcagtatgggaggtggccacggtgagcccctcggagcacgttcgcctatccaccatcgttcttgtagctcggagaggcctctccgtctcaacaccgtcatcccttgatccagttttcatagttgagcgagtctctgtacctgattttgcaattgagggatacgattcgacgagtacaatagttgagggagctaaattagactaattctcaattaatatagctcagtgatgtcaaaatatgcaaaagtccaaccatcgagtcactcctctattggcccgtcttccattttttattttagcacaacaaatttgatcttttttccttttatgcatttatataattggaaatttggaattacatttttaattttttttg

SEQ ID NO: 40917 - DNA, 570 bp, Oryza sativa
ttatggtgattgaatcaaggaacgtaaaggagagatagaacacttattttggattaggtttggggaagtcattgatgtttccaaactaacttgaaagatactattcatcttgtgatattattgttgtcactagttggggatgtcaaacatgataagcctgcttacacttaggatttggtacagacattagcggagtatatgatgatgaacttactgaatcctgacaaaaaatatgtggatggtactagaatgcaactaggtaactttgtctatactactagtagctatttaggctcggcgcatgctcgagagaaggtgagatcgcgcactagtgcgcggctgcactccaagactagtgatatactatactctactctactcgagtagctagccagcgcagcgcagtggtgcacgcaccatcacggcgcacccgatccacaattaacctacccctcgcgctcgcagccacatatcatgcgcacgcacgcgcaagcgccggctgatccgatccgatccgatcccaccaggcgaccactaactcaatactttcattctaacattttctatatt

SEQ ID NO: 40918 - DNA, 1087 bp, Oryza sativa
ctctcattttctttttttttcttttctttttctctgattaattgtggaatttctagcacccacagtgaacgtggtgcctcctttcaaagctgttttaataatataatagatattagttatttataaattgtattcctaattgaaatctttttttttctttttctaattttagatttttttaaaaaaatagttaatactgtattatgttattttaatgtttttattttcaatttcggttgtttcaaaatcgtattcctacttgaactctcttttcatttttctaattttggatattattttattttttattcaaaattttaagtaatcccgtattgggttcttatatggattcttctttcagtattgctttttttaatttagaattttagctatttttaaattttattcctacttgaactcttcttttattttcttttgctaatttcggatttatttttatttttattctgaattttaattaatctcgtattgggttcttatatggatacttctttcaatattccttattttaattccgaatttcagctatttttaaattgtattctaacttggactctccttttcgtttctaattttggattttattttatttttattttgaattttgattaatctcgtattgggttcttatatggaaacttctttcaatattgcttatttttaattccgaatttcagctatttttaaattggacttctacttggactctcctttttctttttttttctttttcttggattaatgtgggaattctagcccccacggcaaacgtggtgtcttctttcaaagctcttttaataatataatagattgtgaaaactacatcgtaactacctactgtataatataacttgcatcgcatgtactctgatctccgtttattggtatttatcgctttgactttttctattaagttttttcaggtttaatcaagtttatagaaaatgttagcaacatgtataattccaaattagtttatttcatctaacattgaatatattttaataatatatttgttttggtttcactactcaccttgacattttgccctttccgaccgctacct

SEQ ID NO: 40919 - DNA, 554 bp, Oryza sativa
catcatagcaacgatctggcctatcatgaacgcctggtaacccagctgctttcttaacaaaatgtgactgggtttaaatctacctaataaaaaaacacttatgtgtttacatataactaagacaaagtgatttctgttagaatatgatagccattttcatttagtgcatatctttgatctatttaaatatttttttctttaaacattatatattaatctagggctcttataatgaatatagcaagatatgatttcttttagtattctttttatgaacaataaataaattgcccacacatctgcataggcttcctctgtagttgctaaaaaaacctccaaagtgtttgggccacgtcttttccccctaaaacgtaccccttctagccttccgtctcataaaaaactcaatcctaactacgaaccttgacacgcatttattcagattcgtagttaggatttattttttagacaaagttgtatatgctaatgtcataactaaaaattatttttcaagttaattttgatgggtaccgagctcgaattcgccctatagt

SEQ ID NO: 40920 - DNA, 1066 bp, Oryza sativa
gtccggtattgacagttcgagggtgtattatatcgggttttgtagttcgggggtgtattttagataagcacaagagttcgagggtgtaaaatggactttcccctcttttttttttctccatcggtaatctgcaccagtgacggatactagcgtgtgagctgaattttgtttatcccatcatatgcatatatgatactaggttgtaattataacccaccttagacaagtgtcctcgatggcaagctaaaataccatcccatcacaggtgaacagcctcattgtcgggtgtttgttactactcatcacaaatatttacctccactgacgggccttcatccattaaagatgaggtagagtcattactaatcagtcatctctgacgagagccttacctgtcacaattgacggtttgggccatcagtgctgatttggcgcagtgacctataaatgtgtgtgagggaaaacaaatctcataaaaaatatcatgatttcaatatcctaaatacagacaaatttcttttttaaaaattttagaaaacaataccacaaatctctatttaagttgaaagaactgactctagttgctatttcattttcgagcagtttttatagcagttgacttaggccaagtgtgccaaagttgtcacggccctcttacatcttggaccactaactgctactcctatgatctatagctgtttgactacttaaaaatgacggattaaacggctgcatggatggaaaaagaaaaagaaagagaagaacaaaaggattcatcaatcatcattcgttagacaactccattattttgccctggcataaataagaatgttatcctaattatgccttgtcggtcagtactcaatagaacatgcaagctccctcttatcacctatggaaatacttattttgattcatctatttgtttgtgaaagcctatagaaaataaggtagttgtaggtatgacctacttacagtgagctcactcattgtccaatggcaacaggaggcagttgctacactgacatataatggtggctacgttggaaacgtgtcagtgtgccat

SEQ ID NO: 40921 - DNA, 641 bp, Oryza sativa
tgtcggtaagcactcagagtgctagtatgttcgtctgacagaaagttaattaattaacgcacagagaaggagataatttacagagatcatggacagttccggtcagattttgcggtgctgcatttagattcatcatggttcatggatcaattgtccttgaaagaaccattaatgtagcaaaaatatgtggtagtactgccatatattctggtacttgtgttccaatctgtctttgctttcttttttgtcattggatttttgaggtgcctttagcgtgcagccttcgctcttgactattgcaccccggtaccacgtaccattgatgttcagttgggagaagttcatgatttggtggtagttgacgaatgctactacaattctcgagtgtaattatatatttggatcgtactttctattattgcacccttttgatgcaattctttttttttccaagttccaacctaatggtacttggtgattttgatatatattcattctagtgcatgagtatctaggcccctaggcctggacacaattctgctggttcttctgtactgcttgctgaatgtgcctgctctcaaaaatttctggatcctttccattagaggggttttttaactgcatactcgagtaatacattg

SEQ ID NO: 40922 - DNA, 1080 bp, Oryza sativa
acctttatacgagtactcactctgtctccgaatataagggatttctttttttttcgagaaacttgctaagaatgaagatagaatactataatgcctctcgctgtgtggtgagtgaaaagttggatggggtaaggctggaagaaaattagaaaatagataaatgattgggccaatagtactccaagtcccttatacttggagacaaatttaagggcccatttgaatcgtaggaataaaaaaaaaggaatagaaaaaaaaaacaagattttgataggaatgtaaatataaaatagaggactgcaaaacataagaataaccgtttaattggatcgcaggaatcggttgagagaaatagactcgaagaaaaattttcaagaggttgaaactctttctaaatttcctccataatctttataagattgtccattctataggattttcaaaggataggatgggatgggattcgatcctctgttttaaaggcatcaataggttttttttctataagattgaaatccttcaaagttactatgtttttctccaaatcaaatggtccctaatgtttatatcccttatatttgaggatgcagagactagtattccatttctaagtacttgtcacaaagttactgctagtataacaactcgggttactcctatttactaatactactcctagttgagaaactgcccgaaataaaaaagacggatcatgcatgatactcctatcttaaaaaaaaaatactccctccgtcctataatactataagagcaggtacaatagcaggctataagccagctgcaaacatattttaaggagataaatcaggagagagaagagcagcgggctacagatttgtagccagctgtagcacggactccaagacgctgtgtgtctatgacaggtgggactaggtattaatagtgtagtatgtaactattgtatgaatgagctattaaattggctatagatgaattggagctagtatttggctatactattgaacttgctctaagggattttggaggtatatgaccgtctaaattcattgtcctaagatatatcacgtccgtccaaaa

SEQ ID NO: 40923 - DNA, 1356 bp, Oryza sativa
ctcggtcaaaccgccttttcttctctcccctatcctccgctccgagggagaaaaaaaacaaagaaagaaagaaagaaagaaaaagagtactagtagcacccggagagtggaggaaagggagtaggcggagccaaatctcgtttctctttagttgttgttagtacccttagtggaagaatctctccccttttcttgtgtttcttgggttttgaagttttttgttgttgggaggtatgaggaatgaaggcctaacctgaggcaagatcttcgttttccttcatttgtgggggtgtttgttggtggaaacggatcaagaaaagccggaatttcggttctgaaatcgtcggttttgatatcggtttctctctgttgattggagagagagggagagagcaaacgcatgatctgtgtctgattctgacgggccttgtcgcggtccgtatcagttcatccatcccaacttgctgttcgttttgtgtggtggtgtttcgcttttttgggaagagaggagaggaagcaatcattcggcggcgacggccccgcccacttgaggtaccagttggaaatttccccccttttctttgtgcttttgtttttgctggtttgtgcttatctcttactacttgaggtacatctttttgaccaggtttttttttgtggtaacggcgatttttggggataaagtttgcatcttaggtcgggattttttcttgtttcagtggtggaatgtctccattttgagcgaaattgcgtcttttgtgggttcatgtttggggatttgggggaaatcgtgcggcctggtttgctgtggtggggaatttttttcttgtttcagttgattggtttctccatttcatatcaaaccgtgtcttttgagtttctcgtgcatatatggagaggatatccatggttatctagaaaaaaaatgcaaagttttcaacttgctctgtaatggactcttccaacgttttgcattcatttcttgagctcctcaccttggttttcttcattattgtgttcaaacctactctgatcttggttctgaacttctgatgtttgtctggttactggtcatgtaggattgatggctttgtggtctggtctcttgctaacttcttgtgcttctgtgattctgataagcttttcttcgtgttttgtgtagagataacagtttttttctcttatcaattatgctatgagatattccatgtttaatcaggactaactaatgctgtattacctgatactcgtttcagttaaacttgattgctctgtcgcatggccagcagtagcgaccatggatccctcatggaggactggatgccaccacccacacccagcccgagaacactcatg

SEQ ID NO: 40924 - DNA, 812 bp, Oryza sativa
aaaaattatttgtccatattgtttaaggtgcgtccatcacataaatgatccgttttactgttcatattttttttgtagcattgtgcttggttattgcagaaaatgcatattgttttcatttttcaatggctttctgtcatttcctattctactagcatctatctagatcatcacatgacaagtagaattttattagtcaaactctttctgaatggttgaccatttacacatcggagattgaaaattgaacctagcacagttggtaggaaatatggtgtgcacacctaccatggtagtttaaattctttagctcaatttagatttctatttcttctcacttaaaaatggcatcaagctcctttttaatacctacttctatcgtattacgaataaagagtgaaaaagagccaccacgtttcctcggtgtagaaattatcatgacatacactattttgatcgcgagatatgacatgcatgacggtgtggattgactgatacaaaacaaaactatatttatgaataatgtatatcaaaatgagattctatttttaaaatctagctacatacatggttgcgtgggaaaatccattaattctcatgcattaacacactagataaaaaaagtatatccaataactttgtctttacccctttaaacgttcccagtggtgatggcggtgagtctacctcaccaccatcaactgatgattgggccccacaatgtcagtaataaaaggtaatccaataactttattactagtataattcgtaaaaccttgatgtatatctcactcttctcactatgcaacata

SEQ ID NO: 40925 - DNA, 631 bp, Oryza sativa
attggggttatgatatgaaaaattccgtacggaatggaggtatataaaataaacttttaggattttgtcaatcatattctctcgtgcaaaaggacgatctgaaaattgaaaaaaaaagaatgaccttatagaaaaaaatcccaaggattgaaatcgtccaaattaaatttctgaaattcaaaggagacctaaaattgtatacatggctctaaaagcatgtcctaaatataaaatttggtagtactatttaagaatttgcatgcttcatttggaaggaaattaggttttctttagggttcctttggagcgtatgaattcaaaaatacagaaacaggaaaaatgtaggaagacgtggcatactagctagttgatccataggagttttagaatgcagaaattgtgtgtaacttgttgttggatgctccatagaaaaagtataggattttgggagagagatagacctgagaaaagttctcatgagatccaaccctcatgttaagggccacattgagggctccttcggattgtaggaattttgtaggaaatatggatgatttcaatttgtattgtatttggcactattcgcttgtttggaatgaaagatttgggcataggaaaggtagagggaaat

SEQ ID NO: 40926 - DNA, 502 bp, Oryza sativa
cctcctcctcctcctcctcctcctcccgctctactatattttctagcatcgattcgagatgcggatcgccccgctgtgttctgatcctgatgcggtggtttttggccggcgtcgagctgcagggttgacgagctcgatcgtgctgcggaatggccggctatctgacgtgttggcggagcttcaggtcggtggattgcctgatgtttcttgagtagagtagttggattctgggcatctaattctgttgattgcttcgcgttatcgatcgtaagttgccaatacgctaatataggcgcgtcagtgttgcccgtgtgtgtttcaagcgatgttgtgatttatatatctgtttgtgggactccaatttatcaaatgcattacagctacatttcaccgatcaaacgttgggcgtgcacatgggcataactttttgtcgcttaatttcaatgtcgaatcatttcgatgcaccaattggaatgtcatgcctaagttaatcacccaatgg

SEQ ID NO: 40927 - DNA, 526 bp, Oryza sativa
ccagggttttactcgaatcggcacaacggtgacaccgtgacagaatgcaacccaagaagcagctgcttgacgactgtaaaaaaacggaagatctgattctttttttcacctgtcgtacgtacgatcgacaggcaaacggaaccgacaaatctgacatccaaaggaacatatatactcccatcttatcgcgtcctggctagtaaaggggtacggatctcattccagggaggcgagaagatcctcttcttccgtgctgattgtcaccagcttgtgattcgtgagtacctatgatttgctgtacatgtgtagtaattggtgtatacgggcatacggcatacggcattgaggagtgaggaccatgtttttcaccgtgtacgtaactagtgcatgtaatcctgtttatgcttcacggcttacactttgtgcagcaaacaagaaaatgttgtacacgaacagagcagaatttatccaggacagggactaccgtggccctgtgcctgtatgcaagtaaaatccgatcatccag

SEQ ID NO: 40928 - DNA, 649 bp, Oryza sativa
aatttgaaccatagatctatcatccaatggctaaaaataattggagtgacgtgacttaatgatagaagagagaaataacattaattacacttagtggggatgaactatataagcatataggattccacataaaacaatggtttttattgattaactatgcaggatattctagtaactggtaaatcgccagaatagcagtatgcatgcgtatgagtgacgctttcacgtttcaactttcaagcatttcactaccccacaatttaaaaggcatgcatctaacaataatacaccaagatgagtaaacaccaatgatgttgggacagtgaagaaacctataccttttgacctttcactcttagtttgtactaagagtttgtactaaggcttattcactttgctatcatttttaactttaccaagttttagcattgctaaatttagataaggttatcaaaattttggcaaggttgccaatttggaaaatttatatgtacttactaaaatttgacacaactaaatgtgccactttttgggtattttgaaaaaacaaaaggtaaggtgaaaatggtagcaaaatgaacaagccctacaattaagtggatgcgcgcaacaaacaatataaggatttagtatgagtgttaaacatata

SEQ ID NO: 40929 - DNA, 592 bp, Oryza sativa
gatttatgttacttgagattcaacttgtagctacactcaattatagagtacttatatttgattattaaacatttaaacttagttatagagcacatacactcagttacaatacactaaaattaggttttacaattgtgtttgtctctagacttatgatttttgacatggttgtccttctgtttttgttattaaaatggtttgtattcattggttgaaaattatgtaatatttcaagcttcaaatctatcgaaaaatcaattggtagtcactttttttattacagtacatctacatagtttatacgtaactacgatgtaacatgtatataactttaaaattatgtgatacattgtgaagatgtcggattaaactccctcgcgtatgcatacgctatgatttgcttctttttttcgcttatacaaatctcaaagcaaaatctaacggtttaaaattatatataaaactacccccgtttcatattacaagttgttttgacttttttttaagtcaaatattttttatgttcacaattttatagaaaaatgtagcattatttttcgagaaattcctcgaagtgagaccagagtgagaa

SEQ ID NO: 40930 - DNA, 644 bp, Oryza sativa
gccgcgaacatggctgctttgaactccatcttctcttctcctctgatcctgatccctgagatcatttaagcaatgtacattgtacagtgatcaatgcaagatgaattttcttgatcataaaaaccaaaatgtttgtttgttttttggctgagatctatctgtatttgaactgaactgcttagtgacatcacgatcattagatctagtttaggtggtcacattatagtagtagtctgatagtgtcacctaccaaaatcaggacacatgataaactggttgcttcaacaacaaaaaagatacttatgtcttttagatctcagcacagcacaaagacaaaaagagaaggaccaactaccaaagctgaacattcaagagtctacaccaagcatacacaacaatcttcgcttcgacttaaagaaaaagagataccctcatgtgcaaaaaaaaatcttaatttctcaagatcattcaagaattacatatgaaaaagatcaaaatataccataagcataaaagtacattcaacaataagtagccccaagctattaaccacaatgactcaatgagatgaaactatgaaatttgcaaaagggtacaacaacttcaaattgctttgaaatgcacgggaaaattcaaattctgca

SEQ ID NO: 40931 - DNA, 634 bp, Oryza sativa
agaaatttctatgtactcgttggttcacatcctccttcgttcatagcatcaccgtgcgtcccacccggacacatgcacgaaaacgatcctggcttgtttgtgcattcaccgtagcagggatattcttctggcagagcgcactcgtcgatatctgaaagggagaatttagaaaaattttgtaccattctgttctaaattccactaatcatttgaactatggttggtaagccatagaaaaatatactaaacgaacaaaaataatttataaataaaactattaatagcggtttaaaattttaacggcaaaagattgactataataagaaaactaaaatcaactttaaaattaggttttaaattttagccgcggctcataatctagcaagcaaacgatgagaggctatacttatgcaacttcaagtgtaaatgactaatccgttaaacacacttataagctaaatattaggaaatgatttaatatcaactaaatagaagggtgaggcatcgaacccagaacagctagcccaccaccttgtgaagctaatcagaagaccctcagttgtttcttcacttacatgggtacacccttatacctccttccatccctaattgttgacgccggtgactttttgaa

SEQ ID NO: 40932 - DNA, 627 bp, Oryza sativa
ttgagttttgttttttaatgggtttgatttgattcattgattgtgatgccctttaatcattgtagtcttataatgtcgtcgtactcacccgtgtttcatattagacgtcgtttcaaccatttctactaattattttttaaagtttcatcaagtttaaaaatatatagcaatattttaaacacaaaacaatgatattattaaaaatatattcaatattacatttaattaaactaacttagtgttatagatgttgctaaattttttctataaacttgattaaatctaaaaaaaattgactggataaaaatagataaaatgacttataatatgaaacagagatagtacggtgtactttactcctttagatgttttacagtcatacttccatgcggatattttccttgtaaaattcatgttgagcatccaaacaactcatttgacaaattacaatgttttaaattttcatataatagcatatgccatgacatttaattaatatgttttcttctttttttgggactttctactcatgtgttcgaaaggagcaccaaatcaaacagtccgcaccgcacgttaatactgctagtctcgcgagggatttggaagtaaatgaatcaagaacctttt

SEQ ID NO: 40933 - DNA, 656 bp, Oryza sativa
gaaggaaatataatccagttctgttttttcaatcggtgaacccaatagacccttaccataccgcacttgtctttgacgtgcattacgacctaatttgattttgatttttcgaatatgattttttataagtaattttaggtagattaacaagcaacgaaaatgaacgaaaattactaagtaaaccactgaaatcaatctgaaataaaattttaaaacttatatgaagatttgcctagcaacaccttagtttgatgctgatggcattaaacgggtatgcagatgcccatgctccagagtccagagggctattagtgcgtttaatttccatacctctctgttcgtgcgaatatgatagttgtggtgtagatatttttaaataatgaaataggcgtcatgtgtagtgtagagatatggcatatgtgaaaaatgtgtcaagccgtgctcttggaagtataatcctaatcaataaaaacagaaacttgcacgactgtacgatctccagttctcctttgggagtaactagttggtttgagttttgttttttaatgggtttgatttgattcattgattgtgatgccctttaatcattgtagtcttataatgtcgtcgtactcacccgtgtttcatattagacgggtaccgagctcgaattcgcc

SEQ ID NO: 40934 - DNA, 620 bp, Oryza sativa
acgtatggtgggttaggtgtccgcctccaggtgcccacctacccgcatttatggcatcccgagcggtcgcgccacgccgcatgtaatacggtgtgcagtgcactcaaccggtctgtgaccgatcgaatgaatgatgggacccaagatgtcaggcgcaccatcgcgtgtgtcaggcgacgtgtagcccgacatatcccatcaaataatgatggtgagaggttctcatcctcttatcccagccggagtcggtcctcccgctttggtcaaagcaaggctcctgtttcccggtgtaataggagcccagaagtcttcacccattaaatggtgactgacaggggcaccccccgtgtcaggcggcaagatttgacaggacccatcatcaagacgacgtgtgcttggcttcccaagtcaagagacaagacatgcatttaatgcaaatattataatacttatccaccggagctaggttaggttgttgggcccatatggtaaccccttgatgtataaaaggaggtccaggcctagtggtggaggggggacttccgagcgaactggcgtttgggtctcataaccccaagcactggtgttctacattcaatcaatcatgcacaggagtaggg

SEQ ID NO: 40935 - DNA, 608 bp, Oryza sativa
atgccacttcacaaacatgcaaatttaaattcaatttatacaagtggaaacaaaaataacaaatttgactatgaagtgaacgtgcaattcacgatcaaatttattatttttgtttagaattatataagttgaattttaactcgcatgttagcttaaagtggtggacgacaccctcgtcagctactacaagagaaagtcaggaaagagtgagagagaaggaatgagaaagtcaggaaagagtgagaaagaaggaacgagtgtgtctatctcgggaagaggaggcacctcagggttcatgccttgacttaggctcggtttagatggcaaaaatttttgttttaaggtatcaaatcagatatacggtcctagttgtaatgctgccagcggccggctagggcgaccagtagcaggccaggatggcgagcaatggtgagtcgacgaccaacggatgagtgcctgagtgtgagtggcaggagtagacggcgactcgatgagcagtggcgagaggagattgtgttggatcaaagacaaacagacacacagcctgtacagatgccgtattgcggttaggaaaaagaaagaacaaaagcgaaaaacgggagtcgaga

SEQ ID NO: 40936 - DNA, 543 bp, Oryza sativa
aaaagatgaggacatttgtttcgcggctatcttagaaattagaacgtgtagaatgccataaaaaagtcactatctcaccaaaccgacacctaaatagtaccggagaaacattgcaaccagcagcttagctaacagtatcatcagtcctcgtgcttctaatgatgatattaacaaaagaatatttacacaaaagcaattgctactttgttagcccttcatctgcgtggtgtgtactgtgaaaagggcacaccctcttgcgcattggaggagaaaaagggaaacaaaagaacaaggccaaagggaaggaaattaagcaagcaaagcgcacgaggcacgctcatgaactcacaccacctaggtcaacccaacaacacggctcgaccaaattccagcgaggaagcgatgcccaaacacctgtaacaccatgtgatcccgtgcgtgatgcacgggcataccagactgctactacttcgttccaaaatattgtacctagaatgtgatttgaccgatcctaaagataacgaatgggtaccgagctagaat

SEQ ID NO: 40937 - DNA, 535 bp, Oryza sativa
tctcatccgtgtcgtttgagaagcactcacttagttgtttcagaaaagagttcaaataaaattaattgcaaaaacaccagcctttccttgaagcctgcattaaacacttatttcccatggcttgctgagtactcccgtactcacccttgctctatataaataatttcccccccagttgctgaagaagatgaagcggatcctactgatgaggagttcttccaggagcaagccggctacgatgagttttagggtttcggcctagttcccaagtcgcgcctgtgttgattggtccaagtcctggcttccgctttccttttgtaatgcagttgtgagctcgggatctgtccgcatcccaacatgactgtacatctactctataataaagagacctctgttgctgtgatattctgtctccctgtgataccagcactgttccctgcgactggtatcgattaacaggttaatttggagcgtcacgggctagttccggtcgggactagttcggggcgtgacaccaagccgtcgccgatctcgt

SEQ ID NO: 40938 - DNA, 653 bp, Oryza sativa
caagttgctaaattcatctaaattcatgatctacatgtttctttactttatatgtactgtttatgcttgttttttgtactgtttatttggtttttattagtctttttcttcgttttgcgtgttagcttgttgtttccatcgttgcgaaggttcgtgagtgcgtcgggagtgttcagaagattaattgaagaccgattattgcaaggaaagtcacatagatcctaaacacaatcctttgagcatgttgatcctatatttaaattctctctttatttcaactgtgcatttattttcgaatgtcactaggtggtgtgaatctattcctttgttatggcctgtttgcattgattactttattccttgataccttgggttattataacttgactagttgagctttatatattggttcagctagatattagatatgattgcttagccatgcttagaaacattagcacactattgggataacttatgactcactattatttaatgatggcttaataatagttcacgatagtcaatcgtgattggttaattaattacttgccaactaaaacttgataatggtgggttgtgagcatatggttttgagactcgtgctcatgacaattaaggaccggataaaaaactactattgtgaaacatta

SEQ ID NO: 40939 - DNA, 585 bp, Oryza sativa
  unsure (1)..(585): unsure at all n locations
atatggcttaattatggtgaaataaaatgtgagaatttacttggatattttttatatgacttcttctatattttcaaaagcaaataaatttaaaaaccgactaaaacacggataacgtatcaaagtaccgacaaatttattttcaattttgataatagaaaaaataaagataaagataaagaagtagatatggagatagagaattttcgtcaaacggttctgaattttatgcccaaagatattgggatgcatattattggtaaaaggaaacctcagtagcacaaagtgatcaccaacgcaacacgtgtgttgcgtgtgtcacgtcacgtcgacgtcattgtgccacacgttagtaaccgtgtcatgtgtgcactacgcgaacagggggcagccagtggagagcgtggtggtgcaacagtacaagtacgccttctccggcttcgccgcgcggctgtcaacggcggaggccgccgcgctccgacggaagcccggcgtcgtctccgtcttcgccgaccctgtctaccacctccacaccaccaggtcatgggacttccttcagcagcagacgacggccgncgtcgacgt

SEQ ID NO: 40940 - DNA, 674 bp, Oryza sativa
atatcgactaaagtgtgtatgtatattagaagtataggaaatgattttttttcatattttttccacttggcctagaattagtatgtatgagaatagtgaatgcttctgattcgtgtcaccctaccctttgaattaaactgacccatgcctagactttgattattacaagtaacatataaatattagctcggttctctctattataattttctctcgggattaaacacatacgatacccttggaatacttttaggtgaaatgatataattgtatatccgcacgcttgcagatgaaattgtaaccataatataccacgagtgtttctgcgccattgctggtaattatatttctagtaatgtcgttaagaaataccaacataggtaaagataaagacaaataaaaccctgtcacctgtcaacttatagaaggaaacccaaataacaatagatatataaacttaacgaacaagagaagataaaataaaagacgagagtcgtataataagataggagaaggcacctacgccgatggataaacaagcaaacacaacaacacccccaaccacttgtggagagagaaagagagggttgaagaccatcaaatcgaacaaccattggcggaatggcctcattcgaatgttcaccctgcttttggttgatgaggacgagtttgca

SEQ ID NO: 40941 - DNA, 661 bp, Oryza sativa
atacagatggcccgatcgaagaagagtcgtcggaatctagtagtgctaagttacatatgagatatgatggcctaacattaacactatcagcagcatctgcacgacaccaacatggctgcagcagcctaccgaccatgtacgcctggctttgctcacaaaacgcattcccagctgcagcaacacaggcataggtagcatggagatggccaaactagcaccggtctctgttgttgctgctgcagctggctcctttcctcttcctcttatgcttggatctcctcctccatggatctcatccggcggcgccccaacgtccacctaagctgctgctctctgttgtctgcacactcagacgctgctgcctgcctgcctcccaagtcaaggtgatctcagcaacaacaaaacacgacgatgaaaagcaaccggagcagacgaggaagaagaaacaccagtggcacaaggaaacaacaacaagatacaccatgaggaggctggtggccgcgcgcggccaagtgcggcttctcgctgggcctcgccgtcctactcggcctgctcttcagcagcgaccacggcttctggtcggggctcatcgtggccaccaccatggtcgccatgaccgccatgggtggaggtggggagggagacgagtggattcgccatg

SEQ ID NO: 40942 - DNA, 555 bp, Oryza sativa
gtaagacagctgatgtgtaagtttatcacattcttcctcctgtgatagtcaaccatctaccttataattcgccaactcattttactgatcatcatcattggacaaatccaacgcccctcatcgctccgtcctcatcaaacggtccaaactcatccacgcgctcaccctctctccccgtaatttccgctgcccccttccccaatccccacagcgcgtaactcccgtcgtccccctatctcgcaattctaaaaaaaaaaaaaaatcgcccctcaacctcccgtcgtcagctcgtccacccgcccgcgccgatctctcccgtcagcgtctctgtcgacgccgtcgccctccaagacgatctcctctgcaccgccagaactccgtcgcctccctcgccgaactgctccgcccataagctgctgcctcctccatcaacgtgatgccgcctcaagcgccaccggtgccaacccatatcccctcctccacgaagaaaccctcctcccccacccctcccccttttctgtctccccatccctaatatgtttcctaatatttcag

SEQ ID NO: 40943 - DNA, 526 bp, Oryza sativa
ggcagtagtcgaatatgatcacgtcggatttctcgccggtgcacgccttggacgcgtcccgcaccaactagtcgagccagaaccgacagctggtgccattgccgccgcagacgatgccaccacgtctctgcgcaaggccgtacgcagtgtccggcaccgcgccggtcgcgttctcggcgaaccccgatgtcaatgccgccacggctgcggaaagggagtagaggagagcgcaaaggttggccccaaagccacggtcgtcgacatgcctggagtcggcgctgcttgtagttgaacagcaggtcatcccggcgttctccgtgatgccggtcagcagaagaagtagtcagaagctcataagggcgcgctcgggcttactcgcgcccggcacgcagtagaaggcgtcggcggcgccattgatgcggtgttgccacgcctccgcagggcgtcgcgtcgcgacgcgttgctttgtttccgttcagctcttttgaggagaaagctacaactcgttaatatcaatgcgtgtagc

SEQ ID NO: 40944 - DNA, 884 bp, Oryza sativa
tcagttgtttggcagattttcaatccatgccatgccaggttcttcttacttgaggggtaaacaatttttgtcagttatactctcatggaataaaagggtaacaacgagtaggaactgatctggtgccttttatgttctaatgatactccttgtgtaagtttttcttttttagttaatgactcctcgtgtaagtgttcactgtgtatagactacggagtactcgtgtatatatatatatagcactgcaagaatatgtgcttaatcatgtttttgaaaattgtaatgccagtatgtaaatgaagtatacttcagttctgatatctgttagtattcaatgtgttgcttcctgttagtttcactcactgttactgtaataattttactgtagaatcaactccgtttatcctgttgcttctatatttttttttcattgtagtcatgatacttgtataatagaacttgaagaagctaatatttagttgtaacgccacatgtaaatgaagtgtgtttggcttctgattcggaatcggcactactcagatgctgactctattactgataaactgttctgcctcagctagttgcagatgctgtttagtgcaatagttcaatgcagagatgattctggctaaactagtgttcgcatctgcaagacctttctttattcagcaattgctttacaactatggaaatataattaatcatgctgtttatcctgcagaagaatataaaggatgccacccaacggtgctgaaatgctgaggacttaggactgagtgtaagccttctaatgatgtgagaatatttgccacggttgtggtttgtacatctgtacaaagtgttcgctattcatttattcaatacttatttcgaagtcaacttta

SEQ ID NO: 40945 - DNA, 653 bp, Oryza sativa
aagttacagcgttgatacattgagaacatgacagaggatgagacattggcacacaaagggcaccaataagttacacacactcatatgattgatgcattccaatatgctccttagacagcatcagatttgattaattaactttgattagactcatgaacaacacatagcattttctgctagcttccatgcaaaatatttgcaaatggatagtgcagtgcagaagagcagaaacctaacaaggactgtcactttgtgcaacatcctgccgtttgttcaggctcgtaggacaagcaggaaaagcagcgtttgctcgtagttgccatgacaaaatcgagataaaaaaaataacccaaaagaactgtacctaacattatactagcatgctgcatatatacaagagaagatatacataattacatatatcatttgattaaccgggaatggatcgaagacggcctaccaaacgtgtacaagtgcatgcatctggtcagtcagccgcgtgcagaaatgggcgaagaaactgtacaaagtgcatggctagctaacatttactgtcacttcatcgatcgcactgagtacgaaagacgagtagacgacgaccatcattagtcacgtccacgctaattaccctctcgagtcaaacacaggtgcag

SEQ ID NO: 40946 - DNA, 797 bp, Oryza sativa
gacgaatcttttgagtctaattaattcgccattagcacatgtgggttactgtagcacttatagctaatcatagactaattaggctcaaaaatcgcgatttctccctaactgtgcaattagtttttcttttaatctacatttaatgcttcatgcatgtgttcaaagattcgatgtgatgtttttgggaaaaacttttttttaactaaacgaggccttatgggggcattttgtaattacgaaagattaggggggaacttttgtaatttgctcgtactatatataatcagctaaggcgaaataactttctgaaatctccgatagccagcaaacaaagcagggcgggaagcaggaggagagggagagaggaagcggcggccatggagggcgggagaagctggagcatcgagagctacctcaacgagtacttcgacatccccgccaagaaccctcccggcgaggcgcgccgccgatggcgccgcgccgtcggcctcatcgtccgcaaccgccgccgccgcttcggcaggttctccgacgtcgacgccatcgacgaagcccagcgccgcaagatcctggttcgtacgcagccccctctccccctcccccggcgggatcgccattcccccccccatccccgccgccgcggttgccccggcggccggcgagcgtggtagactgcaagtagagtcgtacggctcgtacgactgactgttcgtagcatatcgtgcgggtcgctttcgttgaagcgaggtacaaatttacctattctttctcgaattttgtaagtaattttttgggag

SEQ ID NO: 40947 - DNA, 650 bp, Oryza sativa
aaaaatattctcaatatgttagatgagtgaatccgttcaatttggccagatgaagccatttatgttttttttttgggatgagctatatatgtgtcgcatgttttttttggttgaaaatagtcggatctctggccgttgatggtttgatgtacggtggataaacgcttgagggatgcagctttcctttttatcgttattaatcctttgctttttttattagcatcggatttttcatgtatggatgatgacacgttggttacatcatagttacatactatttacactataattacatatgtaattttaaaacgtacatatgtaattttcgaatttacatatataattttacgacttatgttacacatacactaaaattatatatgtaatttaggtacttacaatgtaaatacatgctgattattttttgataaaaaatatgatgccataaatatagctactctttttttttttggtgacgtgccccattcacttggtcatgattggttcaattttctgttagcaagctacatgaacatgaaccaaaaacacccttggtgattaaggtaaagccatcaccgacacaaaaaatagatactgtacatgtttgatgcgtttaactaaacgtctgacactgatgtgtaatccatcat

SEQ ID NO: 40948 - DNA, 1843 bp, Oryza sativa
tgctttattgggccgatgagatgtcacgtgatcctcacctgcttgggcccacgaggaggactcatttgctcttctttttattaccacgactgtccaaatgcttaatgcttttgttttgttttgttttgggagggttgcctcaattctacgaaagcacaggttttgaactttgtttgtgtgtagggggagtagtatgtgtttttggtcttaatatatatgttggctgaaagagcatgatatacatgtgcttttgaaacaaaacgttgccatcatttccttgctaattcaggagaaaacagtaagcatatactctacgtttcatcgtagtaagtcgtttagactttatatagttatttttttttatttttgccaagttagtaaaaaaatatagcaatacttttaatacaaaataaacatattatcaaaatatattcaatattacatttaataaaactaatttggtattttaaatgttgcttaaattttatataaacttgatcaagtcaaagctacttattctatcttactacaaagttgatgaccaatcaggatttgaaatttcgtttcgaaatttttgaaattttggtaatttcgcccccaccgacaagctcatatcttgcccgaaatttttggttgttttacatttttttgtgaatttggtcaaattttatttaaattcattcaaaatcagtcaaaatttcaaatattttcggccaaaattttcgaaatttcggtaatttcggtgctcccggcagaaatagcaatttcaaaatttaaaaccatgttcccaataactcctaaagcttcacatgcaagtgtgtcacattattacccgcgagtaattattatctagagtgttttaaatcgcatgcacgtgtaacatatcattatccactagcaattattatctataatattttcaatatcatgcaaatataacatattatttacaattttgttgtatttttagaacttaatatgtaaacaatgtcaaattattatctccatattatttaacatatacatgtatcatttctatagggtataacatttattcatccacatatctcacagtaaaacgtgaggtatcaactagtataatataaaactgagaaaatacttaagaaatgcagctactagcggggtgggacgggaaggactcccgtgaaaaacatgttaagtcctaatggtgcaaccaaacagcccctaaagatgctaggatccatctgccatttaggaaaatcaaaagaccaatctcaggttgacttgcatagcatcttaaaactgcttcgtgtgtagtgatgagtaagtttgctagatcaagagcatcttaaactgatctggaaagaacgtgtttggttctatctctgtcctttttaattactagtttttatatcagtacatgtatatggttgtcttttactatactactaataacttaatgatttctttaaatgaagttgacgtcctgcagatgaagatacagtaggaaagatcagtcgatcagaaaattcaatagagcgttaagccgcttaacgcctttaaccactgataccattgcaggagcaagagcaacataaatttcataagaaatacagcacaaaatggaaagaataccgaattccaaacatgtcatcaagtgtgtttggttggatgaataaaattggatgggagatagtcgtctaattctttgattaaaaaaaagatagtcctctaattctttatcgtgtttggttggagggcatgggcccataaaaaaagaagagtaaagtttacgggcggttcttaaacttatagcggtatgtcatctaggtccctaaactttcaaaatgcaaatccatgt

SEQ ID NO: 40949 - DNA, 588 bp, Oryza sativa
acccggatctaatccaatgggttcccgtcggcgtcgacgtcgagatcgtagcacgtagcaggaacatccaactggaatatcccaaaaaatgattttggaggctcatgcgagattatctgaccaaatctttgtgctacgcgccacataatccaagaattatgggaacctttgcttccacgttcaaactccagaaatgattgttttcggctatggacaaatacaattacgtctgatcctttatatatatatatatatatatatatatatatatatatatatatatatatatatatatatatatatatataaggcaaggatagaatttttgtatttaacacaactgatagaatatttgattgtgtaagttttgatcgaactggagcactgaagaccatttgatttactggagagtcatctactgcgtgtaactagccgacacttattatagtagtgtctgctttgtgtgtctctactctctagagtctgctttcaaaaggtcagcagtttgatctttaggaagacagcatctgagaatattgctctttgaagaaccagatgcgtcactacagtattatatatattcaatcc

SEQ ID NO: 40950 - DNA, 601 bp, Oryza sativa
tattcttcatctattataaagacattattctctcccaatacaaaacttgatagtgtataatgcataggttctcttgttgaagctgtgtcttgcatgagacccagtttcttcctctcttcactctctctcttaattaatataatgccatataagctaaaagttctacgtagcaatgtagttaatgccatagacactatcctaggtggaaggttgggactgcacttagagccttcgtttctcccaaatgcagcacccacaccgtccgttctgtgtagctgcgtgcgttttgacgtggccttcggggaaattcacgcttgacgtgacgcggtcgtctcggctgatcggctctctccgagcgaagagattttctaagcgggcgaacgtgcgaagaagatcgtttattgccagaatgcagatagactttgtgattgggtggagagccgtgtcgagtcgacactcgagtctcgagcgtcatatgcgagtgcttccaagcgagcacgacgtggaggtgaagttttacacgatgaccctgcttcttccgtggttcacaaatcacaaagttcacatcgtaattagcacggtgtgttagctaaatgagaaa

SEQ ID NO: 40951 - DNA, 2056 bp, Oryza sativa
tatgtattccaattgtttcactaattgcaaattttaactacttttttctatgatatgtcctgaagtgtcacaagcaaccgcgatgaacggtcctttgcgggtattatgcgtgctaattccttagggttaatggacgatacaggactaacgcggaggatgtaagtctctatgctatgtactagacagctcttgatatttatgatactaatatattgattaattttaatgcatgcagttgccaagattagaatgtcgaacaagttttgacgatacaggtatcacaaatgtgcagcgtgatctgtgccacttcatccaccacgagtgttgtcatgtcaaaagagatttcttcgacccagagggtgtcctagcggcaagtgacgaattcaaggatcttcgggagtggaacactgctatgccataatgtaactagatgacgttatttgaagtgacaatgtaaaaaaatattgtaatatatattattttggcaacacttttgatttatgcaatatatgtagatttctcagtaccaaatgcttgataatcttccaatatatgtacataaaaatctacctgcaagaatttctattaaataatttaaaagtaatttacggccaaattataattaaatttcaatattttctacctatctttgcaggcggaagttttttttttttttttgcaagcggacgattcctattttcacaggcggaccggactagccaacgtacgcctgtgaaaattatcttcgcaggcggacggccgccccgcctgcgaagatcggcgatattcacagtcgttggcttacaggcggacggccgccccgctgcgaagacccttttcggccgcttgcgataatgcttttcctagtagtgccacccgttgtttcgctctagctccgcccctgaccgcccctaccgccacgacccggcacggcgctaccgacttctgcctccgtgaggtcgggctcctcctccccttcgaggtgcccccacccttccgggccagcgaaattagctgtagcgagctcctcgccggagtcgtctcgatctcctctacgtttccatttttttctctttttcttgttgttgtcttttgttttatccatctatcggtttatgtatatgagataacgagagttaggctggccacgcgcatcatatgataacaccgttgtatcatggccgagatgggcctagttgggccgaaaggatgtccatgttggccatccgacttgatgtcatcctagctcgtttaggctcgacggctcgcgatccagctcgagttggctcgttatttctaacgagctaaaataccagctcgactcgttaggaaaatgaaacaagccgagctgagttgaaccgagcttgttatgagccgagttaacgagttacgagcttttcgtcaactcctagctacaagattgagtggagtggaagcggattttttttcctcgaggagacatcccctcattttgtgcatgtcatttataaaattatcaaatatttttaaaatttatcaagatagatcaatatatgatatatcttttcgcaaacatgtgagtcaaaattcgagttatacaattcaaaacaaaaataataaatttgaccgtgaattacgcgttcacttcatagtcaaatttgttattttttgtttctacttgtataagttgaatttgaatttgcatgtttgtaaagtaacatatcacatattgatctattctactattttttataatttttttgatgactttttaagtaacatgaaaaataaagggatatctcttatagggatgatttaagttttcccgagtggagtaccgtttagagcaagagaagattttgcctttttatctttggtccaagcaaaagctccgcaccgcaacagctctgatcttgtgagtgactaccgagcgaatcgcgcgccgcagcgaccggacgtcgcttcggcagcgggcggatcgacgcgaatcgacacgcgtgtgcttacggcgacggaaagttccagcaaacaccggcgtctcacgtgctggttggatgaacccggcgaatctcctcgc

SEQ ID NO: 40952 - DNA, 540 bp, Oryza sativa
tgatgccaacgttgaagctggtgaaagtcagaaaccgatggtcgtagggagtggattctaaattctcgagggatcacccctcgttgtttgcatgtcattcattgggagtatgacttacgtatattcatcttacatgtttgtagagtgacttatcacatattaatatatcttgtaaaaaaataaccatttaaataatatgtataaaaggaaaggatgtcctctcgagttaaatattttcccacctctaaatgcaatgtgaacggcgatcctagttaagcacttttatcttgaattcttcatcaaagatgaggcgatgagagattcgaccgcgacgtgacgccgagaatcgtccggcaggccggcgaaggaagctgattgcgagctcgttccaagatctcgaatcgaagcactacaaaccaaggtagctcgctggttctcgcggacactaagcatcgatcggagatcagcagatgctggtcgggttcttgtttctttcacaccgtcgaaaaaagtacagaccacatcgatcgaccgccattg

SEQ ID NO: 40953 - DNA, 643 bp, Oryza sativa
gaaccctacaaatttggtattaattgtgcaaatattttacgtgtaacttttagagatatggaaagtcgggaatggatgtatcattggccgaggtttttgtctccatatagaaacgaagtggctaaatttattggtattgccaaggttcacgctgagaagaacaatatgaggaagataatttgtccatgtgctgactgtaagaatgaaatagcctgggactttgacgatgcttttaaagtgaatgagcacttagtaactcgtggatttatggacaagtacgaaatatggacacttcatggcgaagaacaagtggacgggcctgaaaatgtagttccgacacaagttgaagacatggtgcataacgatggttctgttgaggacaaaatcgacctagaggaaatgttacgtcatgcagaactcgaggtgctgatggggttggctagagggctaaataactttgaagctttacagaaggcagcaaaggaagttttgtacgatgagtcgaagggctgtgacagtgagttcacaacactccggtcagttcttgaacttatgaagttaaaggtgagacatggatggtctgataccagtttcgacagtctgttagaacttctgcagaaaatgctaccgaggcctaactcac

SEQ ID NO: 40954 - DNA, 629 bp, Oryza sativa
tccatgacattggaatataaaatctccagatctctgcagggccacacactagtactgtcgctagccatggccctggtagtattaactaccactacgtacgcatgttcttgtggacatggattggagtgacctgagaggctggtgagcccttacaaaaatggtgaagcaccctaatcttccatgggagatcgagatcggtacagcatcttccttccttttatattccgcagggtatcaaattggagtattttttctctactcgtgtagcgatgaggagtgtagagtatctattggagcgccttgcaagcaacgccaaacgactactcctacacccaagacccaacttcccactcaactgtactgtactccactcgccgcacacactgacacagcgggcccacctgcagttagttctccggatcgcttcttccacctcgcgcgcacttcacctgcgctgcgcacacacgctccagtactccgccacgcgcacggctcttatcccgagctcgtgtcactggtggggtggggcccaccatgacaggcgaggcgtgggtcccgcaagcagggtcagcgcgcgagtccgagtaatattcccccacaacctctgccacaacggaaaacaacggcct

SEQ ID NO: 40955 - DNA, 815 bp, Oryza sativa
aaatctacatgtttttttaaatcaatccatcggagatatacacatcgagaaccctagaaaaaagaaaaaaaggagaggaaaaaatcgcataaatgggcgagcttaatgtcaccgaatccgattgatccgagctcgttgccatagccgtccatcgcactcatgtcgtggctgcgcccgccgggcacggtcacactcgccgccttcccaaccacactggcaccccctccctctaaccccccatcctcaggtgctctcctcctgctcggaggcagaggagagaaagagagaaggatggcccgcaccgtagccccaccatcgaggccgacggggagaggggaagagaggacggtcgtcgtcgccgctgtacccccgtcgagcactcgccgacgcggtgccatgccggcgatacgggagggagagggggagatggagcggcgccgccggtaggggagggagaaggggagtggcgccatcacagcggagggggagaggcgccacctacgctgtcgttttgagagagaggggaggggaaatgatttaaggctagggtttaggttgcagaacttttatataagtacagatcaatcgggattgtcgatcagatcggacggctccaacttcttccgtgtcgagccaccattcccaggccaccacacaattgggccgcttcataggccacgtgtaagcgcacggaatatgttcagtttaggtcccttaaggctgagttattttcttttcacctctctcattttttacgtgcacgcctttcaaactattaaacggtacattttttgcgaaatatatagtatataggg

SEQ ID NO: 40956 - DNA, 1153 bp, Oryza sativa
aggagagccaacgcctagaccaacgtatagcaatggtagtcttttttcatgagatttcccgtagtattttttcctaaggctgctttgtcgccgggacgacatgtactaaaaacttctttcttaatacacaacaatgtgcaattctctagtgtattagctataaattaacgaatgattatagggatatggaccatactaccatagtgccaagatgcactagctagggtatagaagcttggaacagtagatgccaggtaagccggacgctcaaagcaatccgttagcgttcaggcacagcattctcctggacgagggtaatacaagaccagaagtggccgccgcaaagaagtctccggacgaaggatatccttgtcctgacccgccgcgcactccaattctaaccggctgcctggagtgcaccgaaaggaagctataaaaccaaatcaaaccccatccacccgcggaagcatgcgcgccaacgcactccccacgcgatcccacagccctccgcttcctctcccctttcgcctattcatcggtaaaccaacgcgccgtcgcccacagatattcccccgccctttttctctttaacctctcgcagccagccagccaccatccgaaaacaccagaacccgattccatcccggttgctgttcttataatacgtggagaagaaactagactagcttcttcgccgtgagggctttggtgccggagcatgtgccatcctgggctgccgcctctgccgccggggtgcgaggtcaagcggcggagggcgccgccggtggcgcgagtgggttccccgccgcccgtgccgcggcgggagcagcctcatcaggctcagccgcaccactactgcgtgtgctcgcccacggcgcaccgcgggtcgttccgctgtcgctggcaccgccgcggctactacgagtggggcgcctcccgccgcaggtagggcaaagcccgttcggtgggtgacgcgtgcgcgcatggtggaaactgctcgacgcatcgccggccagctgcgtacaactcatggcgtcttcttgcgcatcatgttcggttgctcatgtgtttgtacacagacacacagtgtacagttgttcgaactcggaaggaaacacaaaacacttaaataagcgtacattactctatagtt

SEQ ID NO: 40957 - DNA, 1141 bp, Oryza sativa
cttcaaaaggtaagtttcttgggtggttatcaccagcaccgagctgtccaaatgaaccatctccacacatgaaaagctgtccagaatctgaaaataagaactagaaacatcacagctaagctcatcagtaatggttttatttttgaaacaaaataaacacctgaaatgcacagactatatgtgatatagagtataaagtagattttttgaacataaagcataaaggatcaaaagaaagtacaaggaaataaggtggtttcagaattggacacctgtagcaaatccagaatggttccatccagcagacacacaggttatcatgtagttctcaaagaactttacaagctttggatgagggatgttctccacgtccccatgaccaagctgaccatgtgtacctcttccccaagtaaatacttcaccatcacctgaaatgttgagtagctgttcaaagaactgatgcatattgctcacgtgaaggcatctgatgcagagactaaattcttgaggactgacggaaatgggacaaggttgccaatttagggcacatacaaaatttctgcgtgccattgcactaatataggcacaaaaagattcagatttacaagcccatctcaaaacacccaagaggaaagaaggcaaaaatgcttaggttgccaatgagagaattttcttcctggtaaatgatcaagcttcagcgagcaatatatcttgataatggaacaagaatgctttgaaaaaatggccaaggatagaacaaatctgtgaaacatatccaatcactaattactggaaagcggaatttgaactgaaaaggaaaacactcagccccttgttagaatacaagtatacaacagagagatgtctctccacttaatggcactaagttcaaatattcagaacaaaggaactagcgaaaaccgaaaagttttaaatttgtgaaatagaaaactgttctgattaatcatcaagcccaacacagcaacacttcagtggtgtttggatggaagtgattattctagacactagaactggtgcaaactgaagtctctgaacatctgttgctatggtgagcaaaactacatcgccgtgcacaaatccattgtcaatctaggtatctaactgagttcagttccggcaa

SEQ ID NO: 40958 - DNA, 3010 bp, Oryza sativa
tctttacaaggttggcagccctgaaaagtattcgtgtccttgtgctttcgtcattaacgtcttcttcccctaggggagatggtttgttctggtcaggtcaacttccaaacctaaagggaaggggcatagcatatcactagtgtactcgtataactgtagtattatccagcaatctgttggtttcaagcttctagtaagaaacagtaacagaaaggggttcaaataggatcatcgcccggaaaagtcgttggtaacaaaaatcgtcctaaagatcatcaccacacagccaaatgccaatacactacacactccataaaactcttttgagtttcatagcactgctgcatctgacgcaggaaatttcgctacatatgcttcactgcatcatgtaacatgctgtcatgttaccgggacaccggcgcacctaccctccatactccatgacccatgtttcctcgtctttgacagtgcgagcctgcgtgatgtgcgaagtgtaaacactagacttttgcctctgcacggggtgctcctagtaaattcccggtcgccgtggcgtgaaatccgtgaggattctgagacaccaagcaacgctgcaaacggcctccaccgaatccgaaactcccccaacaacctaggaatcagaaccggcaacgtcaggtcgcacttcctatgcgcacttgcagccggcgcccagcaaaggggacgatgagaagacgagattttctttcacggttcaagctttcacaattttacttgttcacttcttcgtgattttactttggtcgtatgggaagtgaggcaaccattggccggatacttgggtggaatttacgaaacattactgttttctcttttgttttctgacggaaggcagtagtagagagttggagaattattatagaacagtggtcgatactgcttaactatggagtttcatgatctcacaatctcaacttttcttgtaactactttgtttgagaggccggagtgccggacacatatcctctcaagtctcaactaggcttaagcaagctttcataaaaccgttcaggctaagctatcaaggtttgccatttgccaacttgctactatacaatgtaaaaaacgaaaaacaaaatctatttgatctctttaaaatattgggacgtctagtcaaccatctcagactttaagggtgggaaatattttcttgggccgtgtttagttcacaccaaaactcccccaaactctcaactttccatcaaaactttcctatttacataaactcctaactttttttttccaaactaccaactttccccaaacttctccttaatttcagaaactaaacacagccctgatgtcacgtataacaagttttgattcaaatgaaagttttctaattaaggccttgtttagttcgcggaaagaaaatttttaggtatcacatcggatgtttgaccggatgtcggaaggggttttcggatacgaatgaaaaaactaatttcataactcgcctggaaaccacaagacgaatcttttgagcctaattaatctatcattagcacatgtgggctactgtagcacttatggctaatcatggactaattaggctcaaaagattcgtctcgcaatttacatgcaaactgtgcaattagtttttcattttatctatatttaatgatctgtacatgtatccaaatattcgatgtgacgtttttgggaaaaaaattaggaactaaacaatgcctaaattcgcatgagtccgggatagtagattgtaaaaaaaaaacccaaggctcatgagttactcgagctcaatttaagctcgcctcgagttctagttgagtagagctcgagcctatgccaaagctcacgagctttgtcaagctgagctcgagctcatgtcgagttttaccgttcatttaataaagtagtacatcatgtatgccatatatctgtatccatgcggtgaagtatcttgcgttggcacaatatatttatcttattatttttcatcaatcattagcatgattaaatataaataaattatttatttcaagagattatccttgaaatatactatgttgcgctacttataagccgactttgtaggaaagctcaagcttgaaccgagcatgtctaaaaactcgaaggttactcgggctcggtttgagcttgagcctagataggtaagcttgctcgagctcgacccgttgtcagcccaagttacaagcatacccttacacccaaatccataacatgactttcactgaagcaatgatatgcgcgtatcaatccgacaaacaccaaagacaacacacaaagggcccgtttcgtagagcttttaacttctattaactctaggagttggggtttggagcggagttgtggagcagcctaaacttagttccacatctctaaatcattttgtgagagtgctccacccagctatattcccattttaggtggagttgaaattgttcggctaagctccagctccagaataggtgaagctggagctgaagccgtgccaaactagcccaaaaccacaacgtcgcacaccaactttcgtgagagttttgcaggaaaatagtactaccttcgtttttttaatatgcaacactattgattttgaacacgcatttaacaatttatcttattgatgaaatatgagaaaaatacgtaattatcatttgttttatcgctagaagtactttagacatgatttatatagcttttgcttaattttttgaataaaatgaatgatcaaacgtgtttaaaaattaacggtgtaatcaacgcttctcctttttaccctaaaaaagtatctctttttcacgatttcaaccgtcagaaatgcgaaacccacagatttgcgggtgccttcggcaagaaggcgtttctcctcccgcacgggcccgtgtgcagcccgcacccgagattgggcggcccgctcccacccccgtccgtccgtccgtcggaagcccaagccaaccgcctcgcgactccaccgcgtctctgcacatgc

SEQ ID NO: 40959 - DNA, 896 bp, Oryza sativa
ctacccagatattgaaaaggagggagttccttcctcaattcaccatctccattctaacaaaattctcatgtctctcaaccaaacaaaacacttaataaccttattcctctaaacttccaatcccttctaaaaactacgctccaagccataacagctataatattatcatctctttcgtacacatccattctggtctccaggagaacgccgtacctggaggctggaggtgatcctggacgctaaccgattgcttcgtttgcctggtacctactgttctaggcttgctagtgcaaatcttggcactatgccactatggttcatgctctatctggatatcctcattcgttgatttgcctgttgccgataaaagagcggaggtcagggtttacctttttgtcttcgaagtgaaaaacgctcctcactagtttagcaaaaatcagtaaagaccaatgactttgggtcaacgccatacgaaaatagactactacagattaactcccacaaaccaataactagcggtttcacgaaaaccggccggtttacacgaaaaccgattggttttgtgaaccttggcggaggtgataatggctcgatgagcgcgtggaggaccgagcaggactttggtcatcctttcgggccttctccttggcggcgacgaacaaactcttgggaggcacttgcacgaacgcgcaggtgagatcgatcaatcagttttggttaaacaaagaagtgttttggtcatctcgtgagcataggagatacacaccggttagtttgatcatttgtacataatttaaaattatgttgttattttaatatagaaaaaagtacgaattaccccatgaactatcatggtacattgaattaccccctttaactatacaaaccggacaaat

SEQ ID NO: 40960 - DNA, 1111 bp, Oryza sativa
tactcaaatggagcattatttaaattaaataagttatgggctattttttcaagaaaaacatttcaacttaaatatttaaggtttagtttgatttagattattaccgtggagtgcttacttcgtccctatattttagaacatagagtggctaattaatggtagagataaattaaatatttaaatgaatagcaaaataacatgtgttgcaacgaaggaaggcaggtttaattatgtatgcgtactatatacttcataatatcaaataggaagccccaatggttgcctgtgatcaattagttgatatatgttctgcttttagccgattcatatattgctttatatatttctcttgtgacaagtggatgtatgattgtttgtgaggagaggtaaggagaaaatcaagaagataggtaagactaggcgagccattagtacataattaattgagtattaattattttaaattttaaaaaatgaatttgtatggtttttagagtagcttttatatataaatttttacaaaagacaaatcgtttagtagttcggacaacgtacacgtggaaaatgaggtaaatcttctctcaatcttcaagtgaagaacacgggggatgaaaaagttttaaactacttttattcagactctctacaattatgcgataagttaatttatgtattcaattttaaacatccgcagtgaaacagtgcttaaatattgctgctgagaattatctgatcaaagcaatttataactgtaaaatacttgtgggaaagaagaaagatatccagaagctcatgcaaaatgtgagagggacaatgcatagaacccgactttatctgcactttgctctgaggattgttctctgaaaccaaaaaccactggtgcaaaatagtagtactactcaaccagccaaacctttaccaaagtgaaaagtcaccatgacgttcgcctgttcttgcagcagtgcacgtacccctgctctgagcgcatcaggctcctctaccttcaaaggtgtgagcctttctcactaacatgtaggcccatatgggcccgatgaaccccaggtccacctgttagtgacaaaggtatggtgtctttgaaagcagatgatct

SEQ ID NO: 40961 - DNA, 502 bp, Oryza sativa
acagcccagggcagtttaagggaggccccaaaattaagcgtcctctttatataacggattcacggcctctatcgtacgaggctacaggttggacgcttgccgtggacaaacggctgaagtgaaggcactagccgccgcgagcatgaatttcaccgtattttatcaaaccagacggcgaagtaggacaacgttccgcccctttcgatgaaaaagtcagaactcaggacgaaaggttctacatctagaatccgcaggtccaagcaggatggagataataatatctccattctcccggccgcaatacaaggaatcctgatttgtaagcttggattacgtgagacactaatacgggacagtgtggcccacatgacaaacagacccacgtagcagtatggccagtatgtattgaaccggttctgctcggctcttacgggctacagctaggtagagaccaatcaatcacgcacgcactgggacagtcctcgccgatgattagaaatcc

SEQ ID NO: 40962 - DNA, 548 bp, Oryza sativa
ctaaggtatagaactttgagttgtatttgattattggtgtcctctaaactttcatatgttctagcggtctcagtgctaacttctggtagtcctattaatataaatttcacatacaatgcttaatatacataagcacagcttgatgttaatcaggactgaactggcaagtacagccactttaaaaatatctatctttgcttgctctaatgatagccttggttgataatatggaggtataattgtgattcaacagtttggcacccttcaactcccaacacaccgacgtgtacaggggtacttttaaatgatattcattgacggaacatagtttatttagtctccttccttttctccacctactgtgcttaactgcccctctgttaatacacaataattggtgccaaaatatttatctgcttgtcatgtagactgtagaggggtacttttaaatgatattcattgatggaacatagtttatttagtctccttccttttctccacctactgtgcttaactgcccctctgttaatacacaataattggtgcca

SEQ ID NO: 40963 - DNA, 1413 bp, Oryza sativa
gcaatgcgtgcgtgcagggtactacaatgggccgccggtgatggcgccgccgcagtacgcggctccgccgccgaggcggccggagccgagcttcctcgaaggatggtaagaacgacaaagccatatgcgagcatacgatcgtcagaatactgtctctgtcctttgcattctctctgctaatcatggtgctaatttgtctgaataatacagccttgctgctctctgctgctgctgcctcatcgacgagtgctgctgcgacccatcggtcatatttgtgacctaattacggtcacagtggcgtctcgactggttgacgaggacgaacagtctgagttgagatatacactgtacacgtgcttgccttttgttaaatgttgataattgtatcggtctatagctagattacagtacaagtcctccgttaagttcaggttcttcaagtatcagatgcatgcgtgatccacctgcagtggaaatatttatattgcatgcactggttgctcgattaaccaaaggacgtatacgtttctatgtgtatgtctgcatgatcgactataaagaataaacgaaggtaaagtgaagttatactgtgcatggtcctcaaatctgcaatatatattttgcgcccccctgaatttcttctgcaatggcattgcacattcctaatcgaacggttggcagagattccgatggggttcggagttttcaactccgaatcccatcaatgggccttcacgagcccgttcagcgccataggccgagagcccgaggcggagcctcccatcaggcccaaggatcacggagcgtcgcgaataattccactcatctaggccgcacgggcttgatcgaacggtcgtcgggtattccagggagctcggagttggaaacaacgaacccccgtggccctgtattcgggtggcaagaatgaggcgccaggcctcgccggagcgccgccgcgtaatacccgtccccagaggcaaagaggacgcacccgagtgcccaagttccagacttccagtacgccgatggcgtctgggtcaatgtgccatttgtccccgtggcagctagcctcagagaaaagaacgagctaaaaccatagaaggtctcactcttcttcatctgcattgatgaacttactggagcagaatttcatgcatggccataatgttgcaaagggcaagttcgatgcagcataaaaggttccagctgttgttgttgcaacactgccgcgcagagtacatagtcctaatcaccgcaacacgacacgttaaccgctagctgaaatcccagagggggtcggagtactccgaccccatgcaccagtgcatcctcctcctgggctcactgcggctgtgcggcacctgctgctcatctgagccgcacatatctaatcagacggcgggaaaagattcc

SEQ ID NO: 40964 - DNA, 630 bp, Oryza sativa
tttattatctgatatactgacatcaacaatggaacacgctataggtgctggggcactattacctttcacatgcgctgctcaccagtatgagagataagagtgatagcaaacaagataacccagccctttcatcaactctttcaattaccaatatagacaacattgaagaagctgatatcatcatctgcgttcatagcatccagtgaacattcatatcgaggaaaaggatagatacatattcattaatagcattggttatgcacgataacatgatagtcagattggctgcctagcacagtagtatggaaactcagacacatccttttttttctctttttgcctatggttaatacttcgatgatattaaggacattcaagtaggtgaactgcattttttgaacatgaactacttaatacagttttttctcccaatggactcgaagcataaaatgacaacatatcaaaaaaaattccaagtccagaaaccatggaaaacaccacgaaataagtaaacagtagatggggaaattacagaaagatgagatatttagataccggcaacctgtcccaaattaagcggtcatcatctggtttgaggtgatagtaagccgagccaaatgctgctgctac

SEQ ID NO: 40965 - DNA, 564 bp, Oryza sativa
cactgaataactaccatataactagggtgtatttattcagaattatcgtctccatgcgcagattgaaaaatcagcatgccaccattggagcgtgaataccttttgttcaatattttttgtccaattttttaaactctccatttagataaaagcctattatattaaaattctctacacacaaactttctacaaaagaaaagtttatattcataaactttccatagggaaataattttattaggagactttctgcagtagctaaagaagtgatggggtttaaaaaaaaataaaaaattgtaagatatgatggcttggatatgttcatttcatgagctaatcggcgtgttatgagctaaaatttatcccatatacatatttatagagtactattgtctgtcgtaataattctaagagacatgcatcaaagtaatatcagatttcatgaaaacacattaatctcagctaagattcttaaaaataattgtggctatggataggagaatatactattgtagtcgtgtacgaacctagctaggccctaactactaaggccttgtttagttc

SEQ ID NO: 40966 - DNA, 736 bp, Oryza sativa
aacatacaagtttaaatttaacttttacatctcgcaacggaaaaaaaataaatttgacatatgaatatatgttaacaagctgtagtttaatatgtttttctcgttgtgaaatgtagaagttaaatataatataacataacatattaatatattttttaaatttttttcataattatttgagtgacgtacaaacaacgagaagtcgtcccctcgggatatcaaaatccactccctagacaacgataatggaagcattattttcgacctctatatcaacaaacaatgcaaacaagcattatttatagaaccttgtcgctgccgttactgaaggaggaggatgcgaggagctccggtgtagaagccggacgcgccggtgcggagccatggcttgtaaccgagctggcttctcttcccatcagggagaaatgcaccagctggtccggggaaacaacaaccagagatctccggcgaattcgttcctctccatttctacacgcaatggatttgattcttcttatcggattcgaattggatgtagtttccccctttcttaggtggataaaaaacaaaaaggaaaataaatattggtgaagaactgtaatggactgggcctagagatgccacattatttttatgatggaataagtccattttgtctccctcatctcttgcgcttgattgaattgcctccctcaaccacaaaaccgggtataatgaatccctcatcttcaaaaac

SEQ ID NO: 40967 - DNA, 612 bp, Oryza sativa
cctagctaccagtcttgcatctctaactatatatacacatacatgtagcatcctgctccatcttaactagctactactagtgatgagcagaatcaacctcatgcagtaatatgctgtgctgatcgaattaatttacacatatatagatagatagatagatagatcgttcgaccaatcgagctagcttgagcaaactgattgacctggtgaagtggtataattaacgagcagatcatggaggattgcagcagctggatccatggctacgccaacgctaacgccaccgccggcaacaacggcttcatgtgcggctacgctgccaggtaggtgttcaaacatcttgatgatcaccgtgacacgatcgatcgattgatcgcgacgacgacgataataccatctgtaaattagtcgtctctgttcttgagtggtttggctgatcagttagttaattagctacttcgtgtttgcagctgcagcccagtagagtttcagcagcagcaacagctggtcggctcgcagattgagcaccacctcaaccaggcaagcttgatttgcaatttattcgatcaagaaacaatgcataaaatcaaagaaattttaggatttaatttg

SEQ ID NO: 40968 - DNA, 653 bp, Oryza sativa
tttttttaataatcgtattcaactctaaagcttgttatattctaggatggaggtagtaaattttaaagaaaattatgtgtaaaaaaatagttatataggcgctagccatgtaattgcgcgggccacactattagattttaatggacaatgctaacaactcggcttaggctgagttcgtttgtggggtggttcctaatctccacacgctcgtttcacatacacacgtttcccaaaccgttaaacagtgtgtttttttaaaaaataatagagaaattgcttttaaaaattatattaatctatttttaagtttttgaagctattatttaattaaccattcaccaatctaccacttcttttttttttgcatgggatttgttcccaagcacaccaaagaacacagccttaagatcaacagtaagtattagtacactacacatcccattctcaagtttatggcacggcaaaattacagtgctggagttctaatgaccaaatagctctggcaaaaaaaaaaaggggggggggcctaaaatgatataatcactctggcccagaaggcctaaaatgttcaagacagcaaagaggcctaggccgtcggcgttggactggttcacatacagccaaagcccatggttcaccaaattgacagttcc

SEQ ID NO: 40969 - DNA, 662 bp, Oryza sativa
gggtgtgtgtgcgagagattggagatggtgcgctgcttatatacaagctgagctacgcgcggtgcgttgtgttacagctttcaggcggcctggctagctagcttaatataagctgacgatcgagcggccgggcgggctgtcgcgcgcctggaatcgattggttggcttggcggctcggcgccaccagctggttcagttcatcgtggtgggagggagtccgcccggcgcgggatggggtcgttggcgccggcccggggcccgcaattgcgtcgctggagagcggcggaataattgattgcgctcgcggcgcggcgcggcaaggcacatggtgaattggcgttgagatgacaactcctctgccgtgccgcgctgtctactggttacgggggcttgcgtccatggtctacaagcgaattctgatgcagcccaatccgatgatccaggcccattttccgcagggttgggtaggccagatcctcctaatcagaggctcagagcgttcggcccagaaccgtactgaaacagagagaaacaagtacagggaaactattctaatccctcgaggggatgttccctcgtttgctcaaaaatcatttaaatggttatgaaaaattctgaaaaaatttgacaacattcatacaacacatatatacaacttcaca

SEQ ID NO: 40970 - DNA, 702 bp, Oryza sativa
atgtgtgcttgtttaggcagggcagggtcgccttggaataaggaatggatgctggctgggagttcctttcacaggctggggcattgttaggtttgctatgattagcagcagctggtatagctggggtgattggccggctctgaacgatcagcagttgttgtttctggtttgttaagggaaaactaacatgcgcaggttcaagtgccaactggatgatggccccgcgaaattcgcagatcaacttatttgctattgttaaacaatgaatgaaatgaaatcgcagaaataatatatctaacggccggccggttataatggttgttcgtttcgcagaaaatttgatttgttcgccgaacacgttccgtcttggcacgtggatgatccgcgtgcatgtttgatgtggtccaattctaccatgcatccgtgccggtcgatgcaaattggtgtgttccgaatagcatgttccgatctattagcgcgtgattaattaagtattagctaattttttaaaaaaatagatcaatatgattttttaagcaactttcgtatagaattttttttttgcaaaaaacatatcgtttaacagtttaaaaagtgtgcgcgcggaatacgatagagaggggttgagaacccaaggttccaaacacaaatcaagtttcgtttcagatttcagctcatggttggtcacgcgcgcggtcgaaa

SEQ ID NO: 40971 - DNA, 3530 bp, Oryza sativa
aaaagttggaagtttatgtgtgtagaaaagtttgatgtgacgaaaaagttaaaagtttaaagaaaaaagttggaatctaaacatgcctatagagaatataccaataagctgaatagcaaacactccgattctaaagtccaattcaaagaagagttcaatcaatgccatgtgacgtgatgtcagagagacaggaaagaactacgaatgtgaccccattcacctccgacatgaaaaacagagcaatgaattagtacgtgattaattaattattagcttaaaaaacttcaaaaatagattaatataacttatctatagaattttttcaaaccacgcaccatttagtagtttgggaagcgtacgtgcggtaaataagagagtgaggttggaagcttaactgaagaatgcagcctaaaaaccatagcattgtatacaacaatcaaatatggtagtagtaatttgtattgcgaagcaatcaaagtaccatggagaggtaggtagtctcgtgcctcggtggcaccggttagcctagctagagttccggcagcatggcggcaagcagggcagaggattgaagaaggggtcggacaggggcaagcgcccgtcgtcgacgccgaagcgactgggagggagtctccatccatcgttgcgagcagctgctcatctagaccgcatatgcataatcgaacggacaacagagattccaatggggcttggagttttaaactctggacccttccaatgggcctctgtgggccaattcagcgcaataggctgacacagagaggcctctcgtcaagtcgaaagactacgcagccacaaattattccactcatcttagtcgtgcaagcttgatcgaatagtcataagatattccacggggttcggagttcaaaacgatgactcccactcccactattttgtactcctactcagcaaagaacaccaccttggccctcgtgccaagcctcgccggaccgccgccgcgtcctgtccacccttcgctagccagatccacatgagaagaggatgcacccaagctctaagcaggtttcccttaccgtcggtgtcgagtttatcgcaccttagcgataaacacgattaccgcgtggtaactgcagtaaactgtataaaatttattaaaaaattaaattatttttaaaatttgtttaaatttaatgagattaccgtggttttatttttatggtaccctaacggtaagtaagtacagcaatttgacggttactgtcggttttgtcaaccttggctgttggctccattcatccctgacggtatgcagctagctagcctgtcagatattccaatgttgtggacgatctggtcgtcgaggtgctctcgccgtcgcccgcgcatgcacgcacctttcatgggcctcgaactctggaatggagtactccctccgttcagaaaaaaaacccaatcctagatttaaatctggacatacactgtcttcagatttaaacccaggattggagtatatgataagctgaatgacatgcagattttaactctctaattcacagaagagttgttggagataatagaaatgtgatgtcagagacaggaacaaactactccaaaccatactccgcatcgatgatcttgttggagcagaattttatggtctcattattgcaaagatgcagcattgaaggttccaatatattgcactaaacaaattggatatagatgcaaattaaaccgcaacacaggcgcgcgcagccgcgcagagtgcatcagagcgatgagatctaatggcctaatcaccgcaatgcatcacgttaacagcgagctgagatcctagagtgggtcggagatttaaactccgaccccgtgcacactgccgcttcacgccagcccgataaacgtactctcttggtctctcgacgcgtagtctcggttgacttggggcggtttatgaagaagagcagaaactgaaaggcagtcaatgcagtgaacaccgtggcagcatttcatcgtgttcatgctatagcagatattttctttgcagtcaaattgagaagacctccagctcaaaagagagagagagagagaaagaaaagaatgagaagaacttgaaagcgatgctaattaacttccggcatcaacattcacgaaccaacacggtacgtcaggcgaacattaattcagaaaaataaaacatccaaagtaaaaaaaaaaccaataaatttcttatgtgctgggaatgcgtaccgtaccaaagcttgcgatggattaagaaaggagactgtccggcgagaagggaccaaagcagttttcttttttctccgaaaagcatccctggacggttggaccccatcccgagttccctgctggtgaagtagtacactcaaatggcaggcttacgtccaggttacagtctttcttctcaaactgtgacacagcagcaatccgtagcagagtcatgtcttcctttctcagttcaatactgctcttgtaatttgggctctatacaacccttttagcatttttttttagagaaggatattttttaaccggcctctacatttaaccggatatatacggccattgaaatagggaacttagccccgcaaacaatccaatctgaaattcgctccataggaaatttgaactcagaaccttggggtactactcagatcactacaacccttttagcatacatgacctgtaaagttacttaatgatccccgcaaaaaaagttacttaatgataacgaataatcaattaatcattcgtgatcaagttatattgaagtacacgaaaaagtgttaataatgctgccaaatgcagaatgctaatgccattgttctttatggactctgctagtaataagaaacaacagggtcagtgttcttgatggaacctacgaggtttggcatacttttgagttctcagtcaaggaacagcgagtgtacataacggccggcccctaaggaccagctgcaaacaacgaactcactccatttcatctttttctatttattattgaccgcggccacacatacagataagttattccccctctttttttataagaaggaaaataaacagctcgttttcttttcttttttgaacggaaaacggcacgagatagtaccttttcattgaatggagtaggagaaacagcttgctttatagtattaacaggtaataaaaccgaaacggtggatcaaagaacatatattacaggaaggatttacatcatcacataaatggaagagggtaaaataaacggagcaaaacaaggaactttcgatctcgatcggcgattattcctcccttttctacgaggtgggccatcacatcgatcacccaaaaaacctccaccaatataaatactggtttcccccatccgaacacaccgagcaatgatcatattgtaatccttcccgtcgccgagagattcccacacaggctaaaactatctatcaggcctgcaaatgcaatagggctgagaagtgaggaagctaggcaacctcaaccttattataaacacggggggatccact

SEQ ID NO: 40972 - DNA, 790 bp, Oryza sativa
cataacgcaaccctaagctactgacaaaatggatctttttttctttccaaacaagtgctgttatctggttaattattttattttgccaaatcccactttattagtcaacttgtcattccgatttttagctaaaattttccatccttgtagtccatgttttgttggccagttatattagtcgagttatggctaaggcagcattccttaggagaataaaggaaaaaatatctctcattgtccactcgtacgcttctcaaatgattaaacgggacgtttttcctaaaaaagaatttctatataaaagttgctttaaaaatcatatcaaactattttttaagctcaaataatcatatgttaatggtttatcttgttttacgcatcttctcaatcttttcatttcccctccttccaaacacacctaagtcaaataaccctatggatttttgtgcgcttatataccacttctacttttttttaccgaatgaactaaccaatgtctggatgaatttagtattattgttccactggataaaagaaaattcaattggaacaacttatgttccaaaaccacgaatgcattcccggcgcttatgtgaagcaaaaggaaataagaaacaccacatgtatctagaaatatatagtagtactagtaattactttgtcctaaaatataaaatttaatattaaatatgcatttgaacagctataaaatataatgtgtaatcgtagttttttatattttggaacaaaagtagtttatgttttggaacaaactgcaggggtgaaacgc

SEQ ID NO: 40973 - DNA, 534 bp, Oryza sativa
gacgatgacgaagccgacatcactatggctccctgagctcactgccaaatccgctgggacggcgccacgcgatttttcctctgccgccactgcgtccacagctggaggtggatctggagccatcgctccaagcccctcctcagccgccttctcgtattctcctgccttaggtgtagactgcagagagagatagagcaagggagggatggcttgactgggggagattacatgtgggcccatgctttttttctattttctttgctgactggattgccacattggcgtcacatgtgcaagcttaggtcaaaacaacctaaaatagtgctcaggggggttatttatctggtttgaataattgagggtataaaacgtatggtatttgagttttttttgggggggtaattcaatcgaccgtaatagttcagggggataattcatatttttttcccttaatatatctctatcctctgctattataaaaattgaagatgtttttaccatcagaaaatctagggaacgaagtcccatagacat

SEQ ID NO: 40974 - DNA, 715 bp, Oryza sativa
ttttcggaaaaggtcaaattatcaaaatttgtgataaaaatacatgtgtttatttgtcaaggcccactgtagaagaaggccagcatgagtggatgcctagaagatttttttttctttttcctttttgcatgacatggctgactaacgtcaagtgcctccataagctgatggaacattttgctgggtcttgcaagaaacatttgcttgctcatataaaaatttgcctatacatttcttggtcagtctcctaaataaatctagcctttctttttaaagtagcaataatattttataagactatatatataaaatgagatacagtatgcatctttcgaaagaccattcaatcttaaatttccttcctgagcgacgtaatccatgggcgccttcaccacactccagtgtgacgaagtatgaagtattttttattactattgtaattgaaaagaaaatatgcaaatatagtgacatataagtacaccgtaagtcatacatatttaatatctactatctctgtcccaaaatatatctatttgtagcatagtaacttgtccaaaataaagtaatttcttcacctactttctgtttaccaatcacaatcctcttttaatcatctctacttagtttcttaatatccgtgtctacttaaaaaatatttaaattctaggatggaggaagtagataaaattcaattaaagttttaaaactttgacat

SEQ ID NO: 40975 - DNA, 607 bp, Oryza sativa
cccccaccatttaccatcggcgccgccgtatggggtcgtgggctcactacgcgccgccactagagctcgccgtcatctagctggcaaccgtagaagcaccagcaccaggtcaaaacaagctcttcttgcccgtctccaagtcgaattgttcccaactccaacgccaagccgctaataccgtcgtgctagccatcttctctccatctactactttgatttgctagctgagccaaacaagttggctcgagctttcaaatgagacgagcctcatcagctcattatcctaacgatttagaccgaactgagccggggtgactcgctatccacccctacttgcagccacacgagaaaatattgttggccaaccggtcagccatgtggagatcaaaaccaagctaattactgctgctgctgcatgctgaatgcagtaagatgtactccgttgtctcctacgtaataatacatctacatactagagtatagtaatacgttgaaaaatataggaacatttatagtactaaactagtcttattaaatttagcattaaaatatattttaatagttgatttgttttatattgaaactatttttatatttttctataaac

SEQ ID NO: 40976 - DNA, 819 bp, Oryza sativa
ggatcccccatacatttatctatctctctgtcttcctgtctatctatttatatattctgtcttaaaatatagatattttgaacggataaaacacatcctactattttaaaatcacttatattttacgacagagagactactaaaaatttattaaactttctacaaacgctctcgagctgctacgcgacaccctataaatacatctaagtcaatacgtgatactctaataaagtatatcactatatctattttaccaaaccaaaacctcccaccatccccacctccttgcggcatgtgcacgcacgcaagtaccgactgttgtacgcaccctccgttcctttctccgtttttttatccatatcataattaaaattaaaattatctttataggaaaaaaatcccacaagtagacatcatacgtgttaaagtccattaaacattctataaatgtttctaaaccgttatatggcggtcttaagtcaaagaaatatccaatcattggtttctagacacataattttacgtcattattagatctatttttttaaagaaaaatctcaaccttcttcccttcctccccatccctgtgggcgttaaagtacataaatgctcttataagttgcttgtacttgtcttgcttaaataatttctcacaaacggatctagctatcaggtctagctagttgtccctgtgtctcttatgatctatttgaactattatattttctattgaaatcaataatttaatacaaatattgactatatttaaatgctaatagaaaaattatattctggacccatatatgtattgaggcgtcc

SEQ ID NO: 40977 - DNA, 626 bp, Oryza sativa
ctagacaccccacagtgcattgccttcccatctttagagccacgtactgctggatctaccaccttctatcttaacgagtcgaccttttaacccgacctaaccctgccgactattatatgcttcgttcatagcgctaccacattaaccagaccaccggctcccagtatataacttgttcatgcatttaattaactttatcgcgggaaactgtttaacagctcgagtgaacgtctacccatttattgcatgtcatttaaatggtatgaaaaaaattgaaaaaaagaagaacaagatagatcaatatgtaatatattaatacacaaacatgcaagttaaaatttaacttctacaaattgtaacaaaaataataaacaaaactcaaattactatatgtatatttacaattaaatttgttatttttgttacaacttgtagaagctgaatttgaacttacatgtttgtagagtgatatactacatattaatctatgttgtcaatttttttgaaaatttttcgtaattaagtagttgacatgcaataaacggatggacatccactcgagctattagaatccatctccactctatcgcgtcaaaagcaaagcacagggatggaaaactagaatg

SEQ ID NO: 40978 - DNA, 4082 bp, Oryza sativa
ttcattgtagcaaaaaaaatcataatcatataaaattaaatttaaatgaatatccaatgatattatttttaacaactaaaatttaatttataataaaatacagctttgaaagaaggcaccacgttcgctgtggaggctagaaattcccacattaatcggagaaaaagaaaaaaacgaaaaggagagtccaagtagaaatacaatctaaaaatagctgaaattcagaattaaaaataagcaatactgaaagaagtttctatataagaacccaatacaaaattaatcaaaattcaaaataaaaataaaataaaatccaaaattagaaagaaaaaaagagacccaagtagaaattttttttaaaatagctgaaattcgaaattaaaaataagtaatattgaaagaagtttccatataagaacccaatacaagattaatcaaaattcaaaataaaactaaaataaaataaaaattagaaaataaaaggatagtccaagtaggaatacaattttaaaatagctgaaaatcggaattaaaataaggaatattaaaaaaagagtccatataagaacccaattacgagattaattaaatttgggaataaaaaaataaaatccgaaattagcaaaaaaaagaagagttcaagtaggaatacaatttaaaattagctgaaatttggaattaaaaataaacaatattaaaataaaaatccatataataacccaatacgagattaattaaaattcagaataaaaaataaaataatattcaaatttagaaaaattaaaagagagttcaagtaggaatacaattttgaaacaactgaaattgaaaataaaaaattaaaataaaaatactaaaagaacacaatacgataataattaaaatttgaaaaaaataaattctgaaattagaaaaagaaaaataagattttaattgaatacaatttataaataactaaaatttgtgataaaaataaagactattgaaagaaagaccatctaaaacacatgacgagataaattaagtaacaggcctataaaggagtagagtggtggcggttgatacgacatataaaaactattaataaaacaccaaatagaatcctaatgacgattaaaaggagggacgataggcaggccatgaagcaaatgagcaatgcgattgccgggactactagaaagtaaaaaaaaaccccattgataatcatattcaatttttaaaatctcaatgacaataaaaaggagaagcagtgggcggggtgtatagtagtatagtttcagagccgctgatgtttgacgtgacttctagaaaataaaaaatgaattccaacgatagttatgctcaatttttagaatcacaatgataataaagaaagagtaggcggcggacgggccataaaggagcatagtggcatcgtttgacgagacttctaaaaaaatataaaaaatgaaacccaacaagacaataaactctaaaaactataaggttcaatttttaaaggttccgaacttcgaaaaagtaaaaaaaaacaatgataatcatgttcgattttaaaatctcaatgaaaataaagaagggacgcagcgagcgagccgtagagaagtacaatggcaaagccgttgacggtttggcgggatttctagaaagtaaaaatgaaccaaaacgataattatgttcgatttttaaaatctcaatgacataaagaaaagagacagtggacgggccatagaggaatataatggcaacgtttgacgggacgtctagaaattataaaaacgaaacccaacgtgacaataaactctaaaaactataagatccaatttttaaaggtttcaaggagaatgaatagaaatagtggtagatcgagcaagcaaataaagaaggagatgtcataaggggtagcaactggtgtgacttttaaaatatatataattagaaacacggggatgataaggtttaatctttcaaactcttaagacatgagatagctatttaataaattttaagtaaaatcatactaaaaaaatatatgattttatttgggtgctagccgcgcaattgcgcgggccacccagctagtttaaatgatgggaagaaaattacgattagttaataagagaaagtggctgaagataataacttaaataatttgtgattgtttgagaggatgtggtaagtagagaaatagttctattttaggacaagacaccgataaaaaaatagctatatactacctctatttcaaaataattataattatatttctatgtttagattgtgtttgagacttgaacaaagagaagaaaagatcattgctttttgtgttcacgcttcacaaattattaaatggtgtattttttgaaaaaaaaattctatggaaaatttgctttaaaaatcatatttatccttttcaagttaaaaaataatcaatacttaatttattacttcgttcgtttcaggttataagactttctagcattgtccatattcatatagatattaatgaatctagacacacatatatgtctagaatcattaacatatatatgaatgtgggcaatgctagaaagtcttgtaacctaaaacggaggtactatgtactaatagcttatctagttttgcatatcttcttaatcttctttattcctcatttctcaaacatagctgtggagaaatgctatgggaaaaaaatgatgtatagccaaaaatgagagggtggttgaggataaaattgaaaaaaaaataaataagaaatgattgatggaacaattactactttattatgataactttttaaaagataataaccgtttattatgacggaggtagtaaaaaatttaggatgaatgtagcaccgcagtttgcaatcgccaaaaaacgagcgtgatcaaactgtggggctttgcttatgtcagggcgctttgtttatcaactaagcgtgattagggtggacctgtattttgggattctttgaagcgatgcgatgcgatcaggtggtgtagtgtcaactcaaggcccatcacgatatgcaaaatgtgattttattagtataaccagtagctaagctatcaatgtccgttcagagattctagcatgggcttttattaggttacgcttggatgtcagagttgaattgggttggtgtggacatggaggtccaatcagggttgtggaaaaccacgaaattttgaggtttcgatgtggaacggaagtagattttgagtgaaattttaaatagtttttgagaatttaaattgaaacagtaaaagttttgactaaaatttaatgaaagtttgttaaaaaaatgtcataccactagtgccgtgtttagttgttttggcaaaaaaaaatgacgtatacggacacacatttgaagtattaaacatagactaataacaaaacgaattgtagattccgcctgtaaactgcgagacgaatctattaagcctaattaatacatcattagcaaatgtttactgtagcaccacattgtcaaatcatagcataattaggctcaaaagattcgtctcgcaatttcaatgcaaaccgtgcaattggtttttttcgtccacatttaatgctccatgcatgtgtccaaatatttaatgtgatggaaaaattggaagtttgaaggaaactaaacacagcttaggttgggttccggcactcattaaaaagatgaaccctaggtctaattcaataacaattataattggtacaatatttggctcgaattcaaatttaataagatgaaaatattgtttttgatgaaaaaagttactactagatcgctagcaaattccaacaatattacttaccaaattttgctgtactctatctctaaggaaaagaataacttataagggcgaatctagacaattgttcatattcgcacatagaagttgtttctttaattgtacaagtatatgatttcacatatatgatttccgggagtttctccacatctattaacatcttccacaagctaatgttccaaactcatcgcgttgtgcctttttcccttttctccatatgtatatcatgaattgacaattattttctggaagcataataattaagaa

SEQ ID NO: 40979 - DNA, 1259 bp, Oryza sativa
tggtttcttctttttatttttctcatgtgtttttctatggatcaccgctgcagtgttatagccttataggtatgtgtaacttgaattgtgctatattatttgtcaataatagtgccattttgtggtaacacatgctgttataatgagttctgtggcctattggttatatatattgtaccgttccggattctcacttcgtgagattacctgatccttatacgaattatctgaatgattgcgctcatgcttacgttcttgccttttgtagctattgcatcgcaaagttttcatcttgtaccaagctggtgcctggttcatctattgggtttcataaaaaatttctggcagctagcaataataggaaataacacaaactgttttgagcaatagctccaatgggctctttggaacatatagtggttataatacacgaagtgctggttttcctacctactaatatacagttagattgcaatctgcaatattattttggtaatggatatatcctttgtttacagccattacatgtttcagtttttttactggtcttcactaagcaacttttgctgcttagttgtcacctgcatcagaaggcagagaataacttaactttacatgagataggtgagcccaattttattgaaacaatattttccacttgcaattttgtattcagattaactaaaggttgtccccaatattttctcttctcagtatagctttcagaggtgaaaagagaaaaaggagaaataaaaggaggtagcagatcactctgcatttcaagttgctgacctagcctaatcaacatgtcaaatgtcagacgtgtattgagtttgatgtactaaccactacaacttattgaataagtatgaattgggttttttaccattaacatttaactgctgcaatggataagtacaaatgaggatatttagtattaacatattactatcttttatagacacttgtatcagtctatctccattacaggtgtaacttctgttggtttgttgatatcacaaaaggtaaaagaaaaagtcgccttaactataagtctgtaactgtacaatatggcatatggttcaggtaatatatctgtaaagctttacaaaatatctccaaataccaatctaatttgttgtccagaatttaatcttactaaaggatatcttaatgactgataggagttaggactttatccaatttggtatgttttctggagctatataaatttagataattgcttatggaacaagttt

SEQ ID NO: 40980 - DNA, 1562 bp, Oryza sativa
tgggccggcccatcaagtgcagatttacgtctactttgaaaccccaaacaagctatcagcatccacacgactctgcttttttttttttctgaacaatcactttcttttccattgatcgtttataacctgtttaagaactgacttgtgaaatgttgtaacacacttctgcaggcagtgcgggaaggagttcaagccgcaggagctgcactcgcacatgcagtcgtgcagggtcttcagggagaagatgaggagcagcaccagctcccgggtcagcgtcgacaggggccggacctccgccgccgcgaggcccgaacaccggaggacgagaagcaagggcgccgccgccgccgccgccgcccccggcgacacctcggaccgaccgtccgccgtgctcctcctcagggactcatgatctgatgatcatttcgatcgaccttggagttcgtttgtgaattttgcagcacacgcttatatggcgtgcataatatttaacagcttatctaggatactgtacattgatctcctttgggtcaaaacttatagatcatgccatgatactgctcctaattgaatcctagctacgccaaatggttttttttcaggaatacgcaaaagaaaagaattgtgcacctttattatattaaaaggaataaaatttacatagacggcaaacaaagaagtaaggggggtcgaggagaaaaaggaagaaaaaaatgaaaacaagtacttaagcctattctcgcgtttacagtgtgacaaccaaacgaccaagcacgctaaccaagaagctttggtggtgagggatgggcaagccgccaaagggcggcctcttgtgccatgcctgcgacaacctcaggctaggatcggaaatagttgttaaacacacagttgttcctttctttccaaatggaccaagcgccaagggtcacaatcatgtcgaacccacgacgacgctccctcagaactttgaaccacctagtatggagcgctatccccatgagctctaggttgtggatgcccaacccctcatattccagtgcgcgcgcagatataggaccaagttagccggcaatggccaccttgtgcgcttgcacaaccacaccaaaggaagccgtgccggatctcgttgatggctttcagcacccatttcaaggggtggggggattacaatgagcagataaaaccaggatcgcgctcagcataactttgacaagcgctaggcgcccggctggatggatccaatcagatctccacagcggctatcgttgtgcaatcttgtcggccaaaggctgaaggtcctcgtggtgcggttttctgatggagagagacaaacccaaatacttgcacgataactcctcaactaaatacttgcacgataacgcctcaaccgggcagaggagagagtcaccgaggactgcgacctctttctccgagcagttgatcggaattgcggaacacttgacatagttggtacgaaggttagaggcctctccaaatagagtcaggatccctattactagggtgggcgttcggtctgaccgaaaaattcggtctcggtcttc

SEQ ID NO: 40981 - DNA, 523 bp, Oryza sativa
ctgctgttcatgcctatcaacggcacccgcaacagcaagggccaaagcctgccggccatccacatcacccgccaggacggcgaccagcaccgctggagcagcagcacccgcgatgcgtttgatggcgtgaaagcctattggtccgacagcgtgaacggcaagcgcagcggcgtggtggccggcaagaaaaccggcaacgtcaaaaccttgaaggaaacctatgccagcgagcaggacgccctggccgccgcccgggccgagcgccaacgcctggagcgcggcctggccacgtttgagctgacgctggccatcggtcgcccggaggtcacaccccagtcacctgtgaccgtgagcggctggaaagaagagatcaacggccagggctggctggtcaaggaagtggtgcacagcctgaacgaaggcagcggctggaccagcaaagtgcagatggagatgggagttgatccagtaatactagctaacgaaaccacgaatagttaatcacaaattctgtgcatgatct

SEQ ID NO: 40982 - DNA, 766 bp, Oryza sativa
  unsure (1)..(766): unsure at all n locations
gtgtatgattgctaactggttgcacgcagcncgactntataagatcccccaccccgggagaggtggagaggggagagtaaataggaaagaggcggcctgacaagaatcagcgcgtggggatgaaaagtcgagaaaagcggggtggggattagattgaggaggaaggcgtggggtaccagcactgtggggtgggtgacctagagatgaatttttggccaaaatccttgttggaatgggctggaggcacgccaagcatgtcttgcactgctactggcctaataactgttgtcttggctggcgatgggatggcttcgaggggaaagaagtgggcatggtggcataggggcggcgacagtggcatgagctcggctcacactttccgcgaggacgcgtgactgcgggagctggagcacgaaaacgcgaggcggttcaccgagtgcatcggcgttggtgcggcacggacaatagggaaaaagacagggctagggcgaggtgtcgtgcggctacagtttgggcggcatcggagtggggccagcgtgatgatgccagccacatcagccaacatgagtggtgtactggaaggcgagaaagtcgttttttggggccggcaagtggaggtgtgtccgaattttctcgtggaccggtatcattaatgcaacacatctcgcacaggataataatttgtgtccctttaaaacgccaattggtgcgtttttcccccccctaaatttttctaaaaaaagtgggggatatttaaaatcttctt

SEQ ID NO: 40983 - DNA, 581 bp, Oryza sativa
acatgttaccgagagattcttgaaagttacatacaagttacattatagttacagtgtaattacatacaagttacagtgtaattacactacgattgtactgtaattacatctgacaaatatcagggggagaaatttgatgacaaatatctagcaaaatcgttaattaaatacacacatcttaatccgattagctacaattcctagcaataaagtctttaagggataaattaattttggagtgaattgcactttgggccaccttttattgctgtagtttcactttagatcaccctagtcaattttttcactttgtactagctaaatttatgcttattgcactttggatcatctcaactctcttcattagccatgtctacctatactccggcaaatgtacgacctgctcatagacggagaattttgctagctgttataaccgatgtcttcaaggttattgatgtgataaagaagtgattttaggtggtctaaaataaaacaaatgtaaacttagttagtctaaaataaaaagattagaccaaacgtaatccaaaataaaactacgacaataaaatgcggaaact

SEQ ID NO: 40984 - DNA, 504 bp, Oryza sativa
aagtgaaacatatggtgctgctttttccattgggccagttcggtttttttctattgtcatggcacatcacatgccttgtcgtactagttaggaacatcccatctgcaaactcatatatttttataaatcaaatttcaagtattttccataattcatctaacaagtggtcaagtggagctgaaccaaggattcatatcttaccctgagtacttccgtggccttcttcatgccatagccgttgcatagttgatactctccttgaagtttctccccccggtttatggcaaatactgaaggatcatcatcaccccagcttgtaccctcaccatggtctgccgtcactgaaaccgtggtcttcgcctaacatttccgaaagaaatttcgaccttttatttagtgacaaaaccctatctttcacaaaaataaatactccatatgtttcaaaatatagctaacttatacttcatccgtttcatattataagactttctagcattctccaca

SEQ ID NO: 40985 - DNA, 542 bp, Oryza sativa
tctttaactagtacaaaattggaaggaactcagcatatattaattgttgaagattactattgaacaaaaccaaaaggaattgttgaaccaataataacagtgatacaaatataacactttggtttttaaggatagaaaaaacaagtgatctaaacatcgtatgcctacagttatccattcagtgtctcaacaaaaatagaatagaaacaacagtgtcacatcttaccctgagcacctctgtggcattgcctgcactgtagccattgcaaatctggtattccccttgcaagccataaatattatttactacaaagactgatgggtcatcatttccccaatttgtgctagcaccatgatctgcagtgactgaacccatggccttcacctaacatctcaaaaggagaaatatatttacaattgacgatgcagttaatctaatagaagtacgtgcgactgaaagaaaccttaaaaaaaatgatttgcataactactacacaacttgcccgctttatcaaaccaaatgcagttctcgaatagccaca

SEQ ID NO: 40986 - DNA, 842 bp, Oryza sativa
  unsure (1)..(842): unsure at all n locations
cgacgtacnngttaganctaccctccttnacatccnaccagaagcannacaantttggcagtgcatgacgttttttgccctttgcagcgcgactcggtgcgtccctcgcccgccatcgacatttcgtctaacaagtggcgggcatgtaaaactgcctgtgtggggaagaaagaataagttcaccgggggttcctcaacttaacagcgagattttttgagtcccttaaccacaaaaccagaaatttacacccctaaactatacaaaacccttcactcaaggtccctaggcagtatatataagtggtttcgctgacactttcatcctaatcaacaaaaattttttaaaaagtatgtaggacccaaccatttacctggccatttttttcttcccctctattctctattctctcttccctctccctttcttcaataaagaagccctgcggcggacataccagacaatggcagcattgctttctcccgcggtgcccaaccaactttcttcccgaaaggacacgctctatcccttcgtcgttgaaaatgcgctggccaccctctgaaccttccacgcaatatttgtggccgttcaaatctttattcggaccttctgaaggcccctttgaaaactaaaatacttacctgcgatcaaaaaccagaatacccgtggcttcattttgctcgaacagaccatcaggataagcgagataatttttcctccccatgctacgagtcatcttgcccataatacaacataatctttatccttttcccactcttcataatatctggcaatacacgaaaatttttttttcccgatattttcctttttcagtgggtacccc

SEQ ID NO: 40987 - DNA, 627 bp, Oryza sativa
gcgtcatctattaaaaaacggagggagatctatttctctcatggaatacctaggactggagaaaatgtgagtggactcaaaacctaaatcagaaaccagacgggtccttgtagaaaaattaagatggttttcatcaatttcgtccaaagtacttcctggaaacgtttattcatagcgcagccattattatttgactataccagttctcgccgtacctaattattcagagacagctgtctatataattttgtcaaagaataagaatggattgaatgcatcaactgaaaaccaaacttggaagccagctagtatgtatctagatgcatggatcgttttcaagagattaagagcttttcccatcaacagtcatttcccattggactatggaagccaatataaatatcactttctgggaattgaacagctgaaaagttggtatactaaagattaattcaagttggtcaattagtcttttttttatgttcaatcttactggtttgtggttaaccaagtcaaacatattttacttcgatcataaggatatttacattaatatttcctctatatttaaatatacaatactattaactttacacgttaattatgtttgattcttgtgatttattt

SEQ ID NO: 40988 - DNA, 811 bp, Oryza sativa
  unsure (1)..(811): unsure at all n locations
agtaataaaacgccgcgggacatctcatgatgatagttggacagaggcaaggtagttgaagtacccgcacacgncagatattgatgagaaagggatggggcggtggttacaagaaaagcgggcccggttagagagggaaggaaaggtcctctcatacttaaagataatcataggagggtgttagtttatagaagagtcctttgccctttcnctancccncaagggnntngnntggtnnnngnngggcgcgacgtcatcgctgccagcagctgaggccacccccgccaccaccttggctgtgcccacatgacaatacaatcgcaacagggctaaacaaaactacctcggcaatcatacccgtagggtaagacgtcagtgcatcatttgtagggctaacaaaggtatgttattcccataacctacaaaatatatgtgcgactaataggtaggtccaccggtggcgttcgccaaccgaggccaaacaatttaatgtgtaacctatgcaaacaacataattttccacctattggaggcaatattgtcaaaggtggcttgccttggtcctgcggtggttcttcctcatcgagaacaacttccggaccgttctaaggtttggcaactatacgcgtaaaaggagaaaatcaacacaaaagctaataaagtagctaaaacagtgagagatagaacttccattagatagatatcatttttataaaaaatatgaaagttgaacggagtcaaatggagctacggtttgcaagatatgaatttttaagattgcataggtacaaagtgcaatntcaaacacacc

SEQ ID NO: 40989 - DNA, 671 bp, Oryza sativa
ttgttcaagaaaacaattgatttgacataaacatccaaatctctaacaatacccggttaactaatctttaacagttttgaaggcatgaacccactacaccatgacttagtatgatgaggacatccgcaccatgcatggatataatcacgccaacggcaagcacacaagctgaaccagtgattaaggatcaatcgctcgagctcgtgtccgtcaacttaattaccatgtagggttgcataagaatgatttactgaattgggtagtactactaaatgctagtggtgatgttattgtgattaggaatgacggtagagatgaacaaaagctcaacgaggatgcaagatagaatatttcggttcagtttgctgcaccaccccaaattcaaacgagcatacccgttgatctaaaaatccatgtggggatttgatagaaagatctcggaattctctttccgacggatccaaccaatctgaatcgtaagagtggtttgttcctagaaaccaaaaccaatggtgttgcatcacctccacttgggcagatgggtctggtttgtcgtagggcgacgtgccatgtcatacacactgtcctagatcacttcatgtataaatactaagccacccccttaagttcatttggtgttttgttagatcataatttaggcattgttactt

SEQ ID NO: 40990 - DNA, 770 bp, Oryza sativa
gattagtttagagaataattgcgctaaccttgtggaggtaaaatgacatttctcctacttccacgacgacatcactctccagctccgtcatgcatctcctggcgattgacaagattaagattaagcatgtatttggaattgacgtgtatagattagcaatgagggataatctgaatcgacctagtatgtgcatgggagtttaggacgtgaatgtgttatatcaaacagaatgtaagcgtttggaattgacgtgtatagattagcaatgagggataatctgaatcgacctatgtgcgtgcatgggagtttgggacgtgaatgtgttatatcaaacagatgaacatactgtgccatgaaagatttccagccgatttgccagtgaacaacatggatcagaggttgggaatgacatagttcatgcgtgaaactcaatctgttgttacgttacggtgcagaaattaatttgattgtgttttacattgtttgagaacctacgcatctccatacaatctgtcacagaagtacccatggttttaaagcactagttgacatactgattactgatatggttagtaaatgaacatcaactatcagatctcttaaactcaacatatgatagagatcctttaagagaattctgaactagaaaaaaaaataaattcaacatacagaaaattaacacaacagaaagaaacgaggaattcaggataaccatgtgaggccttccagaacaaagattccggcttggagcccaacttcatagtcgccat

SEQ ID NO: 40991 - DNA, 716 bp, Oryza sativa
aaaccacgggtttttttatgaagaaccccagataatcttgacttgctcgatgaattcccgtgggcctacagacagcatgaatggggtttggcttcaaccaaccgcatccatgtgctgtgccatccttcaggtctcgtaccaccgaacatccgaacagcagtcagatgttgataccggaaccaacaaccatcagtccaacacagacgttgctcccgtgagctcgcatgcggcgcgaaatctttacacgggagacaagcgcgcaacgcagatcagcataacgacgacggggacgagagcaagcgggtgcagccgcaggcccgcagcgcagctctgctccgagtcgacaggacggtgcgcgctacgggcgaaccaaaaccaaggcgcgatcccgagaactgtcgacccgcgcggcctcgtgcagcgccatgatgcgccgcatgtcaccttgatgagaattttaagcggagcattggcggtttgtttaacaccagcgcacacatcccgggcgctagatctgtttgcctaggttgacgggctcctttggcagatctgatcctgtgctgaatctggggatgagatcagaaaagctgcatgcatggatggatgtccctgacggaaacattgttcgatggcgcagcatgggcagggggcgaaagtgaaagtatccgatgactcacgcaccgaacaagtcagaaaatgtgaggtcgccatgtgat

SEQ ID NO: 40992 - DNA, 1016 bp, Oryza sativa
acatcaccaagaaatgcatgctgtctatggaaagttagtatattctgaactgatattggtttcctttggaatgtgctacaccaagtctgtatttgaggcaatacattaaattaggatatatataagagaatacttgaggtcattgttgtggccaatgtattgacaactgttcattcttcaatgtaatggtgcttactgatacagcgaatcgatgaatagctattcattaatctactggttgaactgcaaagtatatatgttacaactcaaatcagaggaaagctaatcaaatctccaattttgtttggttgcatgtatatacttttaccatttagagtcttgtaaaattgccgcactgcgtgcgccagttcctgaatcttctcccatcctggagcaatgaacttggcagtttaacattggactggttcacttgctgatggcagttccaatctcccttgataactagggatcctagtagggttcttgtgttactactttgatttttatttagctgatgagcaatggctggcaagacagtaaaaatcctctctagttaaggaccccaacatctgtgctttgtatgatctctttggttcaggacttagtcatttgaatattatctacattatacatgttgatgtagttaggtttgcctattatcagagctgtagactaaggtgctatattggaccagtcgatgtttggcgttccattttcaatccttaccttttttttttcgttttgcagaaatccgtgagaaacacaaattggaactggagaatttgacactaacaaagcatccattcaggacattacgttttttcatgttagctatgttgcaatacttgaaaagattagcaacatatatcctgagtaagggtgctttgtttgttgtcctcattgtgttggtgctagctcctggaattttacttgcggttacagatggtctgcataaaaaggtgtgttacttcctgtaatttgattacgatcgcagtgcttgtgctgataagagtaga

SEQ ID NO: 40993 - DNA, 1083 bp, Oryza sativa
gggagttcgaggtatggttcggaaaaggtcattctggtcttcaggcagattccagcccgtgtttcttttgttaattagtttgacgtttctccttaagagcaaattttgatatcaaatggagaggaaaaatggagtctttttgtaggatgagaagcattcagagattcaattaggattattgatgcccgcgaactgtctgaagaaacatgctagaggtctatgacaacatcaactgaaaaaagcatatgatccttgtgtctctgtttccatatgcaggagtaaactgtgtaactgaacccattagcaccctattttctgactgctgtacaagttaaggcgtggcgattacatattgcccgggttccacggctcaatcaatccttcattatttggccgggtacccggaaaacaagaatatgtaggaggaacaaacaacaaccatgcaaaacgccattcttgtattatttcctacaaaagtctatgtgtggcctgcacaacttcaagtttggtagtcataaaaactagataaatatctataaaatgttatggaagaagaaccttgtaattatactctctcttctgttatcagttgccaaatacagtcagttgtagctatgaatcctgcagaagatacgtatatgccaccatggtgtattggcatagtaaagtgttttgcttctgatcaatacaacatatgagcatctctggctctttagtaaagcaactacattgtgctgaatgttaataactacatgcatgctttatggatgcagattataatttttggtgacaaaatcattcttgaagatcctattgaaaggtatgcctgatagctgtgaagggagagccttctatgagcttgaattctttagttctcaatttgttgttattggcaaaatagaaaagcaaattatgcaggtcaaaatatctgtacagatgtacagacatgaatgatggatcatgctgtcttacttgaaggataagacctaggataaatatagtcagttcacaaatgattgctgtagcataaccatatttaatccttgatagagtgattatgaatatctgtctaggaaatataac

SEQ ID NO: 40994 - DNA, 3652 bp, Oryza sativa
ccttgaccggaaaccaaatacaccctactaaaatgcttgagctcgcgatggatcgcttggatggatgcgctccgtgagctttggtagaaatgtcgcgagcggcatgcgcacgtagcatggggatgttgtccagtgatggcgatattattcggggtccccctaccgcggcagcgctggttgcagggcacgtcacaccacccacgcggcgccaatgaggcggcggtcgtggctgccgcgcgcggcgcgcgcgccgcgggatcattcgcgcggccgcggccgcggcctcgcgctgttgcgcactaggcgtctgtctgtcatacgtcgcgcgacccccacgtctctgctgcctttccgctgtggattggttggtgttcgcgctctctccactgctgcgcgcggctggtggcccagagagccggcgcagagagcggccgcgggagtttgcccttgtcaacttgtcgcttgtccgcgagcggtgggggtgaagcgacggcgtctcccgaggccggtgtcctgcacgagtgatgaagcgacaccggcttcgtactggccggtgtgtctcaaccctggtgcgtacggacgcgctgtacgatggttcaccagctcagagacgtgccatgtactgtacgatgtggctcaccggctcagagacgccagagcagagactagtactccagtactagtaggttggtttcgcgtataagacggaacaaaaagcggttagtaccgagtacacagtgttaacgccggctcttcctgctgtgcaactacagtggagggcgcgcgtccgggctccggggtaaccaccacgtactacttgagcagtggaaggcacgcgacggatgtgacaggaggcacggtggatccagcaagagattcgctcgcctgtcagccactgtacctataaatcatttatagtcaatttatacaccaattaattaacaccaattagttataaacatatattactttattaatatttgatcccacatgtcatatacacattgcgtcttagagttcgtgctacagctagctactccctctgtaccataatataagagattttgagtttttacttacactttttgaccactcgtcttattaaaaaaaataaaattatatttatttatttttacttactttattttattatctaaaatactttaagcataacttttattttttatatttgcacaaattttttttaataaaacgagtagtcaaacggtacaaacaaaaactcaaaatctcttatattatgggatggagggagtacaaatctatagtcagcttctcttgtctcttctcttttatcttgtaatgtgcttatagttggcttatagtctgctactacatgctccaatactactagctacaacatccatcccaaataagtttatttataagtttttatgtccaacatttaactatttattttatatgaaaaaaaataaaaataataaggccctgtttgtttcagcttaagattattgtaatctagattattaaatcagattactctaagctggattataataacctgacataaaataagctacgagttgtttgtttctctagataattagaggcatctaagcgtagtgggtctttagccactcaataatctagaaaaggctcctttaagagaagattattggattatagtaatctggctttatagattataataatctagcataataatctacttgtttgttttagcttacttctaataattcatattataataatcctaagctgaataaaatagagcctaaatcgcacatacgttggacacataaaccacgaataaatttattttggatggaggatgtagctgccactgccaagatcaaatactagtacagtggtacgagtactgcaccgggagctgtggcgtctgggctggctagatgatgcagccgagtttgctgacgtgggtgagtttgtggctgacaaaactctcgcgttcgtcaaaaagttgtcataaaaaaggcggttcactctctcagcctcgcagcatcgatggtgtgcggtgcggtggaatctcgccatgcaccgcgtcgcaacacacagtagttgcacaattgaagcctgcctctgcctgcgccagcagagcatacatgtaccgatcgatgtactgtacggccacacccacacgggactacggatggaccgacatacatatacggatcaccagccagcaattgttacctgctaaagcgccaaggactctgctgaacttgcagcatggatcggcagcctcagatgcgtggatctagctggacatgcgcgacggagggagacactggccaagcgattttctagcagatgcacggtagtgaactgtgatcatggagggaccgtcagggtctaatggtacaactgtacaagcgtacaccactacaactagctacaacgactatctgaacctctctctcctaacaggaaggtgcccgctcattaatgtgtgaaaatttttttacgaatgcccatgtgaggatgtctttctagtaaaaatatttcttttactatatcatgaacaaaattaaatttatttaatgtgctttgatcagctgttatgattttttttcaattaccttcgcagcatataaattctaaactaaaatcactttaaatcgcataatttttaatttatgagaaacttgtgtcaaaaaaatagatctttttcctatgaaagtccaatttgtttttgttatattatgtttgaaattttagatatgttcattctattagtcatgctaataaaatgtttgaaaatttctatttagaatgggtttaaaacccaacagttttcattcttttcatcttcattttttaagaaaatggagaattccactctatgaaacatccttgaaatgattttgatctctataattgaagataaaaatataagtgggttaagcctacaacccaacataggataaatatgtccattctaaattatctctctaattaagtaaggaaaaataaaatagaggttgtagtatttttttagcaaattaccactaaactgaagtgtcatgtaacaaatatacatttctatattattcaatgctaaatgtgaggaacttacgatgtaccatagcaagttttaccaaaaagaaataaatggatatggtcttttaattcctatcaggaattgacttatatattgccgaggccacatcatgtctgtttcactgctaagatttattggtgcaacccacgttcttggtatgattggtatgatattcaactggccacatttttatttttaaaatgttgtctataaaaaataatgctagatggggtacatgttatgatgtaaaaaaagaatatcatttcaatatttttatttaatttatcagtgacttcatagatcatatatataatttagatggtataatcatcttaagattatttatttatctcctaaaaagatcatttattgataaaagcatcaatatcaaattgtatgggtaaatagctcctatatacatattgagaaataaattaattaagttgatagaaaatcgttagatgtctaatgggatataagtaataggtcaaccaattgtataaaaaaatcatgtgggatattttgatttttagtgagaaattttagtagtttcttttatttagtggacgc

SEQ ID NO: 40995 - DNA, 675 bp, Oryza sativa
gacttatcttacaataaacacaagaattagcatcagctacacgaaaaaaaatgcaatcccagttattgtactcaaggaaacttggacatctatgaacatatccagttagccacacatagttaacagcctatgatggcatatgctggaactaaatgtagagttttactggttactgaccacaaaccatatgacaaattccgagcataacaagtactacctccgtcccaaaatacttgtcgttttgagtttttgtttgtaatgcttgaccattcatctattcaaaagaatatggaattattatttattttgtttgtgacttgctttgttatcaaaagtactttaaatatatgacttatcctttcctatatttgcactaatgttttaaataagacgaaatggtcaaaagttgcaagcaaaaagtcaaaacgacatctaatttggaacggagggagtacattactacccaaggttggtaaatacaagacctagcaaccaacaacttgaaaatacaattaaaagacaaaacctcccaaaaaaacacttcctcaaacaaagcacaaaaaatgaagattcaatttcacttggtatggtatcagccaatcattttgccacagaactgaacgcggcaagaaattctatatttccccagcactcacccaaagtattcaaggtcac

SEQ ID NO: 40996 - DNA, 741 bp, Oryza sativa
acagtagtccatcatgcctcagctgcatttctggagcaaaggacctgacgactcgatcgatcgagctagcggatctgattggatgataaatcgtgcgagatacagactagtctggtgcaaacgatttatacgatccaacttaccgatttaaagtgatttctgacaaacaaactactacgaattttgtttctcgaatcaagatgcagcatgaacatgggagttcgagagcacgaactcccagtagctaactattgtcaatcagaacatgagcgcactgtagattcaaccttcacttatactgtgaaactgcatgctgggtctatatttgcttcgactctttactattgataaaataggatctacgcagctcatgtgactgactcgactatcaactccttacgacatcaaactatactacaaattaatatcaacttgctgaactctatggcaaaagctggtcatgtgatagagagtcgcaagtcctaagtacctatccatgaaatctaaatatacctctaggatctgtcttttctaatatgtgtcatgagacgaattcataacagtgccggattgctagcatatttatgtatgtgcatgtgtcacatttatcaccactttggttctcgatgaacggtaaaatccaagcaaattatatttttcatatacatttcaatctgattatattacctgttcaccaagcaatttctagattcctaccagcttgactgatcaccatgatga

SEQ ID NO: 40997 - DNA, 614 bp, Oryza sativa
accgcctcgccaacctacaccaccaccctccccttctcaacaaccgcctctcccgaccccgcaaccagttcaagcctctcccacctccccaactaaacagcatgctcccccggctccgccctcagttcaaacctctccacctacaccccaatctgctctggtagaagaagtgcacataccagatggtacagcttcagaaattgttctttgaccctcggttccttacagcctttacgaaccattcttcagcccttcactgattcggagacttcgatgatgatgatgatagaggcccttcacaaactgttcttgggcctttactattagatgatgatgatgatcagctttgacatagagctgatgaagtgatgataaccaactctgacatggagctggtgaactgatgacgtagaccaactccgacgggaagccgggcaagttggagatagattggcatgacctcaacgaattgaaggataggcactgactttgatggagtaaatgggaactagtaatgacacaatgatacctagaggatatgtggctggactgagtggatagactagataggaaaggaaatcgatttgtagagaatattgatatgctagcaaaag

SEQ ID NO: 40998 - DNA, 798 bp, Oryza sativa
aaattaaacaaagcacttgctttggtcacgcttcatggcttcaagccgtgctagtagtgatacaggcatagtgataaacaaaattaattgagcatactaattagcacacacatttgctagttttgacatatgttcagccatatatctctaacaagaattaaaataaaatggcgttcattttctttccgtggtcagagataggaaatagatgtacgcatgcatatattttctccttccatctgttcatgtataaaatgatggataaatcacaactggcccagatttgagatggtcggccataaaattaaccaacactcacttcggttacgcttcacggctttgagccatgctagtagtaatacaagtggagtgaaaattataatctcaaaatcatccgcatacatatatttgcttaaaacagtgtatactcgctgcaccatatataaagtgcagtataaaaaaaaatctgatatacgcatatgcatgcatccatatactctggccgtgcatttgctatcacgtatagtttcttcccaatagcaaattaatccatatatgcatagcaagcgacaacattgcccacttcgattacacttgatggtacagtgccacgctagtagtaatacaggtggggtggaaattaaaataggcaatgcaaattgtcacgccctaaaaaaatcgattaaattaaaaatgcatgttttaaatcattttctagacattatgttaaaagcctacaagctaaaccctaattttctaggaaaattttcaacataaaaatgagctgggctgcaggaa

SEQ ID NO: 40999 - DNA, 715 bp, Oryza sativa
atggaaatcgcgagacgaatttttttagcctaattagtccataattaactataagtgcaacagtaaaccacatgtgctaatgacagattaatcaggcttaataaattcgtctcgcggtttctaggcgagttatgaaattagttttttcattcatgtccgaaaaccccaaccgacatccggtcaaatgtctgatgtgacaccaaaaaattttgtttttatgaactaaatacacccttagtcatgcatgttgagataaaactggtcccaataaaatttgatatcaaattaaagggttctctgaccaggaacacaaacacaaaccaacagccattcctttccatccaatgtgtcaattcaaggtatgcagatgcatcaatcactgcatttctaattacacacatgccacaaacaacaacatgtatcacacaagagtagcagcagtatctatgtctttggcatattgcacatagcatttgttcatgagagcaacagccacaaactgaccacacacatgcacacaaatcaattcagcctgagtaatcttcagtctatctcctcctggacaatgccatctaccaaaaaacaaactcagcagaggccaggagacactgatgatagatcaaagctagtagctgcaaaggccaatacactcgggaacaaaaacccatacaacaacacagatgctgacgtcatgcatgaagccggggctgcagga

SEQ ID NO: 41000 - DNA, 664 bp, Oryza sativa
ctgcactttggcccttgagaaaaggaaaagtgcaagactcaaaacgagctatacaccaactctgctgagatgatagtctgacctgtcatgcattctataaattgtgtagtgggattttcaaaatataactaattgtgtttagtttaaagctagctgtttgaacgaaaagatagttccattacaagttactccaaaataagagaaaccagattaattaggcttgcaacacgagaacaggaattttctgatatactagatgtaaatgaaactttccattcattagttaataacccaagtgtgttatctaacaacttgaaaaatacagttattctcctccctccgccccaaagaaaaaaagacgatcccttctctgaaaaaaaaaactgctcctaaatcctccccaaaacccaacctatatatcgtgaaaaaaccagcacaaaagaaactggaatatattgatatctccgaattcgggcatataactggtaatagaaaaacttctcctcatgtaggcttccctagttccatttatgtgattcttgcacgtgtattccttcatgcatgggtacctgttttgcttcccataaaagatgggcgagttcaaaggagctgctcagctgagcaacttggcagcacgctaaaccgtctatcccttcattcttgg

SEQ ID NO: 41001 - DNA, 507 bp, Oryza sativa
tttcaaacaacacaattaaattgaaatttgatttttttttataatatcacactgatatgtgcatatacgtacactagtgtgagtgcatggtgactcactagaatgctcaatcagtccatctgttgcggctagtagcagtagcagttcatccatcctacactcaatatccaatgatatacatgcatatatggatgcatataatcatatatgagctggtcaatattaagatatattatatccagtgcatacacgaaactgcatgaatatatgcaaggagatatagtagtagctccttctagatcagcatcaaatctcagttggccactggcggcagatggctgttcacacttaacaggaaccaaaccacgtctcatcgatatgcagaaaaatccatgcatacgtgcatccatgcaggtgaccaatactatagcagggcgatggccggattagagcagaatcacccgcaacaagacggcggcggcgtgcaagcaatcgcgcgggaaggag

SEQ ID NO: 41002 - DNA, 2118 bp, Oryza sativa
  unsure (1)..(2118): unsure at all n locations
atatgtttttttacagcaatctatcgtatagcaaactttttaaaaaaacaccattgtattacgccagtattaaataagnngcgtgacgctgcgaaaaacgagagagatgagttgggaaacctagggtaagaacacaaccaaatgatgtactccttccgtctcattttaaacacagttgtaattttctatgtctaatatttagccgtccgtcttatatgaaaaatttgtgaaataattaaaataatgaaatacatataaagtacaattcatattttatcatctaataataaaagaagtattaattataaaataattttaaattagacggaaggttggacatggaaatggcacggaggttcctagctggactaccggggtagcgtgtcacactgccacattgctatgtcacgtcttatcaaaatttagtgaggagcaaacctggttgactacagtccggcctgcttctcatctccttttctcccttctctctttcttttgacagtggccgctgctgtttaggagtagtaatttttttattttaaccgttcatccatccacagttctctcctcctttccttccttcgtaaggttcctctctggctgctctacatattttctttctccatcgccaatttcttcctcgccccatcgtcctcctcgcttgatcgagctgttcgtctaggtgggttctccattcttccttactaaatactccgttcttgttcccttctcaggttggttataatgtcaaatgcaatacttgttttttttttcccttctcaggctgtttatttgatttctaataactgagcttttcgggctgtgtacatccactttgggtgcagaggccggttaatccattatctaaaaaaaagtagcttttcattgcttgagatttttcatttgggtcccgctcgtctacactacaacgccctttcaccatcttttgggttcagtcgtgacaaaactgtgaaaatttgtctttttgcaccgtcgcatttgttttttctctgattagcaccaacccggatgtggaaatttctctgattaaatttagcttccaagcgggaaatatggtgattcacaggcctttttgttgcattgccatggtcctgaactagtgaaaggatgagaaaaaaaaatatccccactgagaagtagtgattttttccgacactgtaggggtttgttgaaagatgggcacgtggtgcgaaagatgtagacggcgcgatgagcaggactacaggaatttggatgattgccagaaacactttttgctgcttatgatgggtgattttcaacatgagattgtaagccaaatactctattatttatgaaaatgcaatgccttcttttcttgtcccttgccttatgtaacttttgtgttactttcctacttgcagacccttttttttggaaaaggattgcagacccagtttggtagtagtaggttatttcaagcttataatcttgatcttccttgcaaatttccatattaatcgatgactagattgtaccctcttaaaaagaataaatattgatgaccagatttaagccaataacataacagcacattaggtttgttggttggcaccagatgtcatcatatctaaaagagcaagaaattgggcttttcaatttcatcagtttgttctgtagtcacatacagaaatcagggcctgccctgagatttttgtcgcacagggtggaactaaaaagaaaggccccattttgaacataaacatgaaaagtactcatatgaatatatcaatggcaaagatcgtattatgtgcatgactgacatacatttaaactagcaccaaaattatgttaacgtcgctgtagcaatgaaagaagagtctcgttacggtactctttactggtagtagaaattaatctaaaccgtgggtctagggcttgttcaaattattgtcaaaatcaacattgccaaatttttggtaagttgataaaattgccaaattttggtaggatggaataaatatgttgtgccaaagtttcctatgcgttaccataatttggtaacaatctaaatatagtaatatatttgtcaattttaccaaataatggtatagtttaaaatgacaccaatctaaacag

SEQ ID NO: 41003 - DNA, 3246 bp, Oryza sativa
ttattttattatatctagagaaaatggagagagaaacatttattaaagataagtttgcccatgggcccactggtcaatctcacatctctagctttctttgttcatgttcttcttcctactgctaccttctctctcatgcgtgtgcacagcagcggcaatggagagcatgtgcagctgctggctagggcagagcatgcggcagctggttggaggaggtaggcctggagcttggccacccgtcagcggcgccatgagagagccgcacagctagggtgtcggtgcgggacatcgggttgcaaaggggaaatatgcgcagcttcaattcgaccaagcagtagtacgacggggtgtctaggaactttgggaagtcgatttccaatgattgcaggatagagcaacgtcggggtcgtgtgcccgtgatgagcttgatggcagcccaatggagtttggactggcaaggcatcttcgtctaattgttaaaattgattgggtgcagtgcctctatgggtagggaaaaatttaggatgtaatagattgccggaaattggcgtgatggtgaatgatggcaacgacatcgtgctcgccatcaacatgtctccaggcctacctactcggcagcttcaggtgcggcgtcgccgtcggcggtgaacctgggtgatgcactgccaccaccgccccaccgtgggctggccgcgcgcgtcgcgcctatgctcggctcagtagcaagcacgaggaagaagggaaaagaaaaggagagagcaggggcattttggtacttacacaactttctctctccattttaactggaaataataaaaaaatgggagtagtgtccaacagctaattactacttttttacagtgtccacgaaaagattcacgatcttcggatgtctcacagcaaaggccgcaatctttcggtgtcctgtagcaaattttgcctaaaatctacttcctccatcagttcatccctaaaacaaaggaaaaaagtacgaattaccctttgaacaattgtggtcgtccgatttaccaccctaaacttcaataccagttatttttaaccctaaactttacaaaccggatgaattaccccccctaaatcgatctaggccggttttggtcctacgtggacgcatacgtggcaatctagtcagccaaaacagataaaaaagatatgggaccctgttgacgtaaaacacgataactccagtgcaggtccaaaactcgccttcgggtgtgctagcgtgccagttgatttgatcctgcaatcaataagaaataaagacaaagaacccgcggttaaatctataaatgatagccgatcggctaagtgccgatgtcatatcatttatctctgagccgatgtcatatgtaaatcgatcggcggttgtaaatagataataaagaactaaatctattcgatcggctttagatattaacaatatataattcttatatcgatatatacttaaatcaagtgattgggatagatcggtcgtcatgccgagacagtataaatcacttagatcgaaatatatattaataacaggactatatatattcacagcttagccgatcagatagatctagcatgtatcggctaatactccgatacgactctatgttaagatgtaaaaacaagcagaatataccaaacaaaagcttaatatatttagatgcaataatatcttgatataaagggcagatttaacgtgtcaatgaagcatatagagcaaatatagttaaatcagataagattggctgaaaccccgatactaccctaatcggcaaccagaaggcaggctagagattgatattctaagcacaacttaatagaccaaactcagctgatgcagcattaagtatgaaaagaagaacaatatctagacaatcaagccgctggaagtttcatagagtggtagatatcttatataatctaaatcaacgtcaaaatctaacctaatcggctgccctcttccaataaatgttagccaattgtaggttagatagcgatatggccagagattatgtaagatatatgataactcgacgaattacataaacaagattagagtatcataaagatggaagcactaatcccgagaacgcaagccgtcataacaagttttacctcctgttgaagatcgaaaccgatgtagctcaacccgaaagcaagaactcgtcgaaataaaactaaagcaaaagggtggcgatgggccaaaattgtattgaacgtgtgtgttaattgattacatggggttcggggtctatttatacccgaaaattacaaactatgtccatgtcggacacgactcttatttctaacaaactctaagatatcataagtctttacggcagacttttgccctaaatatatctctaagaaaattacataaaacatcctaattaaaagatacaattgccttcccaagactctatccatgtgcagcaatcattttgaagcatatcaactcaacccgatgttgtacaccaagtcgtattgtcggaattggctgcatcggcttacccagtctgactcgaacccagccgatcctgatcgtagccgatccggactccagccgattcttgctctgttcttgaatcgatctccgcctttgaatccgcttcgatctaatcctcttttccgatgctgatattatcaaatttggccgttaatagacccacttgtcagcccaacccctcttcttctccccctcctcttcacatcttccccacctctctctctctctctctgtcgagtgcaatggcacaaggatggtgggcggcggcgcgcgggggtgcgccggcggccccggaggcggagctccccgagcggcaggtggctgagtaggagcgggcggccggcggcggagaaggagctccccgggcagtgggcggcagaggcggaagcagagcgggcgggcagcgggcggctgaggcgaaggccgagcaggcgggtggcggcggaggcggagctccccgggcggcgggaggcgggaggctgaggtagaggtggagctccccgtgcggcgggcggcaggcagctgaggctaaggcggagcttcccgggcggcgcggcgggcgaccgtggaggagggcatcggcggtggcgacgcgggagcagacgtgcgtggctagcggcagacggcagcgcgcgggggacggtggctcgtgggggcgagcggtccgcggcgccgcaatggtggggaaggaggatccttccccttcctccctcgtcttcctctct

SEQ ID NO: 41004 - DNA, 1801 bp, Oryza sativa
caaatgcagtcaccaccaacatatagatggacacaggtgcaaagagataacttaagtgagtgcaacaagaccatgatgagttcctcctccgagtcatcggttacaactcagttcttatatgcattgccttataaatctcatctggtgttgtcatgtcatatttcacagctataactggttgatgttttcttttctttgcacacaggatattctttgccctctgaagatcagggttgcagagtaggtgttatacctgatcccatcattgggcgtaggaccaaactaaatccagttcaggagaaggtggtgaacttcaagatccaacatattcattctgaaatcccaatatttgtagctgtcattaaaaggagcaacgtgtctggagtgttatccactctagtgagtgtcatatttcttttctcaaatgtgcatactttcaaatacgcactaatataaactggtgtttacactactgatgtccatactgctcaattacgcactatttaaactaccgataaacattattctcgatgttgttacttctgcggttgcttaagattatttaaactatccactgaatttacatgcgatacacttgctgcggttgcttaagatttatgatgcagtgccagattgttttacttataatttatttgcaataactccatcatctccatttccttttcatgtatgcaactagagtgtcgccaaacggtacgtggatgaataccttggaggcgagagattcatcagtctttcgcgacttgggggcaagtggggcatcaggcttttgctggtgggggtgggagtggcacaaggatggtaggtggatggcaaaagtttgtgaatgagaacgattttggagtgggggatatttgcctgttcgaactgttgaagaatcataagggcacaatggaagttcatatcatcaaggcaaaggatatcttttgatcgaaaagccattctgtttaaatctgctgattttactgaattctgatgaatgttgctggtgcttttgtgttgctgagaatggtagcctatctatccagtttatgcaactaattaatgacccaagtgattactgatacttttggtgcaatgctgttatagtaaacatcagctgttcaggggcgttaagcagactttcctctgttctttatttccttcggttctcagaattatatcacatttattgctctcaaatacaatccagtaaaaaaaaaatatctcgttttgatgcacctcctatcgaattcctagaacttgaaacatcaactgcatatttacgcatgctcatgggatgtatatttacagtaacagtgtgtgtgttcgcttacaatttcttgttacaaaaatgattggagagatgtctccctttaaatctcattctcaacacgctcgtaatctcttcttcaaaaaaaatatcatttccaacatgctcacaatttcttctttaaaaaatcgttcccaacacattcacaattttttaatactttctttgtttcaacatattataagtcgctttgattcttctataattaaacttatttaagttggaccaaatttatagaaaaatacaaaacaaacgtatcatcaaattatataaattgagatgtttctaaatttgtctataaatttaatcaaacttaataaagttattttttctataaatttaatcaaatttaatacagtttaattagaaaaagtcaaaacgacttataatataaaacgtgtggtggtattagatttacgtaccgaatttgaggattataccaaaagttcattttacaatgctacgctt

SEQ ID NO: 41005 - DNA, 633 bp, Oryza sativa
aaagaaacatgctcatagacaactacagaacattatttactacaggcagattagttgcttacttgttatcttttatatgggatgtaatgcgctccaaaatgatctgcatatggcctaccatcttttgctaccactgaccattgcacgcagcctaccagttatatcttttgctatgcataggcatatcatgtaatattactgatcatgatggctatctgctatatttctcagttcttctcgcactgatgaccaagctgctgataagcaacatgctgtgcctcatgaggttgatgtttctcagattgcagctgcctctgctgaaccaaatactcaggttaagcataaatacaccactttccagctaattcagtggtcgaatttttttagtgacactggcaacctaattattcccgttctataggtcaaagatatcctgccaactgaagccaaaaagaaaaggtataaaactacatattccagctgagaacgaataagaaaatccctatttttgtactagcggtggaagcatgtcacattcattgttaaatagactgcaccatttcgctttcgctgctctctcatttttggttcttctagattaaccaggtgttcctctctgctttagtgttgatc

SEQ ID NO: 41006 - DNA, 691 bp, Oryza sativa
tagtgacaaaagagagctgagaactaactgaatagtggcaaaagaaagagttccaaattcttgatggtctttttgttggatatttgcttgcaaattctatatgttttttttctgagaaatataaaatttcaagttaagaattatacatttagagatctattgaaacgtatgggtattttgctagtaaataccttttggtttcaatgggctacactcgcatgccacacacatccataaagaacatcgatctggttaaagagatttgctaaacacgacagggatttgtgatatctgatgttgactgccattacatgcaggtgtgcgttgggccatttaatttggaagactcagaaaacagcatggtttttaaattatgtgatttatagtcctgtaaaaatcttgtttatatgtacgttacgtgttgcttaatattggatttctttggtattaatttgtcattcatctacagaaattggagaggcggcgaagttaaaggcggctgctagaattagacgagtgttagtagtggagggatcaagtgaatcagattcatgccacgtactgtgcatccatccagagaaaattgctacaagattaatctgctatgcccctaaattttgtgtcatccgttacatgcaccaggacttttttcttattggtagttgattgttatttttctttaaataactac

SEQ ID NO: 41007 - DNA, 1555 bp, Oryza sativa
cggcgcggggctcggcgcggctcggcacggtgctcggcgcgacgatgacggcgacgcgacgggcgagcggcgcggcagtagcgcggggcgcgaggcggcgacgcgatgggcgagcggcgcgcggggcgagcgacgcgacggcgggacggggcttgaggcgacggtggctcgcgcggcgcggcagcgggatggcgatggcgacggcgcggcaggggcggcgcgcggctcggagcgacgatgggacgcgacggtgacggcgcgcggcggcacggggtgcgagacgaagggcgcgcggagcgaggccgcgcggcgcagtagcggcgcggcagcggcggtggcgacggcgcgacgggacggcgacggcgcggcggcggcggcgcggggctcggggcattgccgggcgcgcgacagaggagggtctagggctaggggaccacgtcgagcacttagagtgcaatgaacagtgtctttttcctatttctctcattttagtctatttcttatataaatttggttccacgattcctaatttttgcacacatgcattttactcaatatttgtgtgttatctcatctaatgaattcaccctagattaatattactcatattttatttatataatttatttgaatttttaattagggttaattcttattccatcgcattttaaatttaattgatccaaacatggtcgcgataatattttatttatttctatccacacctaatctttattttaatttatatttattttaccagtttgtttttaagttttattcctaattatctatctttactcacgattaatgaacttcgaaatcaaatccaaataaaataggcgaataagaccagcatggtgcaattaatttaaaagctttttggaaatccgtatttttagagttttgattttctcggtcgaattttcaggatgttacatcatagatcaacattagtttttcgcagcttgtcagcagcgtcaaatgattcagggtatcttctccctgattacagttactgagcacagtacaacatactccctccatctactttttatagttatatttcatctaggcacacagaccaattataagtaattctacttatcatctatttaaacatgctactagttattcctcataaacaagcgattcattgatatttacatttctcgatgcccatgtagccaatcttgtgtggaagaatggagagtcacgcattaaattcgagaaagtcattaagatgataggtcgttggattgaaatatgcctatcaaaaataaaattttcagatttgaaaatatgtctatcaaaagtagatggagagagtacattattaattcttccacctccggaatgcaatttcctaattatacacttgtgtaaaaaaatcaaacaaaaatattatgacgaagagagatatgttataacactggtggagaaaccatctttgatcggtcgaccagatttcacaatagtcccggttatattaaaaaccaggactaaaaatatctttagtcccggttttaaagctcttggggtactttccaatctttag

SEQ ID NO: 41008 - DNA, 877 bp, Oryza sativa
actggaaataatttgtttagctcctggtttagaatggtatattcctggtttggagatacaactgtgcagccgggatggttgttcagaatggttgggcctatgcaacagagtatgttgtatagcgttggattaatattgtttaattattacttaactgttttcttaaattcttaaatgtttgctaaatgctgcttttgcaaatgaaaccctactatgccatcctttggtatccttgtgcacttgcatatttgctgcgtggcttgctgagtatgtcatatagtcaccttgcaatcattcatcagaggaagagttctacaatgatgctgatggtgtggaggattaggtatatgtcacgaccagaaataacccaacgggcgttcctgacgtgcgtgcattaatccttgtcccaggaggcaaggtacaccaaaagttgatacaattcagagtttaacgagcggaagcgtaaataaaattattacatgggcgacgaaggcccagcacacacaaagacaaacgagaaacagcggaagactagggcgacgaccaccggcgcttgacggcaggcacgagctagacaccgaagccttcatcttcaaggaactcctcttctggacttggaaaaaaattgagcaagactgagtacaaccaccgtactcaacaagacacacccacaaatgcagaataaatgcaagggagtacaagggagttataatataaaggggtagggtgcagtaatcagcatttaaagacatttagttgctcaaagctcttttgtaaacgcgatcctagaactatacaatgttattaataaggccgtgaacccacacgaacctgccttaacccaaggcctacgatgattcaaacccaactggcaacc

SEQ ID NO: 41009 - DNA, 720 bp, Oryza sativa
cccaaataaaaataatatgtggattcaaactaaagatctctcatctcaactcttatgcccgttaccatcccacctactacactcatctggtaaccagatagagatgatttcttttttaactaaccctagagacatttttagtatcggttggtaacaacaatcggtattaaaaacatctttaagtccggattggtgttaccaaccggtactaaacatgcattgttaagtactggttggtgtttatagggactttgacttttagaaccagtattaaaacatctttattaccggtttttaatctaagcgagatatttatgttttgggactaggatcgtttctctagtagtagcacacgctgcagtagcacagatatcattaaagtataaagagcccacttgcatgttggcttgggaatttttattggaggaagtaattaaacggaataaagtctgtaatcacccataatcaactcgaattattggatgaattattagatgcgaagagagaaaaaagacagatacatacatactcgaaatatgacgtactggtccaaattataattgcacatataactcaatataatggaaactatgtggtcattgaaaattactgttggttatttgtgtgtgaattgacatcgcgaaaacattggttgacgctcaatttgttttagtttcatgggttatccatgaaccatttttccatatttcttttcgaaat

SEQ ID NO: 41010 - DNA, 669 bp, Oryza sativa
tttaaatacatttccacaaaaatgaaactttctacaacgatatctatatagtcccttccccggcgcccgcctccgcccctggagagcacggagacattggtgtaacttcgtgtgatgctatgcctgttttttttttattctcgatgcgaaactatgtcttctctctcttttcgccgatccgaaaatattaaaataataaagacggtgtccagtgacaaattatgacatttacagagtgtcttcttctaaagtttaacttggtgtcttacatgtaaaactgtaaagtgacaatatcatatagcaaatttaccaattaactgcgcatataaaattaattattttatatccactgattatactgaccagccaattacatattgatctctattacacgcatggagacgaaggagagctagcatgacccttattgcatatatatctcgcatgcattcaggttacatacgtttagacgtactactacgatatagcttgatcagtatacagctttattctcggcacacacatatatagtatactcccatgcactaatagtacgtaggtacatgcaagggtatatacaatttaatccattttatcaacgacagttgctgtgctttgctttgagcttcttatatatggtttccagttctgcatactctttgtgcttag

SEQ ID NO: 41011 - DNA, 779 bp, Oryza sativa
aaattttgagatttttcagacaaaagttttcatatttgagttgaaattttctaaatttgtgaaggaatttctagattttgaattaaaagtcttcttttgaattcgagacaaaagttttaggattcttgtggtcatgtgatactggggaatgggaagctctcgcttaggtggagacatgcgcactgcaatgggctctcgttcacctgcaacgctcttgcaccaaagctctaaactctaatcggggtgcgcaacttaccgttgtcgcacgtattcgctagctagcatctgttgttagtacgttaaccatatttttaataccttttcatttgtatcttatcttacatcgttagattacaagtgatcacaatggctctcctacattcaatcaccctacaaagtctcagtcagtctctctctctctctctctctctctatatatatatatatatatatatatatatatatatatatatatatatatatatatatatatatgataacttttctctaaatattttagtgcgtatctattttataacgttatatattgttcgagaagtagaggagaatccacccaaaaaagcaacacactaccatgagagcataagactgttcttttgggaagttgggaacttattctctatgcatggaaaacgtagcggtgaattaacacatgattaattaagtattagctaaaataactcgaaaatgaattgtttaatatgatatgattctttaaagctactttcctatagaaatttacaataaaacataacatt

SEQ ID NO: 41012 - DNA, 666 bp, Oryza sativa
aaattaatgtataaatcaaatgcagcataattgcatgggatttggcaaaaccaattttcgatactcaatacagacgcatgcatatgctcatgtacacgcaacgcaactcctcactaacggtatttgaggtggatgcatgcatcgatcatacaaaatttgttgtttaattttgaacatgagcatcttagaaaactacatgttgagacgaatccatccacacatcagtaaattaattacaatggagaacataatgcatatattacttaattagtagtcctgccactcttcatgcgatgtctatttaagcgatgttcagggtctctgataggccataacaaatgaactagaaagctaaggtagaaggagagtattctgaaggaaccaagtgagtgcaactgatcaacttgctaccgatcgatctcacaacaacatggttattataattacttcctttcttcttcctgatcttgtcctcctcatctctagctcatatttacttacagtacgtttacagtcatatactatacccagaaaaataataggtagaattaattgatgaatttttctgattgcacacaattaatttaatttgcatccatccgatccatccatgttcaattaatgtggcagagaggacaagcaacagaggtgctagagaaaggcaac

SEQ ID NO: 41013 - DNA, 705 bp, Oryza sativa
aatataaatatggtatacaattatttcatggatcaaacaataaaaactaaacacatcagagaagaggtgaatggcagcaacaccaaaaaccaaaagtttttgcggaattaaaagttaccttccaatcgttggagatcggtctaactggctagccctggtctgaccatgcccttgcagccggtctgagcagtattgatcggccagtctgaccgcctatcgaaccgcctgcgcctgtcgctgccgcaggtctaactgccctatacccatcggtctgaccattggtaagccatcggtctggttgccgtatacttgccggtgtgattctcgaaaccgagcaaacacaaattaaataactcgtggaaatagattaacctttactgattatattagcgtttacaaagtgcgaactacaacacttctttcaaaaatttcaacctttactgattatattagcgtttacaaagtgcgaactacaacacttctttcaaaaatttcaactaaactcgaaaccctaactttttctctcagctcaactcgtacaaatcgataccaggagggcttagcccccctctctacttacactcgaggtagatagcctaaagccacgaatccaacttgtgcaagaagtcctaatccactaggaaacattcccgtataagaaacaaacttatctctttccaacttaaactctaatcttctcaaatt

SEQ ID NO: 41014 - DNA, 612 bp, Oryza sativa
ccgtttataaaaaaaaatcacatcaagtatacttttaattttatttttttagtatatattttgtagttctagaaatttattgcacactatactcactttactaaactatgtccatgttagtttttcttatcaaggcatttatcattaatttatatcaagtctatatatagtaccgtctttttttaagaaaaaatacaaagatttttttcttaacttcatacccacattttaaaaatctttcatccaccaccgtattacactagtgatctaaactagttgacatctctttatcacgttacacataagagtatcatctaggtattatgtaagaaatatatatagcttagaatcaataaacaaccaagacatcaacatgcacacaggatcaaaggccaaacataaataaaacatttgatttcatacaacaacaatgctgaccacttacatcaatattgatgcatgcatggagatgaaggtgagctaccatgcatgacatagacgtatggcacacatttttgctgctagctagcggccggggtcatatccagcttattacaaatatgtatagttatactcacatacatcactcatatctgtaggtataaaacaggg

SEQ ID NO: 41015 - DNA, 1630 bp, Oryza sativa
agaaccatccagtggcgacccatcacaggtaactagtcacctgtgacgggccaaaaatggaacccgtcaaaggtgaggtaaagtcacctctgacgggcaagaaatatatggcccgtctgttgttatttcttagcgacattactagaaatataattcccagcaatggcgcagaaatacttctggtatattacggttacagagttcatccgcaagcgcacgtatataccattgtagcattttacccgacagtattccaagggtattgtatttattttatcccgtgggaagatcatgtagagagaacttttctaataatttatatgttacttgtaataatcatatactaggtaggggttaagataatccatgggtagaattacacacaagcagtagctacttattctcatattaaattatctaagctaagtggaaagaaaaagagaaagataatctattcctatacttctagtatacatacattctagttatccgatatactagctaataccctctatccgatgcccctccgatgccctcctggtacttcgagaagccaccccttactgccgagttccttacgacagtccgtcatgaccatacaaccggggctaaatacggaggagtaccctccccagggaattaacttaggattatatacacgagcgaaggaatacccatactgagctgtcaccatcagcggtccacctctgatccgcagcatataaccccaaataatgatatctcataatctagacaccacgtctaaacttctagatactactataatattatcatcatgacatagagtaattgcataagcaaacattatacccgtgccaaagcatctccagataagctagcagcatatttagtataacaagaatataatgtaaagtaggcattcatatactcggaaagtatttcaataccataaatttatatagaagagtattctaaataaagtacaaagcttacaaaaaaaggaaaggaaagctactagagccatacccgaactcttccgaagactttcgaactcctgatttctactctattcctattccactagcttgatactactagactaaacttgagagaatatgagagagctcttgcttgaggtgtgtgagtgaagtgagaaggtgaggggtttatatagcctcccaatgacgattgtgacggttggaatggtcgaaaataccctccaaccatcattgggggctaatctgcacggtctagcctcaaccctgcatccaacggcgctaggggggttcagccgaacctcctggttcggccgaaccaggggccggcccaaccagcccaggttttggctggtggcctcctctgttgatcctcttcgtagacttgtgaattttggtccaattcatcgtttcaattctgagttcttggcccattcatgtataagtctgattatcgacatcgtccgattgatttatcatctgtgttgatgtcgattctcctccactttattgctattctctgcaaaaggttagtatacctaatactagtggaatattattattctaacatatatatgcattgcaagcattactatttctcctctattttggtaatattgacggtcgaaattgatcgataacgaccgtcaaca

SEQ ID NO: 41016 - DNA, 1263 bp, Oryza sativa
tatagtttataaactagataagagatatgtcaattttgtgaacaatgttactatcactttgtcgtatgaagaaatgaccacaataaaagttttagatcttgatgagttattcaactttgttgttgatgactttttcagttgatatcatttagtatttgaaaatgttgtttgaagttgtcatattttcaaattcaaattcaaacggttcaaaaaatgttatatagaaaaatgaccaaaataaaagttatagattttgatgagttatacaactttgttgttgatgactttttcagttgaagtcgttcactgatctaaaattctttttgaacttttcaaactttgaatttcaaatttcaaattgtttaaatagagtcagatggagaaatgaccaaataaaaattttgcacctcgatgagttctacaactttggttttggtgacttttccatttgaaatcatttaataaccccaatttaacatcctggcctagggcataataggattaatagaatactcgtatcttccggaagccaatctctaaagaactttgacattaagtgtgcttggtctggagtaattttgggatgggtgaccgaccgggaagtttgaacttccgcgtgggtgcacaagaccgacgccgagcgcaaagacccagacgacctatctttcgaatgcccctctctgatgaccgctctcactcgggcctcagctaatgcccgtcacagatgactcatctgtgacgggttatagttgtggcccgattgagataggtcatctgtgaggggctatagtttgattggtcgtctgggtcaaagctatcggtgacgggctttacttagggcccgattgagatagaatcatctgtgacgaccgtttgcccgattgagatagctcatcacatcagtgacttctagcctgtgatggacgccatgcccgattgagatggggcttaccgcccgattgagatgagggtatccattctagtggattaaaggtgccgttttttgacatattaaaggtttcggttttttaataaaaaccagcacctatagaataagtgttggtttttatttagaaccggcacctataattgtttaaagatgtcgttttttttgcaatttcaacccacatgtgcgaaaaggcctatatgtgtcagatttagcacttctggcacctatagtgtcgagaccaatttgatgttttgtagtaatgtgagtaagaagctattgatggttaaagttttacagtttcactaaatctgatc

SEQ ID NO: 41017 - DNA, 1600 bp, Oryza sativa
tagtgcatgtctcataatctattatacgtatatttgtcatttctatagatagatcactctacataaatatatcaagtctgattgatctcggttaattcattatatttggtgatcaattattatttgatatatttatctagattaacctgtttatataagtttttattggagtaatagccagtacattatctattctacctctaaatattggattatcagctatttcctaatactgtcaaaaggtgattgttaaaaacaaaagaggtattgtagtcgatagtacatatttagggttttgtttcacttgctcatcataaagccacatcccatttggtttaactgcatcggctaggtcctgacgatacgttatcagttctatcggccgatcggctatcgttcatctaattacgttttgttgcaggatcaaaccagctcgtatgctcttgacactcgaggcaagcctttgaccagcactggagtgaagcaaaatctcccagggcaccatgtttcgcatcaacacttacgtcagagtttttttttttatattaattgatctctaagcctaataaaatgtaaaaaaaaagacctatgggggtaaggccacctatttataagggctatggccaattttaatatatcatagccccgaccttgacacctacacaatcgaatcattttatacctttaccttttcaccatattttctaatttaccttagttccatccaacttggaacatttccatcgtaaaccacccgtctttgttgtgagagtgtgatatccttcgtagctttgtcccgtaaaccttcgattcacccacgagatgggtcattatttccgtattgatctaaatcagcttttagactggtttaatctctaaattggctctcctagccaattttgatcttttgtgaactcatctgggttgagaggttttcaagttggaacgttcggtgactcaattaaaactataaatctttagccgagtctatgttggtaaaaaaacgtcaatgcaaatcaaccatagagactagttccattgtttcacattataggacgtcttgggtttttaatagatttatgtatagatccatatatgtgcttcatatttatatctatattcatatgaatattagtgaatctagaaaagggatgagaaaggctaaaacgtcttaataatatggaatggaattctgattaccgtgtctattgatattgctcatccattccataacagagttggttagaaagacaggctgatagagttctctgagtctcaaacggcatgtcctatacagagtagttttttctttaaaagtaaactactgctagcttctgccaacagttaacaagtgtttctctagctagttaaatttctgttgctacgatgaaccgacaacagtatactccactgtcactttcagagttggacaaagtcattaataaagttggtagaattaaatgggagagtattgtgattggagaaaaagtggggataggtaggaaaattaaatggtacatgattatgtttggttgggaagagaacgttggtgaagaacttgttttattttaggaaaaaatttgaaggctagaagttatta

SEQ ID NO: 41018 - DNA, 5998 bp, Oryza sativa
gccgacgcatccaggcaagggtgggcgtgatggagtttggatggaccctgcgacggcctatgcggcttccggattcacctaggcacgagaggggactgcccgctgccttgcgaggagtgggggtgaaacctgaggtgtggtgtgcttggttagagggggttatgcgaagggtcctgtcacggcctctttccggtatgtagtggtgacatgtcggcgcacggaaacgtgtcgtggggctgtgtcttgtgggtacagttgtacacctctgatcagagtaaaactattcgaatagccgtgcccgcggttatggctggtcaaccaaattcgccgtgattagtctcaccctagtgtaatcttttgaatttggatagtttaggtgcatggttgggcctgtcgcaacgtgggatagcgttggacagtggatagttaatattaatcaattgttacaactgtttaaatctttccacttctgtttttaaatgctcgctttatgcaaacgaaccactttagctcttctttgataattccctgcatcatgcctctattccggtatgacttgctgagtacagtgggtagtactcagtcttgctctattttttcccaaccccagagcacgagtatgtgtcagatgaaggtttctccgaggagtaggcttcgtccgtgccgtcgaggatgcctgtggagtggtgttcccgctgcagatctagtcaaggcttagctcctgttgtctttcgtttttccgctgcatttatgtaagacttttaagatgtttgtaagacgtggacctgaatgtctaacattgtcgtttgtgtaccccggccagtcctggacgggaaatttaatgcacattctgcttggaattctattcgggaatttctgggcgtgacagatgtccatcagtaaattatataaattttgagtaacttgtagtaaaaatttgcctataatttaacggatattagaaggatagcatattaaatactgcatgtaatatttttttgcaaaaacctctccatatattggatcggcagtttagtgaaattagaatttaatacatattagaagtcacctgtaatatttttgtatgatgaaatagcacttgtaaatttcaatttataccagtgacagatatgtgttttttcgtgggggtggggggggggtaatggtgtggcattctaccaaaagaaatataatagttctagttagatagtttttactatcttctttccaaaatatagcaatttaggagcggataagatatatttatcatagaactaggatatatgagtaaattacattcacggtgcatcaacttggcatgtgggtgcaatttaatgcaagaacttgagaaatgagctttatagtgtaaacacttggcatgtgggttcaatttagtatatgaactttataagtgaacatgcaattgcaacaactagcaaggtgggtgcgattttggtacaataagttaagaagtgttgtggtaacttatttatctcaaatattttctgttatacatattcaagaagcccaaacctggtgatgtaaattggatgtgcaatgtaattcttaaagattaaactcaattttataaggtaatatccgtaagattgctatgtcatgacatattgacatcttgaaaaaaaaactcaactagtacatgcttagccaagttgatgtaccaaaacacttaattgtcaaattcctgtattcagccacctaattgtcaagttgttgcactcggacgttcaattcgtaagttcctgcactatatcgcacctacgcgctaaattgttataccgtaggtgcaatttattctttttgaaacaagttagtaattaacttcctgagaggagcttattactgcggatagagagctaccaaattaactttgttccgttcaacgtatgtgtccccagtgaggagcaacagcgaaaaagaggaatggaataaaaaatacgtggacagtactacggaggcaattgatgaaagctatcaacaagagagggcattcaatttttaggcagagtgtacgacagtccattcatcttcatgtaccggctttgaagatgtgccagcttcgaagaagccgtgcatgctagcctggtcaaggaggcaaggatagtactgcctaacaattaacaaaggatggttaggctgtgttctagctctctcatttcttacacgtatgttttctaaactattcaaccttttagaaaaaaatatataaaagttactgtaaaatatcacattaatctatttttataaatttttaagtactccctccgtttcatattataagtcattgaacttttttcttagtacaggttctataggtttgatcaaatttatagaaaaaatagcaacatctattacacaacaattagttttattaaatataatattgaataaattttataatatgtttgttttgtattaaaatgttagtatgtttttctataaacattgtaaaagttaaagaagtttgaacaatagaaaattcaaacgacttataatatgaaacggatagagtaattaatcatatattaattcatcgctccattttacatgcggaggggaggtattcctaacacctcccaatgaactcagcctactgcagtggcttcgagtattggggttgcctttttttttcttcataatggaatttattccgattttgctttaaaaaaagctgtagctaatcactccctctatcccaatttgatcattacctaagacttttgaggttttctctaacaaagtgtatttttgtttatttgtgtaaagagtaaatagcatcgtgaaatgccacagcatatatggttgcaaccaataatcaatttttgtaaatgaattattgttggatacgaatcgacagaacaccttgatcattgacaattaatttcagaataatggatatgtaacatcccgattttcgcttcttttaaaacctaatttaaatacaaacctattttcaaaatttggctcttattcatatttttatttgtggcattaaagatctcatatctcttattccaagtccacatacaaactcctagaacaattaaagtccacaatccatttacaattccaaccaataccctattcagttgggcttccctttcaatccctcggcccaacttttcctctctacggccatgacaatgccctattcatccttcacacgccacggcaatgccggtgctccaagtccaccgcctcgcgtcctcgcgctccatctcccacagccgagcgttcacgctaaaagtgtgagccgagctcaccggcgccgcgtcgccgtcctcgcgcccctgtcgccgccttctccttccttctcctttcgccaaaaccatggccacaagagtcgccatgcccgccatccccacctttcactcctctaatcgctaccacccttgctcccctcccgagcgactcattgccatcagctccaccaacgatgagggcgccgccgtgttcggccatgccggcccgcgcgggcgccgcctccgcttagccggactgccgccgtcgccgccgtcttcatcttcctccaggccaccgacgcgccgcgtcgagagccgcctctctttcctcgcgcgctgaccgtcggcccacgcctacccctccctccgaatcctccgctgagtggcgcttgcttgaaggagaaaggggaattgagtgagaggagaaatcgagagagaagaaaagagatggacaggaggacgtatgggacccatgtttgaacagaaatcaccatgttgaaccctctaattgtctctgacaagtgggccccactgtacctaataattaaataaacctcttcttaacccatgagttgtttacctgtgggccccacactatccattcgtccgcgcacacggtccatgcgcacacggtcactgcccatcgggccccacactcgcaagctatggaccatgggccgggtctgccacctcgctacatccgcgcgctcggtagacccagtctactgtgcgccgacccctctcggccgctgacagcgggctccgcaaggaatattccgagcaattaaagaaactcattttccgagcttcaaaaatccatatcttgcaaaccgtaactccgactgactccttatgcattaacctatatattcaactaatgatagttacaagggatattactaaaatcgaaaccaagaacatataattttttttaccgatttgtattaaacaatatatagcagttccattactgtttaatgcgtaacttgcaaaccgtctaacggaatctggaaaataatacaacttagatcatctagacaaaattatctacaacttttatgttgggcaaaaaatcgggttatgcttctgtaggtctcagattaaggaaaaacaaattgctgtctctatttttggtcccggcagcagcactgttttcgttgtttctcctaaaccgttcatcagaatcgagcgaaaccagcgcctttataaagatatcgacgatgactacaaacttactttatttaggacaactaacctgaatcctgatgatttaataccagatttgaaaatactattgtcagcccataatcagcgactaagaaaacactcaaccggcgatttaagcgattcccacgtgaaaattgtatttgtatggactaagggtagttacccttgtagagcagaaaaatcaaatttgagatcaatttatgaaaacacagaaaatccccaacttttgcctctcttccctttttccttcttttctcctcctgttttccctgcttcctgaaactcctcctcctctctgttcgttctagaagcacagcagcagactagcatcagcagcagtagcgaggaacgttaactgaaacagccgcaacatggaaacatatcagatcgatggcagcagcagtagcaaggattggcggcagcactcaccaagaaggagctgagcaggagtggcgttggacggcgatggctgaacttgcggcgacggcagcagcgattggggtgatggcggctagggcttgtagcagctgcagggttatggatctcttccccttttcttttttttctttttttttcagttggttaaatagatatcctgatgaagatcgaacggcccacattgatttaatccccgggagtttgtccggactccgattactataaacttatagtctattttgcactactcgacgagctctacgtatccactattcctgatcacctattccaacaaccgtcaaaaagttaaatttttgcgcatttgttctaatatttcccaaatacgctaattcgaaactcgtgatattacagttgccacaatattttctcataaattaaagaccacacggtttaaataattttagtttatagtttatatgttgaagggtaattagatgaaaatcaaaaccaacattcaaagcaatcccacacaaattattgacaaagacaagttcagaactgagtagaagaatatttcaagaaagagtggcgcgcctcctcatagctatatattggcagtagaagcaccggaggcatcatggtctgatgaggctaaagcagagttggtgatgaagttatggtcaggcaacggtgcattacactctaggacatccattgctttctgcatggtcggccgatgctgagtctcaaaggcagagcaccagagccccaagatgatgagacgctccatctccctcctttcaaagtcagcaccaatctctagccttgtgtctgcagcctcgacgacatcacctttgtttcggtacaggccgcaggtctcctccctgcgcttgcctctgcacgcgatctccagcagaacaatgccaaagctgtacacatttgaggggcagttgaacctgaccttgccacctttcttgcactgtggatctatgtacccttccgtgcctacagcagttgtctgtacatctacatgctcttctgcgctgcctactacagttgtttgcaacactgcgttgttgtccgggttcgcaatccttgacaaaccaaaatca

SEQ ID NO: 41019 - DNA, 507 bp, Oryza sativa
taatattcatatgaatatagatataaatatgaagcacatatatggatctatacataaatctattaaaaacccaagacgtcctataatgtgaaacaatggaactagtctctatggttgatttgcattgacgtttttttaccaacatagactcggctaaagatttatagttttaattgagtcaccgaacgttccaacttgaaaacctctcaacccagatgagttcacaaaagatcaaaattggctaggagagccaatttagagattaaaccagtctaaaagctgatttagatcaatacggaaataatgacccatctcgtgggtgaatcgaaaggtttacgggacaaagctacgaaggatatcacactctcacaacaaagacgggtggtttacgatggaaatgttccaagttggatggaactaaggtaaattagaaaatatggtgaaaaggtaaaggtataaaatgattcgattgtgtaggtgtcaaggtcggggctatgatatattaaa

SEQ ID NO: 41020 - DNA, 903 bp, Oryza sativa
tgcacccctgagaaatagagatttgtggagctgcaggtgttcaaaagtatatttgttttttttacttagctcaaatggcatgaagtcattaggcgatagtgtgaattaagaaaatgttgtgctaaattcgtggagattttttttccccaaaatggatcatcgttttatgttgagctagacgatctttgctctgaaattagagtgttgcaaatgactttgccagagatggccatatgtctgctaacgagatttctgaatttgttagagatgtactgctatccaaatgtatactgcctattaaatacttcctccatcccattttgatcatcctctaaaatttttgaggtcttccgaagttgcatgtttgtttatttatgtgcgcatgactaaatgctagttgtatgtccattcgtttatcacggaaaaatatatagtgcaaaccacatatagagtggaaagctagaaactaccgttagatcgaaaaatagacgtctgagattcatccacatcaccactagtaaaattttaacccaatacaatttttactgtgaataaaactacgagtaaaatttttacacgtgctatgacgtggatgaatctcagatgtccattttgcgatctaatattagtttccaggtttccactgcatatgtagtttccactatatatttctccgtttatctgtgcaggagtaaatggtatcgttgcatgcctactttgatcgatgaggtttaatttaagaaggaatgatgttgatgtggcatctgttgaaatctaaaaatgtaagaataaatcacttctggtaactgacgtagccatgagcccatggatggtttgtttggtttgcttttgcaggtgatacaagatatggttttggcactcctttatcgtgtttgggctgat

SEQ ID NO: 41021 - DNA, 636 bp, Oryza sativa
taatcgcatgtttttggtaaaaaaaattcaaatgtaaatatactatataaactatattccctccatttcattccaaaatataaggcacagccactcttaacctaaggaacaagaaaaaaatattttttgactaaaggtaattttgattacccggctttttggagaatgtcaaagagaaataacaggagtcttttacaaaagcaagaaaacaacagagaaaaacaagacaaaagactgggggaatcatcagttttaccctaaagcactaccacatcacattctcaagtccaacaccctctagaaaagcagcaaaattaaactccctcccacatacatttcagatgagtactggatcaaagactcgctgagataaagctaattaatccagatctacctgcaggagatccacgggtcgcaattgctccatcatctgcatcagcttctccaagagtttatccagagcctcacattcttttcttcctaggagtagcttccagcattgcattagcgccccgcctgtctatgacctgtgcaaaggattctttataaacttattttcaaaagccgaatgattcctattcacccacaaaccccaacatagaccagcaatcagaaacattcccaccctcactccca

SEQ ID NO: 41022 - DNA, 1229 bp, Oryza sativa
ctaagaaaatattccattccatttccatattaccaccaaaataaattctccatgcttttaggtgctttcttctcctaaaaagaaaattccttttaaaaaaagaaggggggaaaggcatggttatgcttgatggagcatagcattctcctaaagttatgctccatcaagcatgagcatgacattgaagaaaaaaattgtagccatgcactctcctaatcaataaaagaaggagttttgggataagaatgtaagcacaaaggagaagcattttctttattttccttcataaatcatttccaccatttgtcacacacacattgcacgatcttgattttcagtatgtttatttatctgctttagtctaagcttttgacttagtaataaatgtgaatgcaagtatgacatgtttgatccctaccgagctccacatatcaaaaccttagagtaggaatcaaagaggcaaatttggtgaggaattcatattgatacacttggagagactgagtagatcatttgaggaacttggctttcttttgcaaaatcatttgaaaactttcggaatgagagttgaataaagattgggtgattggtgctctaattgttgttctgtctttcaacttctcaaggcaaggagaagcagtgtctcgtggaaatcatgggtaaggataagctaccgtgccaaagattatttaatctgagagatagtacatataccttgcacctgtatctttgtgatatacagcatagtagcaagtcctgatgaacaaccaagtttttgtttccttttgtccttcactcaggatgagcaaaggttcaaacttggggggttttgttgacggtcgttatcgatcaatttcgaccgtcaatattaccaaaatagaggagaaatagtaatgcttgcaatgcatatatatgttagaataataatattccactagtattaggtatactaaccttttgcagagaatagcaataaagtggaggagaatcgacatcaacacagatgataaatcaatcggacgatgtcgataatcagacttatacatgaatgggccaagaactcagaattgaaacgatgaattggaccaaaattcacaagtctacgaagaggatcaacagaggaggccaccagccaaaacctgggctggttgggccggcccctggttcggccgaaccaggaggttcggctgaacccccctagcgccgttggatgcagggttgaggctaga

SEQ ID NO: 41023 - DNA, 2386 bp, Oryza sativa
ggcctaaagccaaaagagacttttaaaaacctttttcaattaaaattattcatgaaatgcaattccatttattaaaaatacttccttagctcaaataaatcccagaaaaatctaggaattatagaattaagcaaagtatttaatgaaattttatctggccccattttatattggaatttattaattaaaattaaatcttctcttctaggctttttaaaataaattctaataattcaaattaaacaacaatttatatatttagaatttttagggtgtgacaatcatctattcgagcgacattttaacatatattgaatgttcacgcctagctagccttccatatccacgtggtttggtggtcacttcttctgcacgatcaagcatacacacacaagaaacaattacaaataagcctacaagaaaaatactggagaaataaacggtaaaaataattaaatggtgaggattggagccagaagggaagaaaaagatagactagatgttttatggattcggatagcaaaagataactatacatgagggtttaattgcggcgtatgcaaggacaggcatgacatagcggtttgtgtactctataatagcacagtgaaaaccggaacaaaattaaaatgtttacaagtagctgaactggaggccaacacaggaacccccatatagcaagagatgcttccacagccagtcttccaagaatccctcggccctggccccggacgccctggaccgccgtcgcctgcttcgactcttctacgtcatcctggttctatatatgcgttaattaatcacatagaagaccctgcaggttctatgcgttaatcacagttcaccaggtcattcaattccttatgagaaaactgatagcctaatgcaatggtgcattcgtacttaaattggtgttggtattagcagaggcaactaatcagctggtctagactctagacgatccaaattatacatgttgtctgaagaactttggctgcagaggcctgataccagctgttccttttgttagactgaatgatcagacgctacagtcacttgtgatgctgcttttggatatatattgctttatcttgaggatctaaacccttctacaagcaggccggtattcttgctacaataaatattctgcttttcttattttcaaatttccctttgtttcagttttatgaatctgttaagcagagagagattctcaaaccactggttccaatgatgcttggcagaacaaccataggtgaaaagacattttgatctaaatacagtagctctacttgctgaatgactaattgggatctaatgagaatccgtttgttttagtcactctctgaatatcaaatgttatatattcatgtatgtttagtacttgttcaggtattctggacatggctggatttttttggtttctgaaaacctcatcctcctcacctttaagatgtacttcctccgttttaggttataagactttctagcattgctcatattcatatatatgttaatgaatctagatatatatatgtatcaagattcattaacatatatatgaatataggcaatgctgaggtaggtaacaaaagtcttataacctaaaacggtggtagtactaaggaaataagatcagtcataaaatactgagtactttctctgaagcatcgacactttaactgttaaaactacatgcttatgttcaatgcgatttaggaaatgaattcctgacttatttgaaggattggtgatatttgacacttgatgttctcaatgtacactgaaatctgctgctagaattaaaaaaaaatcatctgcccacgacaggatttgacaattacctggcaccttaattgtgagttgtccgttttgtaaaaataaaactgctccctttcttagtttgtcctctgctttcatggttttactacttatgaattgtgataatttctgtatatgttcccagttacagtattaattgataatcctgctaattcgatatttgtttttccttacactggtggagaagtggtttttactcctatatagtcctggtttttcaaccgggactacgaatccgggactaaagatcgctatctttagtcccgggtgaaataaccgggagtaaaaatcgatttttagtcccggttataaagagacagatccggttgcttctttattcttttcttctcttcataatttttcattatttttaatatattgatttcaccctaaccctatcccatccctaaattcccaaaacaatcatcctcaaattgccttcaaatccacaaatcgatcatctcaaatacatcacaaaatctaaaaaaaattacatcacaacttctacaaaattcaatcacatattcacatctcacacaaatca

SEQ ID NO: 41024 - DNA, 2506 bp, Oryza sativa
acggtggtacccatatgtattaggcctggtacaattggtatcaagagatggtagataccaaaccttgttcttgctagatataaatcatgataccaacatgataccacctagtttaatggaagataccttctgacatagtaagatatcttggtgataccttgaggtttcatctcacgatatcttctcggtagcatgaaaatacgcgggtactaaatctgataactatgggtattagcaatgtctggtgcctataaagtttgatacctatgagtaacatgtatgatacccggtacaaggttcaatacctacgagtattgcactaggtatgtatctggtttggtacctgatatcttggtaccttgatgtgtttctatgaaacctcgaagtatcatggtaccactatatagtatacaaccgagatgtcaaatatacaatataaaactgaggttcataggtggtactaatatgcaggtgtcacttagattgcatggtagtattatatatgaagttatatctacaattttactacgtctaaagaagtagtagtactagtgtattgcttttttctaattgcttccagtggcctactgtagtcaatacttagactgctagcagctaaccggcacccatgcatggtgtagttagcaacaagaggtgcacaaactaaggccataaatccatggcatgttatgtggggcacggctggctcatccctttccatgcataggacatgtgggagcacgttatactttctagaggacgagtgggcccacaagtagatgacggtaatacccacatggtcagatggacatgtgccatgtgaatgagctacctgctggcgacttaatgtttcgctcataacttgtaccgttcctacgacaggatgttgccccctagttttcctctttatatacagagcctaaatcatgggtggttcactaaacgcctatacaagtcggtcatcacccgcctcttgaaacactttcagtactagcatttctgaccttttatgttgtttaatatgtctatgtttttttatatagcatgcgttgatatagtcttctctgccagtgatattctgttttttttaagtatggtagcataacatttttttaattcttacctcttcaatttttatataccccctaatatcaattgtattaatgcatcgttagcatgtccattttagtccttttttggatttatatattcaatagcatgccattttgtttcaacttatttctcctgtcaaattctgctgttttgttctctcctctgtgtgaaaaaagacacaccattatgcaccattgtgaaaatatgccacattacatgttaaacataccaataagtgtttacatccttttttaacgaactgtttgcatcttttgataattctgtaactaagatccctttagtctctcaagcacaatgtagaaaattaaagtgcctttctatgagcacaattaccaatatatgatgctcttaagatcgacattgcgctttactactatacaaaaccggatcacaaccggctaaagaaaaaaccgatgacgggcttccgaggctatcaccaccggttgccaaaccagcagtacacactacctaatatgaatatcactgtcggttcacccgggaggacaaatataaccaacacgacaaggctgcatggctgccatagctcgaacatatgatattgttaacagtgaaatttagtaatcccttaagagaattatcacatcgccaatagtcagattctttggacctgcactagagttaagcggatctctcaggccagtgtatgttttttcatcaacagatatttatgaaatatcagacgctggtcctctgcctgctgccttctgcatgctgaaaaaaaatactgattccctcccctgacagctgcaccttgcttctgcatgcgatatgcgttgatctaatagcgctgcatgcaagccctctctctttcttaaatacaaaaatattttaaagaaaacattaaactattttttcttctctacgatttgattttaccattatatttattacaattaaatctatacaacatgttctttctttcttatatttaaaataaagtactccctctatcccagtttagagggcgtgaaatatttttttgctaataccaaggaatagatgcatgcaagaagtttgttctattaaactgtagttaatcgtattcatgagtatttaatcacattgtttgaagcaaaactgacggtctgactacctcgccacccaacgaaattgcatgtataccccgttccccgtgcaaccgcccatgcagatgaagcaatttatgcatgcatgcaacaattagttgggttgatgggctagaattaaagatgcgccctgtgttatcagacaacggtgaaaaaaattacaccctctaaactgggacagagggagtatataaataagattatattccttgttgaaacaatgtttatattatacatgaaataacgagttgtaattcttgaaacat

SEQ ID NO: 41025 - DNA, 686 bp, Oryza sativa
ttgaaattaaaatacttgctggacgcatgaattctttgattttttttaatcattttggcagattattgccgttcatcaaagaattgattgttaactcttacataaaaaaagggctctattcatgcatttgtcaaggacgggcacacacattgattcattttctttggaactccaatcaagcattgttcttaactatttgcatcaaagaattacttgcttactcttccaaaataacaattgcgcgattctgtatttccgctgatcatatgtttgtcaactaggatggcctctgatggagagaccccctccatcaaattctttccctaccttccatcaattccttttcctatcttcatcctttgatgatactattaggcagttctttgaaattaaaatacttgctggacacatgaattctttgattttttggaatcattttggcagattagtgccgttcatcaaagaattgattgttaactcttacaaaaaaaagggctctattcatgcatttgtcaactaggacggcgcacatggagtggtgccctctccttcatcaatttcttttcttattatcatcattagataataagcatttctttgaaattatttatacttgttggaatcatgaattatttgccttttatgaagcattgtcatcaatgtaaataccttgcatcaaagaattg

SEQ ID NO: 41026 - DNA, 696 bp, Oryza sativa
aatgcttaattaagtgcacatattcatagtcaaatgttgtttttttttatttttaaagccggtatgtgctagcatacgaaagatgtatatgtgcacgccatcaaacacacacactatacctatacacgagacaagccagatggttcctatttataggttccgttcgaatccactaaaaaaagtggataaacttttggataaaagtggtacgctttttaaactgctaaacggtgcgtttcgtgcgagaactttctatatgaaagttgttctaagatatcagattaatccattttcaagtttgtaataattaaaactcaattaatcacatgttattaccacctattttacgtgaaacacctaatttttatctcatctttcaaacaccaccgtaatgctactacttcctccgtttcacaatgtaagtcattctagcatttttcatattcatattaatattaatggatctagataaatatataagtctagattcattaatattactatgaatgtggggaatgatagaattactttacattgtgaaacggaggaggacctactaaaagctgtagtcccgtggtagtactaccagatgggctttaaggttacgtggggttgaaagatgattgatgattttagtcttgaaggcttgaagttggctctagctaagaaaacaaaaggtgaaccttttggactaaa

SEQ ID NO: 41027 - DNA, 563 bp, Oryza sativa
atattacaggtgacagatgcaatagccacattaatgcaattaatatgtccaaaaattgcctatatctaacaaattctactttgggttaagccaataattattcatattagcgatattaagatccatagcatatacaaataattgtaatagagggcttggatatttcaatacagggcatatgttgtgtggtgtgttttgttttgacgatgataaactgcctatggaaaatgcactatcaatttcagaaagtatgttttctacacctagctatatgcatgtgattcaaattattgcatagaaattcgaccaaatttctggtaagaaatgaaaacccaaaactattatcaggtgcatatattatcttaaaagcttcctgtatattctgacatactattctttttcttttgcaatagctttgttatatatctagaaataaaaatatatgtatatatgattgattgtaccttaaaaagagacaatctgttttctacaatactctcctagtctcctccatatactctctttgaactaatatatggcgccattgactttttaacaaacat

SEQ ID NO: 41028 - DNA, 758 bp, Oryza sativa
tcctgcagcccaacgttgaacgtgaataatgtaaaactgtacttattttgggacggagggagtactagtaattgcttgctgattcagctgaaaatgtcttgtaactttcttctcgtttgatcattgattctacctaactgatgcaagattcgtcatgcattagttagaaaatgttgagtggggaactgttgtagcacaggaagctgtctcatgttggacggctagaactgttgattactactccctccgtcaaaaaaaaaaaaaaaaagacaaaccctagtttccgtgtccaacatttgaccgttcgtcttatttgaaaaaaatatgaaaaaaattaaaaagataagtcatgcataaagtattaatcatgttttatcatctatcaacaatggaaatactaattataaaaaaattcatataagacgaacagctaaacattggtacgggaacccatggtttgtctttttttagaacggagggagtacttcattgactagggaagccaagttgcatagaacaaccaagtttccaactgtttaacacgttggagtttttttttattgttttcttatgaaactcccagacgtcaggtttttatacagaatctagcttttgggtcactaccatttcgcccctcagatacaccctctgttaaaactaatctaacttctgtttgtgtttcttaataagtaaagctttactaaattcagctcattacgttaaggtgatacaagtgtatcgagaacactctcagtctc

SEQ ID NO: 41029 - DNA, 573 bp, Oryza sativa
ggcttccagacaaccatgtagtgcgacagaatcttcatttcctttcgggataagctcaagcttatgaatctcaggtagacttttcagcattgaggtgtcatattgtcctactgcattttgttgccaatggacattgataagtagccggtttggtgttgtctgtaaatccacctcatctgtttgtattctcgtctgctggaattcaccccttccatttattaaataaaattcaaactcttccatgtgtgcctcccgatcagaatcagtagtgtcaccaatatttgactcactaggtccttcggtcatttggcattcaatagtctcagactggctactttcaggggcgttttccgatggagcactctgaaacttactatctgaatcaggcgttgcatccatcatgacagcagcaccagccactattacacctcccactatcattaagagaactagtactcttggaaaatcttaatggttccaacaacttcaggtagatattcttcagagttaatccattggctctctcaggaagaactgccagcagtggggcctcaaattccttcatttgtggtg

SEQ ID NO: 41030 - DNA, 511 bp, Oryza sativa
tggtcagacgttggtcgaaaagtcaacggcgtcatacattaaaatacggagggagtaacatcatgtctctttaaactagaactactagctattaagaagcgtgattaagctgaacagagagtgaaagcgggacatatcgatcaatcgaaactactgatgatcaaataagaaagaagacaattatatcaaattttgatcttacacagttaattacacaccgttatcaaaattattacacacagttacgttacacagtgatgttgtgagagggctttggtggtctgacctgtcattgcttgattggctggttgcatcgtgttcggccaccacatcaacccgacttatcaacgaaccactggtcgaggtcagcaaatttgtgccagcagtgccagagatagaatagtagtttcgttctttcccttgaagaattatacttatctcttttttaattgacgacgcgttaaccatttattttagtaaagaaaatgcaattatcatttgcttggttatg

SEQ ID NO: 41031 - DNA, 905 bp, Oryza sativa
ggtccatccagcaactgaaatgaactgatcgatcgatgatgaccatatatgctcgcgatcgaaggcatgaattgatgagtcgatcgatggatggccgacccagttggagagagatcgagatcgggactggatacgagagagccatatcagctagcggcagcagagagatatagctaagctgcgagaggctcaagatgaagccttatccgtcagagagttggagtaagatcgtatcacaggcagtacagtttcagatagggatcgatcgagctgcaggatatatctctatccatcttgccggtgcgtgcgtggaaagccctgcacagggatgtgggtgtctgggaatttggctagtgctgtgctgcatgtgtgcattgaggagctttgctttcaacaagatcaccaggagatagagaactgtacatcatgctggaagcatttaagatacgtagtatatagttatattcctttgtttcattgatttttggtatgacgtttggttattcatcatatcaaaaattaaaatacatgtattatttattttgttgtgacttgttttttattaaaaaaattaaacattacttgtacttttttagtatttacatttttttgaataaaacgagtgatcaaacgttgtgccaaaagtcaatggtgttatctgttgagagatggaggcattaattgacaagtactactcttcacaaagttattattccatgtaaaagtaatgcatataatacatgtgaaaatcaggtcaccgagagaagtagtggctgttgaatatattatccgctggacaattttgcaatttagggatacctgactgctactactgcttacaaagttattattccatgattccatcgcatataattcaggtggaaataaggtcgggctgcaggaat

SEQ ID NO: 41032 - DNA, 609 bp, Oryza sativa
aaaataatggtcggaaacggtaccccttatacgaaaacgatgctcgctcgatttgaaatttccgtgacccattttcactcctaccggtgagctcttggatgaccaccacactccctccaccaacgagtcgataacgagttcgctgttaccaccgccctacaagagcatgatttttcctgtctcgttgccgccaccaccggcatgctcatcgtgcgtccccgagtcccaccgcctgcgccaactcgatgtcctccgcggcggcggcgtcgttgcacccgtcatcatcgtcatgcccggcgactcggccagacacgaggggcgccagtgcgccgcccgtcgcagccatagaattcgaagaagcagtctgaaaaccggcgtggagagatcattagttcagcatcgtggaatgctagaattcagttttgcagtgcagtaagaatgcaaatgtgctagtactactagagttttccacagggagggaggcattactgtgcaagcatatatatatatatatatatatatatatatatatatatatatatatatatatatatatatatatatatatatatatatatatatatatgtatgtatgtatatatatatgtg

SEQ ID NO: 41033 - DNA, 527 bp, Oryza sativa
ttggctagagtgatgtggagctccgtgtgctgtgtggttgtactggccacggtggaaaggcttggcgagtctctactcgccgagaggttgttttttctttttctgtagcccatctgagtttttactcctatttaatgaaatataattggcagttctcctgccggtttagttttaaaaaactactagtaagtagtaaccaatatgcatttgttacctttttatatattcacgtggtttacttaattaggaggaggattcatcatcaacttgttcatatcatctgcatacattgtagaccaaccacttagttgcaaaatatgaaaaagaaataattatctataactgacacattgtagtcgaatcacatagttgcataacttcatagaaaaaaatatatatggctaaccacttagttgcaatatataatttttatatcatccgcgacacgttgtaaaccaaccattttagttgcaaaactttgttgaaaaaaatatgaaaaagaaataatttgaaaacaacgcgccagg

SEQ ID NO: 41034 - DNA, 690 bp, Oryza sativa
atatgaagcataccatgaactgaaagaggcaaaatccatctttaccaaagaacccatgtgtggcagatagcggcaatctcacgcggagcagcacgataccataccgaaaggatccatgacatgcacgggagtagcatagaaagaaacagagcccctactcacatttcaggctttcaacaactgcagcagatagttccatagaagcctgtgcgtggctggaaccggagggagtggagactgtgccgagtttggggatagccgctccggagccactaagccactacagagcttcatcgtcggcgaggtcagactggcgtacagtggcgcgggaggaggataggaaggaaatgctggtaggaggaggcgatgagacatggttgtaccggcctcgtcaaagggcagtgtactaggagatgactagggtgcataggtacttgtatagagctgcgacaaatcttagcttcgggggctaggccgtgccacatgtgtgtgtataaacataaatgactcgagggctatgccacattagattctgctggggctgctgcagttctatattttatgtgactcccgaggctatatatatatagcgacacatcgctcttaccgttaggatggccaatgacagacgctagaatttgatgatgtatcggtctattcatgcggacggcacatctttgtattggatgg

SEQ ID NO: 41035 - DNA, 985 bp, Oryza sativa
tatatatatatatatatatatatcactccctcccccgctcaccacttttctgctctcgtcttgcaggaatcgtgcagtaacaggacggtcatcgtacagtaacaagacaacattattacagtaacaacgtcaaaaagtagccatgatggatctagtttcgttaagcgtttttttatgaacatcatggtgcaaacggattggaaatacaagatatgatgtgagagatattgctctctaaagattgagatttacctctttttttagttctcgtctcactggaacagcgtagtaacacgatggccaatatgcagtaacacatctgcttttcgcagtaacaacgttaaaaaatagttatgatggttctagtttcattaagcactttttttacgaacgccatgatgcaaatgggttagaaaaataagatatgacgtgtacgttagtaatctttaaagattgagatttaaaatactctagatctaaaaaacattacttctatagggccactgttactatgcatgttctctgttactgcaaattttatcatattgttactgccaaaagtgcagtaacaacctataaaatttacagtaacaacctatatatttttgcagtaacatatgatgttactacccttctgagataatgttactgtcgaatcatagtaacaaggtatgattgttacaggtacataaccgatttgttctcacacaatttaaacagacatataaaatatgcaaacaatgttttctattcatataacatcatgcaatgaattggttaagagagcttgccatgaactataagatcatgggctcaagtcttggtttcaccaatttatttttaatttttctaaaaaaggaaaagaatagaagaaaaaatgagagatgggagggagagaaaagagtcggcagagagagatcgagagggggagggaagagagaaggggcagagaggaatcggagggaatacgggagggagggaagag

SEQ ID NO: 41036 - DNA, 2883 bp, Oryza sativa
  unsure (1)..(2883): unsure at all n locations
taaatctactcgatgcatcgtatatacactcctatcatgcacatgcgtctgccagcaacgaactcgatcaattggcgtctatgtagctatcatactgtagcacgagcattaattatatactccgttcaatagattgcttattaatattatgcctgccaacccatctcgcacgcggtacataatacattactcccccatcttattctgagcgcagccatgagttttcgtattcaaatttaatcatccgtcttattttgaaagatttgtaaaaaaaatttaaaaaacataagttctgcataaaagtactattcatgttttatcatctaataacaacaaaaatactaataaaaaaattcaaataagacggatgatcaaagttaggcacggaaactcatggttgcgcttaaaatgagacggagtgagtatatatttgtgatcgacgatgatacaaggtacaaataaacagtgcccgtctcattgcatcccggtagtaggttcatctccttttcatttttcgatcttaattatcttgacgtgatgggtgttgtatcaatgcaaactacatatgcttattgtttggccaaatatgcagggggtcattagcctttaaaaggcatctttcttcgttccaaaatatatttcttcctctcctcctagcagatttacgatgatgaggatgcactagagggtttgtggctgcctgatttaggtgcaacgagctcgaggcaaggttgatagtcagcagccaccagcagctctttctgtccacttggaaggcgcagatgcagagggcgcaagctgcatgcatggccatacccacattgtgttttttgaaagagcttaagactctaaaaaggagctaattggtagccaactttcaataatctagaaaagctgggttttcctagtttcttaattatagttaattttctagatgctatagttacatattctcataatctggataaaaatatgcactatttgaggaagttggagattctgggagaagctatacatctgctagaagctcgtcttagcgtcctaggagagctagatcatctccaaggttctgcttgatgcttcaatagttctgcctagtgaagttgttgattgatgcaaatttgtttgtggttgtgtgatccgcttgatgtgcaaatcttttgatacgtgtgtatggagttcaacatgtgtatgatgttgttgaacttgtatatgcaatttgtttgatgttgaagttgtgatctgtttttgttgttgctgatttggatgcaaggcttgtgattcattgttgcattaggaataactatcgtacaggagtataacaattttctttaggggttgaaattaacatcaatgtcggtaaaaaaaaaaaaccgacagtgatggctaaggctattactgttgccttcatactactagctagttcaaaaaccatcagcaatgtcatgtttgaaccgacaataataggatttttttaagttgtgatcaatcattaattaatactagatattaagattgatttgtgaaaataatggcattgatagttttgtgaaaaacacatttatatgttttttaataaatgtttaaatataactagaaaaggaaataaccagatatattcgttggagacctaatgtccaaaacgtaaaaaaaaaaatggcgactactgttaatgagctatggatagcctggagatgatgagataaatcagccagcctttttttctggctagtcatgtatagaggccaacatgtcatgatgatggtccatggaacaacaatgcaaacagtcaatagaatcctttancacattcatcatgtacatactgaatagtgagaatacttccatatactctctccgttataaaatataagacgcaaaaatcggataggatatattctagctaatactacgaatcgatcgaatctaaatagagaattgtccatattttaatattaaaacatgtttcatccgattctaaattcttatattttgagacgaaggtagacgaaagtatagtactactagtagtatatatattatttactgacagttatttttatattgccggtgggtgtatacgtaatatttgtggatgatgaaaatcctatgtctagattgtgtcaggagtgtgtattctatgtttttctttttctactttataaatatgataacataaattaattactggtaaaagtctgtataaatgctactggtgatgtgtctctcaacgtacctctatcatagaaaaaaaaatccaatttctaaggggtgatgtgtctctcaacgtaactctatgatagaaaaaaaatctaatttttaagcacaaatctagacaaatatttatctacattcatccgtaattttttaaaggaagggggtaaatggtcatcgatagggtgcaaaaggaacaaaattattaattactcctgcctcaacatatgcacgtactaggcagtacgctagcgtagtgagaagggtgagcaataacttactccctccgcttaaagaaaaacaatcataacaatatctagaattgtagttagagattgaggtattataggacggaggatgtaaggtcgctagctttatattaatggattactttgaagatagtactagctagggtagctatagcttttgcatatcctctacgatcgctggcacgtcaatgtcgggtccatttgcaaatgatactggagaagagagatctgcatgaaacttaaaatttcctaagctagcaaccagtgtgtaaactaaattatgcacgatagcttaaattagtacatgcatgttttgttagacaaatacttcttttgtctcaaaaaaccaacttctggttataaatctagatatagcatatgtttaaattcaaagcattta

SEQ ID NO: 41037 - DNA, 1897 bp, Oryza sativa
gtaacttctttggttttattcccctcaaaaaaacttctttggtttttgttaacaagtttttaactgctaaacaccgtattttacgcaaaaaatttatatataaaagtcttaaaacatatcaaataaatctattttcaaattcataatagttaattgagtacctaattaatcatgcactaatgagacgctccgttttgtgtgctgctaatatgctactattgtaatatggagtttcaaaagggccctaattccaaaccttttttaaagcacacggtttaaaaaaatacatgaataggagaaaaaaaatgtaaaattgaaatgtcacgtgttaccgaaacttataagattgtaagtcaaaagaatttaacagatgatgtgtttgaatggttaataggaaaataaaactcattttgatataatctagagagaagagaaatatgcatcggacttcttaaagaaaaacatataaaataaggtttgcgatcatgtgtaaatttcttatggagttgaggcataggatgcaatccaaagcaatttacatactacagtcctatataaattccaaacatgcagtttagagagagagagagggggggcactctttaaggatttgaatccgtacaaatccttccatccaaaggaaccctagcttgccaataaatattacttattgtcatacttttttttacaaaaaatggtcaataccaaaaacgtgtaaaaaaacaaaatgagtccattatatatgtatatatattactcgtatacggctggaaaaatatgaagatgaaccaaacatcatattaccttccaaacccacggaaaaccaaaaaaaaaaacatttcgctcactggtggtacggtggtggatctttatggcatgtacaacagcctttattagtggtctctctctattgccatgcaagtaaatttgatgacatggaagaaagagaaatgagtatggttgttatgcatgacaacagctcagagtcgactcttagcatttattagagcagattttgttgcatggtgatgaaagaaagtaaagaatagtaagaaaaagtattttgatacattaatgattagagactatattgtctctaactgttgtagaatgctagtctctagataatatagagctaatatttaactctacctttgtaaatgcccttacgaggaaacgcatgaagataattataaacagaatgaagacaactaatagtgtagctgccaggcattttgttgggccatcctgaccaactcaggcccagcaacaactgtactaattgggctgctgtcctgactgactcaggccaagttttttttgttgaagagagattgttacctcaaatagctagctactagctagtcatcagacagaaagctaaactgttgaaatatatattccgattccacttaaaaaaacaaatatattagatatgctccctttggtttttaatatataacaccgtaactttttgatatacgctcgatcattcatcttattgaataaaaatttatttatctatgttatttatttatttattttgttggaacttgatttatcattgaaggtacttatatttacacttttacacaaacgaatggtcaaacagtatatttaaaaataaaatacatcatatattaaaaacgggatggattaatacatttcggatggttaatcaaacgatgatacgaaatacatatattattagccttttaggcccaaaaaaaaaaaaaaaacccccggtcataatccatcgtaaacatgtttacaatctgattaattaattagcacggaaaataatgtcaaaacgatgctctctcttgcatcttgttccatcccgttataggtcgtagtcgcccatgcattgcattgcatgctacgatcgatcaatgga

SEQ ID NO: 41038 - DNA, 1395 bp, Oryza sativa
  unsure (1)..(1395): unsure at all n locations
cagacaacccaccaccaagggccaaaccccatcccctcaccctctcgagttaggtacaccggatcaaggtgtctcccttatcatccacaagggccaagggaaccaaaccaaatgccatattatccaccacgcccacttctcctccgtcgtgcaatgcaactcgcccatatggacatgtcgccatgccttgccagagcgaaggataaactccgcaccaccacgtttaagatcgcattgtattggatcgagctgtgaatttgcaagaaatgagccaagcagactgaccatgctgctgctgctgcacaccaacgcttggcattactctttgttggactcctagtgtgcctttggaccgaacagaaacagctatgcgatgacaaatttcactaagccatcaaaagcagtaaaaagaccaccgaaagcaggaaaaaaaaggagtgtactttgcacaaaactccttggcaattgtatccttccaaaggcaaaagctggaagaagtttatctcttagaaaaactcagcaaaataaatttgtagaagaaattcgaagccaagaagatattgctgaccttactgcatccggggaccagctccttgagaagctccatcctcgcattgatcttctcgcgtctcgcctgtttatcacccaaaaaaaatgataataataatgtcataaaaaatccaagaggaaacgaataattaagtaattaacgaggaaagcaacccctgaaaaggcactaaaacagcgacgtcgccacgtcctaattacccaatcattgcctaatccacagctcgttaaattaaattaaaccccacaaatctaatcccgcgaggagattggcttaaggtttagcgagtgattaattaagtgggtgattagcggcgagcctgccggcgacggcgaactcacgaactcacccgctcggcgaggctgtggctgtcggtggcttgccctcttctcgccctcacgtgcacgtacgccggcttctcgtcctcgccgccgtcgccaccgtcctcgccgctcgccgccgtcttccccttcttcgcagccgccttcccctgcagcggaatccaaaggagagacgaaatgagaaacgaagccgaggggaaagcagcggagtgcgcgcgcgcgcgcgacgcgacgagacgagataccttggaggcggggtcgggcttgcgcttggaggaggaggaagggggagggggaaaagagcnnnnnnngaggcncnaangggaagcaaacgcngagaacccggcttgcgcgncgacgaggtgcggnntcggcgggaacgccggccgnggccgcngcccngangcngcggcggtggggagaaggagctccatcgcctgggaggtcgggagccccagcagcgcggtgaaggagcccccgctgcct

SEQ ID NO: 41039 - DNA, 2435 bp, Oryza sativa
ctcccatcgttctgattattcgctatggttcttcgattatctttgtattgttttccctcttttattagataatgtctttttacttttgatataaagttgaatcatttatcttatttagaaaatagataactgtatttattttattgctatatgttttattaaacaatctttaagtatgatttattctcttcgtttcaaaataaataaatttaatataggatgtgacagtaatacaaatatgatcttcacggtagtaaaatgtgttatattctatatatttgtttactacattttagtatattcatattaaagtttaaattaagatgaatagttaaatatcgatttaaatgtcaatagcatcacctattataaaaggaggtggtagtagttttgtaatagtacgggacagtgggacacgcacagggtaaaggaaaggaagcttctcccaacatcctgggaggttagaggtgaattagtgttcagtttagtgaggttatcttgaggcaatcgaacacgtggcgtcgtggccgaagttagtggagtactaaacacaggatcaacaccatgtggccttttggtaaaagaaaactcggctaccgtgtcgtgtactcgtgtcgtgtgaacgtgcggaagagaagggaaaagctgactagtagtagtaggacgcatggcgcagcacgcacatcagtacgcggggggagtacgtgctcatgctactttagggtcattttattatcaattttaacgtaggggttattcatattataattaaaacaaatcttatcaaattttaataatattaaatttttgataaaataaaaatagttttaaaattttagcagggttacttatgtatttatcaaaatttggcaacaaactaaatataggcattttttaacaattttgataaaattggtatggttgaaaacaacgtcaatctgaacagcctcataatgctaaattttagtaaattttaatgttgcttaattttgatagcattaaatgtctttacaaaatttgatatcattcttatgataataagaactatcaaaatttaataggctgatgttggtaaggtacattctttattatcttaaaagcattattttagttaaatgagagacatcttaacatatgttaaaaatattttatatacatattcatagcagcggctagcattaaaatgtgtcgcatcccttcaaattctcttataatagtattatgtaacacaagaattattattaatataaaaaattatttgattttcaaaataatttttatatgaaacctttttgtagaatgaattatttaactgttcaaaaaaaggtgctaaaaaaaagaggaaaggtaggatttgttaaaaccttttcacgggagaagaaagatgagacgagacgagacgtgacgagcgcggcggcaggcgaaagcaacgcctggatttggaagcctccgatacgatacagacgcatcggtagcaccgccctcccggtgtacccgctgtgctgcagcctgaccacttctctctctctctctctctctctcttccctttgaccgcggcagcgtcacgccatcaaaaaagcccaacgttgaaactttcagccgtcaatggctcatggcccattatgtactatgggccgatagcccacaaacctcaggcagcgagtctcggcccatctgtctagcccaacccacctcgcttccaaattccaatgctgggcctgcaattgtctgtcactcctgtctcccgtgtgttttctgcttcctctgttccactaactagtgctcgtctgctttctttttctcgaagaaaatgagaaatgccggcggctgcaggcctgcagccgaccagtagaataacacagaaaaatatatataaaaaaggattggactggtattaagaaaatatgtgaatcacacagatacaaatggtagcactatactccctccgttagaaaaaaaaactaatcctaatatgtctaggttcaaatctagaattattttttttgacggagggaatatttgcttcgtgctcgtatttataactaattatctttttagtggtaggtgacgtatccgtcgacagtgagatgtcagttgtgacttaatcaatctcaaatatgccgatccaattttttgaatgcactcatataagtaagttgtgcgttatgtattaataaggatgagtttgcaagtcttatgagcccatgaaacttgtttctataaaaaaattgaatgacagtgaatatttgtttatatggctgaatcattttatatctgacatgtaagaaaatgatagtacatcccttcgcggactgaaatacagaaatagtttccccacaaatgcagaacccaactgcacttctttttttcatatcggagaatatatccaagtgcactagatgaaaccgtgaactgcatctgccttatatgggcg

SEQ ID NO: 41040 - DNA, 550 bp, Oryza sativa
tcagggaagtatttttatgagttcatctcgtgttgtttcttacgtaccatttaaatagttactctctctgtctataaatataaggagttttagttgattatggcgcattttaatatttcaaatctagacagtaaatatgtccagatttatagtactagaatacgtctcatccactcaaaattccttatattttgggacagatggagtataaagaataaataagatatattgtactagaattaataacataaaatacatcactctataatagtttatctatacagatctattctattagaaatacatcactctatctattctattagaatgcgtcatatctatatgaaatcccttatactatgggatagagagagtatttacttaatacagaaatcgtgattgttattaagcgagaaggtagaaacatcgacagtagcacttggcagtgggtgacacgagcaggtggtgagtggcgccaaatgaagccagcgcatgcagctgtactagtgaagtgatcgatccaccggcatcttttattttctttttctct

SEQ ID NO: 41041 - DNA, 500 bp, Oryza sativa
tgatatttttaattttttattattaatggttaaagttaaaaatgtttgacttaccactattatattttaggattaagatttatattttaggacggagggagtagcatatactccctccatcctataatatagcaacatagtaccggacgaaacacttcatagtacaacgaatccgaatatgcttcctgtccagattcgttgtactataaagtgtcccatctaattctagattgctatattatgggatggagggagtagtatttttttttcttttctttttagggtgtacaatatcctactcccttcgtaaaaaaaaaacaaaccctggtttccgtgtccaacgtggcatgaaaacctagttttttttttttttgttggacggaggtagtatgtatactcactacgttggcggaattgcgttggcgtggggatagaggtaaaatgtcttggtgttgactttaccgtgtttaggcagcgagcgtggaccgtggatcgtgtgg

SEQ ID NO: 41042 - DNA, 2899 bp, Oryza sativa
  unsure (1)..(2899): unsure at all n locations
ccctcttctctccaccacacatgcttcaagtgactaggagggcatcctcctttttaaggaggtccccctctcctagaataagcaaggtgatactaaaatccacatgcatgccatcccatgaggtgggctcttgtgattttccaaagaattaatcttcgagtgggctaaggcccatccattaattccaacaggatccacggcccgcggctacacgaatcaaccggcttttgctccctcgatcgcacgtacgctgccgtgccggttgcatacattgcctgcttattttaaagtatactccggccgtgccctgcagccggccggcacggcccggaacagtttgctcgcgatcgcgtgcacgagtatggattgttccatcatcaatcgagatagtactatggttgtgtttagtttagcgcaaagtttagattttggttgaaattggagatgatgtgactgaaaagttatgtgtgtatgacaaattgatgtgatgaaaaagaactgaagtttagattcaaactttggatctaaacacagcctatatataattaattaagctgatgatttgttgatctaagagaggtcaatcatgcagctaattaatttccttaatgagtaaattgcaaattgggctggttctttttaccagtgttgcaacttaaaccaggcataggacaatgttttcactttacaccaggaaaatttgcataatggttcagtttggtccacttcttcttcaatctgtgtctacagtctccactactactatccccgagcgactcgcgtgcaccatgggtctccaagctcaagcagccatgcacacgcgtcaattcgaggaggacaactcatggatgcatctcgtgctcactcatctgctgttggcatcctcctcaacggggagagaaaagcacagcatagcagaagaaggggggcggcgcctcggcggtggcttgatgctctctggcagtcctgcagcaagtggaaaggagatggagtaggggccgggcgctggccagcccagcagccactattttctaccatcaggggaaattgatgagctccctagattggacaaagtcaagatcagggaattctaatgaggaagaaggctgcttgacatgcgggccactagcccaaaatgccaaattggtaacaatgtttagtccaaaatgaaaagacttgctaatgtctggtccaatttgcaaattaggtaattaaacctagtccaaagtggaattcactcttaattttatttgtcagtagttaacctgttgtgtgtaatactgcatttttatatatagaggtggagatcagtatccctatgaccctaatatatatattcgacattttgcggtgttgcttctgtttgatatatactaccagaggatgtatagactttatatatatcccttgaatattatcgatagtcactactaanaaataattttcttttataggtagctagaattggtttgtttattgggtgtttttagaattgttctgtttggcgtatggatgcccctgcttgtattatggagctattgaaccgtgaatctcaacaagttgttgagtaatcaataaagctttctgtttctcgaaaaaaaaaataaacagatgtaccgtatgttaagagagaatatttttctcatttcttaatagaggaaattgcacgcccccaaacccttacatccctcgccaaccatcctttcatttccaccagtcctataatcgaacactatgcatatgagcatttcctggatgtacaaccccaccctctaaatacaatgtaagttgaactagttcatatgaaaatcctataaaattattgtattttgaatgaaccctaaagttatcatagctgcctttccactttcctaaaataaacataccttgtataggatgtggcacattctagtacagtaaatctagacatatttatgtgtgctagaatgtgtgttacatcccatacgaggttagtttatagtagattttcagctgaatctgaggttttcacaatctttttttttcactccggaaaaacactgtacttaatattagttgttttaaaaaaaaattccaaaacgtgccattccgtgattttagcaggaggcttgaaggagaagaaagcggatagacatggggatcaaagagaaaagcaaaagataaggaaagagaaggaaaagatcatttcttggcctcttccctttcccccctttacatcaaaggacaatgaattgaagccaaagaaagctagccaaggaacgtggcacacacggccaagatcctatagtaccagccaatcgatctcaaggatcccataatccaatagatagatatgtcatagatatatactccctccgttttttaatagatacccccgttgactttttctcacatgtttgactattcgtcttattcaaaaattttatgcaaatgtataagatataaatcccacttaaaatnctataagtgataaaacaaattatagcaagataaattataatgacgtaaattttttgaataagatgaatggtcaaacatgtgagaaaaagttaccggcatcatctattaaaaaacggaggtagtatatatagctataggttttgtaggataatagaagagaattgaagtagcatcactatatgcatagattggagaggcaccaaaaggaaaacatcgaggcttatatgccctgtggtcgtgtccacgaaagtgagcccatgtttaaagcaaaagcaataccagcatctccttgaaaagacctgagcttagctagtgggatttatacatactttgggttaaattcccctgcatgattcctgaattttttttcccttttctctgccatgctaatttcataattagtgtgtagtttgacgtccaatgtacgtatagatcaatg

SEQ ID NO: 41043 - DNA, 4683 bp, Oryza sativa
cgaatcctatgttttattagctacaacctccgtcctataatataagagatcttaggtggatgtgacacattctagtagtctatctccagattcgtagtactatgatatatcacattcacctaaaatcccttatattataagacagggggagtatcacatcactatttatatgggcttgattcgttacaatgtaagtcatatactactataactataaaacttcgtaggatgatatgttacttaatctttcatgtttattctggagagttatttattccatgtttagattatgtttagattaaattgtctcaaatatagctacttctaaagtaccaatggacatttctagccatgaaatctccaaaatactactcatcttcgcaaccccatcttccaacaaccatgaattcatgacaataaaactaagggtaatatagtccatttttacctctccccatctaagtgaaaactttaaaagtaattattttgagccggagggactagtagtgtattagtgtaaacatttttccatcctaaaaaaatctctgaatgtttaaggatctgatttaaaaatttttggagagttgtatcttgatgcgttcaaatttcatcatatcatggttcacgaaatacgagtagcacgttacgttaacgttgctctaatgatcttgcacagagtcctgtgtgcagaataacacgttggcaaacgataagttccagaactatcttccgttatggcaactgtacatttgctcagttgcacgtgctaattgtcttcctagtcctgtcccttcgcacccatgtgctcatgtcagtctttccacctcagcgatacaaattactctccagttttctgttaaaaataaagtgcatactaaggcaagtataaaggtagagaccggtctctacgttaattacgttaattagatgctatcatgttacaatagttaagacaatatggtctctaattattaatgtaccaaaatactttcttactagtcatctttcatttattagactcactgcaacgaaaaatttccttaataaatgctaagagtcgactctatacggttgtcatgcgtagcaaccatatttctctttcattctttctctctcttccatgtcatcaaatatgcttgcatgacaaaaagcttgcataataatgagagaccgcttaataaagaccattgtacatgtcctaagggtctgttcactttgataaaaaaaaacttaccaaattttggtatagttgtcaaaatttgaataggatttcttatatagttaccaaaatttggtagcaaactaaatgtagccacttttggataactttatcaaaatttgataaggttgaaaatggtatcaaagtgaacatgccctaagttcgacatccttaagaaagttttatcttaggtttgttatttctttcattcttccaaaattttgtaaaccaaacatattcttaccattggtgccctatttggtaattccgaaagtttccactcttataaactctaccaaatgtttaataaggctttagaattaaagccatgcaatactaccaaaatatgccaaaacttagtactacaaaatttttgtaggattggaattgccaaaaacaacccattactgccctaaagttttttttttcacattagaccaccatttcttcacttccatttaactttggaccccttaaacttcgtttaacttgttcaccaaataaatgctgctcatataaccttgacattaaaccatcgtagtcaggcatacaccaagaatacatcagcaagaaaagaatccacagtatctctcgctcatctctacaaaaaaagatagcagcagtaaaacctccatatccatcacctccagctccaagagtctccaacaacagcaacaacagtatctctctatatcttgcattccatatgtacatcgtctcagaatccggcctccaaaatcaatgaaagtcccatgcaccgcactgctgcactgcacaagacgttgccaaccatccacagcagcagcagcagcagcagcagccgtcagtccacagctcacgcctagctagctagctagctctcctgacatccagccgccattgtccacagctcacgtatgtttgtttggcttgctctgctgacctgcttgctatcactaccaccaccggtggtcacaggctcacagctccgtctttagcttgttgcctgtctgggccggcgctcctgcacaaagacatggggaaaaaaaaagtagaagaggtcaaagttagtggtagggttcctggggtacaatgatttcaagaggggaggacaatagtagctaggacagcatcaagtgaccagctggtaacaggtaaaaagggggttcagttcagatcagtcaaattccaagaatttgccaaaaccagtcttgcataagttaattgagtactcctatagtcctattcagtagtttcttgaaattatatacgaaagccaaaaaagaaaggtccaaaaatgcatgcataggataacattgtcagtagcaaggggaattcagcaagaccgtctattttcgaggaatgcaaagcgaatgagctgaaccacagagattagaacggcaccaagttgggtccatttcaatgtgaagccatgaggttgagatctgccctgctaagacagagctgcaaggggatgggccgcgtgataaagatgatggctgggaaggactggacaaagcttgctgtataccactcagctttgagcgcagacaccggtacacgaagaagctgcaataatttctggcaaaaacagattctgccagccgtaatgcagtacagatatcatgtagtcagggcctcaggggagggccctaaaggtttaatgatccttgaacgctttgcatgattgggtctgtacctccaatagcatttgtccctccaagagctctgcttggatccagagctgcagatcagttaaccagatccaaacggcagatcacctgtactacacaccttttcttccatcttactcattagcaaatgcaagagtataacttcatgatagtgctaaaacatgatttttagacaatggagctggctcatttggctctcacaatatctgtactagttatccaatccactctcttagccaagctatataatcgacctcttaaactgaaccatgtgctacggtgtattccttgataaatatataggatccactacaaacttcagtacccagctacccagtgataaaactacatctctagttacaaggacagtcaaatggcacgcaaaatgtatgtcatgcaatgcaaacgtaaatctagcccacatgaattgccataatcgaatgaaattatcgtcgttagatatgtcaaattaagatccaaacccttagattcgcttatgtatttgctattcaactagttgaatagaaaacaatactacagtacagcgtacaaatagtagcactgagattaaagttgttttagctggctccctccattgcaagaaaggggatccctagacaggcactggacaacttacagaaaaagtggacccttcacagttgtacaagtgatcagaagggccaaagggaccagatctgcatctacaggccttatgcagccaagcccaaacggaaagccgggagcgatatggtttctagacatgcatttattgattcgggcccagccacaccaaccagttgggtccgctggtgccagagagaacagatccaccagacgaacacatctatggccccttaccatccaaaatggtggcgatgatggcaataatgattgagtgaacaaacaaagggaagaagaacaaacaaagcattctctaatctttctagaaagttacaagttcctgcttccttaaaccccctagttgctaataaacattcactatcaaatagaagcgggcccaattaggatagtcatctccatcacatccaaatcagaaggtaaatattatttatttatgtagaatttataacaagtacttttattagcatgtgcatgagataaggtatgataatctttcctaaagatgtagtagtagttttccctggaagaaactggtttttcacatattttaccacaatttcccatttacctatgtacttctaaacactctggaacaacgaaagagacaaaagttgtggtccaatcaaggctgaaaaattttaaaagtaaatgacaaacaactaaattcaatgagatataggtttggttgcaagttttaccagagcttgctagatcatagccgaagagggaggaacttgaattgctaaagacagggggattggtatccgtccgcttttcccactgtgaaggcggctggagcgggtgtgctaaatcaccatgccagaactgctgttgtagttgcatgagattccttgctccatggacgcccatgtctggccaggtgacctgctccaaatccattccattcttgtagttcaagcctgttatccttccacactataaataccatagtaagcagagtatatgcccaatagcataatcaatgaacctaaaatgtgaatcatgatcaactttaattgaatttgttatttctgagagatttacagaattacacgacatgcataatagaaaatttacatggaatttcacaaatgcaaaattctgcagaaaacatgtgatccagctacaatggtctaatcatgcatatat

SEQ ID NO: 41044 - DNA, 2060 bp, Oryza sativa
tatcattctaaaatcattttcataatatttcaatccaaatcatttcatcatttcactattatctaatatatatcccgcagtaaagcgcgcacggggcatcatctagtattaaagaatattcaatacccattcaaaaattaatatcttcctttgaatctagctagctgctgggttacttgatattttaagttaaacaatttctgagtactgtttaagttgcatataaaaggattgatattttcgttacagataaaaaaagaaatggattgttaatgtggtatgcagtgatcagtcttattgttgtttatagaaagcagagatacttggtttaattcaaacaaaaagaatatgtgcgtgttgttagcacatacgtttgtactatatatgtttctcagaaaaataaagatagataacttagatgtaagttgtgagactattgtcgccatatattaaaacttctagatcgcttgaagaaacaagaatgcatgttcactcaagggtctttgtcaaatctaaggctataaaatctattttgtataatatagttaaagagagaaaggcataaacctcgatcacaactttgctgccccgtaaagtggttttttgacaggctatctctattataatttgttcaaacacgacaaagctgcttaagttgtaaccttgaaagcaacttcaagttaagaagtgaccgtccaacgactgatgaattatgttggagcaatttttcatttttaaaaggatattcatacttctttagtgtcggtaaaaaaaagtacccaaaagataccaattaatgtcataatgtgggaggtatatatcacatccctaccatattctatgtagtactatatagtttagtgcctaccttcaagcatacatgcatgataaaaaggtatagtgggatccaaatccaatttgtgatttctttgggatcattatatgaagacagaagatggttggtgccaaatagtacaagaagctagctaatttaaaagtcattttgatgctctttctattctttgtcctggacaatgacactcactgatccacatcctgttctatggatggattctagatatgatatgacctctcaaacgaatactactggtatttgactctcactcacagtccacagttccacacaaaaccaaaactgatgatgcatagcatatccctgcagcgaccggcctcagcgtctagctttctacagtgtataacaagtactacgcaaaaggaaatccaaagacaagcaatacacatcagtttatatcgagttcacggccgctgagaacaatgaaactgtcatgcacggtcatactaattattaattagggcagcatattctactaatagtggtagttgggtgtagtagaaattaaatataactatgaattttcatgagtataaaaatgttttattcaaaactgcactaaaatatctttactaatttatctaaacatgctatatgtcatacaaatttatcatggcgctatatattttaattttaattttggaaaaagtacgaatttttccacttgagtattgcggtagtacgatttaccccctaaaactacaataccggacatttaacagcccaaactcttaaaaccggataaattaccaccatagctcgattataagcggttttcagcctacgtggcacacacgtggcgatacagtcagaaaaacaaataaaagctggtggggtccacctgcgcttttcttctctctccttgccctctctctctcttggtgaacataggagccgactggcaggtgcggaggcagccgcggctccaaggccggcggcgggcaagcgcggaggcggcgggccaggagccgaggccggcgactagcgggcgtggaggcggcgggtgaggaaccgacgaaggtagtcggtgatggctggtggcgggcgagaagccgaggccggcggctgccgggcgcggaggcagctgcaggcggcgggtgagaaaccgatgacggcagtcggtgggggcgaaggcgggtgcgggcggcgagcaaggagccgaggacggcagcggggatagctgcga

SEQ ID NO: 41045 - DNA, 1547 bp, Oryza sativa
  unsure (1)..(1547): unsure at all n locations
tttattttcagggatagaatcattctccaagctgggggattctatctctttggagaataagagacaagccaggctctcctttttttaaattttttctcgccccagagggtttaaaccaaatttaaccccccggggaaaaggggcgcaaacccaattttttttttaacttggnaagaactgcagggtctttactgttactcaacaaagtgaagcccctcgagctcatcagatcagtatcttcaaagtctcacttttcattttttgctgcaaaggtacaatttatcttggattttcactgcatgagagagagagagaganagagagagagagagagagagagcaatcaacaatgattagtcttggatcatagtttaatcagtttgatttttgtgacacagacaaacgggcaatatgcaacactgaatgtgagaataccatcatggacatcaatgaatggtgcaaaagcacctctgaatgacaaagatctgcaattagcatctccaggtatgctcataagaattgagagagcacggtaatttgtcgcccataatatgttggaagaactacagatataactctgcctcaatctcgatcttattcagggactttcctcacaatcagcaagcagtgggatagtggtgatgatcacttgctactccagttcccaattaacctaaggacagaagcaataaaaggtatggaattttgagttttattttctattcagcttgaagaaataaatcaaaggtttatcgatcagtaacaaagcccacacacaacaatatatcaaagcaatcgaatactacttgctttccctacttcaacagaccagtatccagaagtcagaatcagtactatccagtgattttgcatttcaccaacatttcggtgaatttgggctttactatcggtacaagaaatgttcatacctgccaaaattttatcccaaattctaatattgaattcagtgtcaattctaagttgacaatcaattaattgttttcacatctattttacttatgttcattatccagatcacctctaccttgtttaattttttttcctaaaaaaatcgaaatgtcaccatattaattttttttgaaaaatttgaaaaatgtacaaaattggaaatagaattcaggataatacgtgctctcatttggaattagtgtgtgtttagttcagcgcaaagtttggattttggttgaaattgaagatgatgtgactgaaaagttttgtgtgtatgacaggttgatgtgatgggaaatgactgaagtttggatccaaactttggatctaaacacagccttaggggcttgcatgtgcttagattgaaaaaaataggggacctgaaccgctgaaaaaaaaactggttgttacatggatagcaaaaaaattgcaaaccaaaatccaatgcatctaagatggtaaattggtaattactactaattaagatgaaccagaattttcacaagagattgactgcaaaatggtttatcttcatcttcagacgatcggccacaggtagcatctctgaatgcgatcct

SEQ ID NO: 41046 - DNA, 3482 bp, Oryza sativa
tgcatcacagaaccccccatcaagaacccatcaagaaaaagaaaagaaaagaaaagaaaaaagaaaacccctcaaatcaacagcatcccggatcggccagggaggagcaccgggggcgagagatcgaggcgcgattgaatcgggggggggggggggaaagggagtaggaacgaaccctagaagggggaggacgaggaggcgaggggagaggaatcgcgaggaatggaattcggtgggcttcgaaatggggggcgaaacgtggggagttgggggagagagataaagcaaggaagaagagaaggtggaggccgcgaaattacggaaatgccccttcccttcccccggagcggtggggcccacctcgatttttccgtgcggggtgggccccccaccgtcaggttgccgggttacgattcttttgtgtgtgtgtgttcttttcttcttcttctgtagatggacagtgagggagaggagaaagagaaagtgccgtggctgtacaactcaaaagttggaggactatatgtctttttttttctttttgagaaaagatcttctgaaccttgttttagttaagttttttaaaacacacttttttattgaattattttttaaaaagggctatttgtcctgtcatagactttagcacatgtgacaatgttgttttactttgctaatagaatggtattgtggaatagagtagcttatactcttggttgactgtccatgaatttagagtttaagaacttgtgcgaaatgaagattttatgttgctgcaagaatcttgaacttactaaattaggaatgtaatcttcatatcataaatgaagctctctctttaacattgtcgagtttcatattaaatataaaaaaagggtattcaagggttttgtttttataattgtattaattatatggtttgttccatgggagaaaaaggtaaggttggaggtatagaaaccaaaaggttagtttagtagttggaagaaattgaaagatttaattatattcactttttttttacatttgacttaacacaatacacctcaaaaaaaaattatatctgccttccatcccgccacattgtatgcctattgtttccttgatgattaacacctgacctcttccttttttattccctaaggagctttatccctattgtcgcttaaattatcatccatatgttatacccatatatcaccggggtcttataatgggtgaccattcattgggcgtgcactagtggatcgcccacgcttgtgtatcatattagcatgtgcacgttccatagttaatcacaaggcaaatcataacctaagtgtcagatgaaactaaagtttgaattacaattttaatgaaaattagtcaaaaaaacatttttaatgaaacattttacctattaaccttttatatattatgtttacagacttttcatatataaaaacttttgactataaatcccattctaggaattaatagagctctcctgatttcagaactcgtttatagaagcattatactgtaaaaaaatacattaaatgtaaaagatatatattctctatgtgcaaattttagcacaaatttactataagtaaaggtagagatttccaaatgcaaagtttttttttgcaaaaaaacaaaaaactagaaattgaaacgaaaacaaaagcccaaaagcctatgcggctgaactacggccctgtactcggcttgcacaaagctgcttgagttgggaagcagcgccgaacacctaaaaatgtttgcgtgttattctcacgtatttttcaccctactttactgctccctctatcccaatgtttgacgccgttaacttttttaaatatgtttgaccgtttatcttattcaaaaaaattaagtaactattaattctttttctatcatttgattcattgttaaatatatttttatgtatacatatagttttacatatttcataaaagtttttgaataagacgaatggtcaaacatatttaaaaaagtcaacggtgtcaaacatttaaggaagaatggagtattttgatagtgcgatcacgcctcgctctcgatatgttgcctaggctaccttcatattaattattatgaacttctttttaacttttaaatatagcatttgaccattcattgattagaaagactgtacatgtttttatcgtgacttgtttatcattaaaaatattttaaacataaattttatatttatatttaattcgtttaaataaaatgatctatcaatgtaaaaaagaacggtagcatatatttgaaaacagagtatacgacgccctagccggcctatcgctagtacgttctaccctcaagcagcatcacgcgtacgtataaactactcttgcagatcggtcgagctgtgtgcatgctacgcggcagtacagcagcggacgagagatcgatgggaagaatgagatgagcgctgggcatatatgtatgcgatgatgcataggtggtggctggaaaggatggcgattttgtccgtctctagagcgttacgttttgtacgtggcgagctggcaatgatcatcttgtactacgtgtgtatggtagtagtccacctgcctgtacgtgcaccaactgcatctcccgcacccacatttctactgcctctactcatgcataaagtactccaagttttaggatcagccacgaatattagaacgaaaagtaaaaaaaatatagaaatatattctaggattcaattctagaaattgctatatttgagataaagaaactaaacaatagtcgaaatattttcctcttgtatgttaatcacattttacaccatacattctgcataaagattatcgcattagggcttgttccatccattgctaaaacgaactttgccatttgttggtaaagctaaaagttaggaatgttcttttttttttatttttccaaaatgagatatgtggaggtaatgtttggtttgacacttaccaagattttaatgtacttatacttatgtggcagtgtggcactactacaaaaatcatctttcatggcggccattttggcttttcgctggcggaaatcgcagccgccacaaaccaaaggccagtgaagatcacgatcttcgctagcggttttcgaccgccagcgataattcatttttgctggaagtcatcttaagccaaccgccagcaaagatccattttcgctagcggctgacttaagacgaccgccagcgaaaatgaattatcgctggcgggttacaatgtgctagccgccagtgttaattctggccaaatttaaaaaacggagcgacaccgctccgtccgccctccgtcaacgctccaccattcaaaaatttcacagtaatttatccaagtattcaaaaatccacaaaaaattacatgaaaaatttacaatcaacaatttccattcactcaagcattcaagtatcacaaaaatcaacacattaacaaaattttgaagtccgctgccgagccccg

SEQ ID NO: 41047 - DNA, 919 bp, Oryza sativa
agctgagcggcaggtggcaagggccattaccattgccattgggagttttattttgtcgatttcaagagtgccacataatcttaaaaatgttttgtttgggttgatgattggaacatatatatgtctccagtgcacaattttatttcgtgatttcgtatatatgctatctgtagcatttaatcagtcgaacaaagcatctatatatcctcctccagaacaatagttttccgtgctccaagacatatatatagggctcctagcttaatttggaacgtatggattttgtacaattttgggtaaaatcccgtaaatataacgtgctcttaaatttgtgctttcctataatatcccgtaaaactttgggtaatcccagcaaaaagaaactttgggtacctaaactgtatttctgctatttttgcattagttgtcaacttaggtacctaatgtgtctaactcatgggaaaaaaaaaagaaaaatagaagaaggtgctgactgatttatagtacactgctctcaatatccaaactagcacaaataaatatatttacttgaatgtaattatttttctaagagtattcaagctcatttatgcgttatacctttcttagcctgctcttgcttctttaaagaatcaaggttttaaattttgcttcacaatacaggtatggaccgaaattgcaaaattaacaaagaaattgtgaaatttcaaattaacggcaaattcttttgctgcccctttcaagtttcaatcaggcttttgtaacgaggaaaatatatggaggcaaagtattgagtaaattttgaccttcatctagaacatgacaggtagattgaaaagcgtatgtggaattttaatgaaattggacattaagacgtgggtatagattcatctccagctaacattttattttatcggga

SEQ ID NO: 41048 - DNA, 853 bp, Oryza sativa
  unsure (1)..(853): unsure at all n locations
aacatgtgggggaagggtaaaacttcttaagcgatcttcgcaatctcaatcattatatagaatgccaccttagtctgagaaatttatcatatgcatgagaaaacaaaaacagaagtactccaagtagctaaggtanaaaggcgtagattgnatcacaattaatccatttgaggaaacaagcatgattgtcagaaaggaaataaattaatttttcaaacaataacgtacacaaagtccattattttaatgaaatagagatccatttcagggtaatcatgattaaaagcagtattgtcagtagggaaatagattaaattttacaaatatggacatacacaagtcctttgttttagtgaaatagagaatcaagactagatgaaatagataatcaagacaaaggttgagggaagaaattgttggttttacgtgatgctgccatggagggaggaagaagcttggatcatgccagaggtggaaggataagccatgaaaaatacttccttaaactaaacagcagtgcttcaaccttccttctgaatcacttcagacatgattcacccatcttgaaatggtatctgacagcctagtaatccaaatccatctcctgcttctttcccatctgatcttctatgatcaaccgatgaatttatcgatacccgcaaactttttgttcctctcccaaacttgcctgctgacttgctcaaattaatccccttccaagcaggccctgcggctgttcttctgaccagaagctaaaggatgacttttggctagaggagtagttgtgcaagaaatggaacgggaaccagtggttaaagaaaacttggaaagcagacatacttattatcggaca

SEQ ID NO: 41049 - DNA, 763 bp, Oryza sativa
ccttggccggtcagtacagcagaagctactatacgatagcaaaaatttgttcttggtttgtactcatgaaactagcaaaaagccaaacattagaataaagttattttacaattcttaaggaggtaccgggaggtaccacattttctagtacaaaatttggtacctacggtactagaagataccaaacttgtattaaaaattttgttacctcttggtatctcttaaggaatgtaaaatttctcattagaaaagccttccatttcatgggtataattagctgggatggaagctatttacatttggtgacaaattgacaactagcttcttagtacttccttgccatgaataacaaaacagtgcttatagagcagttccttccctgcaaaattggcttgttcatcagatgcaaaaggacaagatctggaagatgacttggtgcaggtttaggagtaccagctgcgcatgcttgctcaagtagataaatctctgaatggaaagtagcggaatagtctgaagcactacgtcagtagttcatttcagtgaccatgtgctcatcttcacatatctcagtcaccattttctatactaatccatagttgcacagagatgatctcctgatggccattctgttcatcacgaggtcaccaatcaggtctcagaagttgcacaccaatcacttaactttcacatcagagggcaaaaataacatgatctagaattctagagtttagagtttggactatgtggagcgtgatcacctttc

SEQ ID NO: 41050 - DNA, 1420 bp, Oryza sativa
tagatgatgcatgatactgcgaattttcaagggttttttttttaattttgggggtatattaatgaattagttgatgatgaggaacaaattaattactacatttgcagcaagctagcagatgtgtgtgtacgtactttgttctctagaaagtactacgtacgacttgagttctaatcgtttggttggatggagatacagaaccctatagcggcttcattgtatgtgcagacttttcatttgatttggtatatggtcaaattggtgatacgggttaattaagattaattatctgtgtcattttgagaagatttatatctatacatatatatatattagagcactatatatgcatgcattcaagtaagcagggtttttgtactgctctatagctctagcttgatttctattgatatactgctgtagattggcgccatcgcatgtgttcctttatatatgttttgaaacaatatatgttaatttctttaattatatatgaaagctaagaggttaatttgtttctctacttgtactatatgtttgtactctcataatgttgcgtttgactggggaaggaagtgggaataggagtaattaaataattactagctagctatttttaacaaccctgttgaattgattaaaaatttcaaatctgccagtttaaatttaccagggaacaattagatggccaatgcaagctaattacaagctctagctagctactacgtgctactccttacgtgagccattactgttttgtttctcttgttctgtgatgcacaaaatagaaatccaacactcattgccatgcatgcaagaggttgatgtgtgttattctttggcagaacgcatgtacaaagggttttaattttaagccttatgcagtcttaaattttaaagggttatatattatcttataaaaagggttttttttttgtgtgttcaaatgtgtatgacactaacactagaaaaacatcgacctggtgtatgactggaaaaaaaatcatgtagtagaatatgtatgtgcgcccattttctttaattttgtaacatcaacctagctatttgtgaaactcgattctgcaactattggacagtacacattgttttcctgaatttgtatattttgttcaaaataataaattgaaaatggctataaactaattaagaacatttttatgataacagtgtccgagctatgatgcacaataaaaactgagatttctttctgaaatgtaacagatctgtgggtgcatgcatgcatgtatcttcatgcatgtaattgaaaaaaaataattaaccaaacatagttgagagtttcgtttgcaagtgttttctgcattgcaaatttttcaaataatgaaatctctatgctgtttgctctggatagctgaactcaactgtttttttttttactgga

SEQ ID NO: 41051 - DNA, 895 bp, Oryza sativa
tgactagactaaagtttcaagctaaggaattcgtcaggccaattttcttgttgtctcaatttcctttaaacagcactgaaaagccatccttttggacacatggacatagactgactgaactatgattaattcctgatgcggagtaattgagaaaatgattgaattagctagaagcactgataagtgctgagttcaccataattagaataaaaaaaatcttttaagggctgtcttttgcttattttcttgcttcgaccacaaggggaaaaaaagaagtctatctgttgtgaagtaatgtgtttcaattctttggaactttctttgtcaatatcaggacaaatatcctctttgacattgggcactaaaacagaatttttgtcaatgacagagttgttcaaatttactacagatctaagccactgtattactcagtagtttaatatcttgtacacatgaccacaagagtggtgccatatttagtctcagaaacctacagtcaagtcttaagccttaagtagtcaagtcttaagccttaagttattaccatggttgcaatcagtcatcagtggtagaacttgaaccacagacaggccagctttgcccagctaacaaactaacagacccatcgtttcgcttattcggggaataagcgaaacggcatatttacaaacgaaaaataatttgtaaataaaacttttatatacgtgttcttagcgatctaaaagcaaatgctgaaaaataaacttcgatgaaaaaaaaccccaaatcaactccaaatttaaggtcgaaaattcaaattttcaaaaagatgaatatataaatactatacacaatactttactctggattgaaaaagcattgcctggttgattaggtacaataactagcagcacaa

SEQ ID NO: 41052 - DNA, 786 bp, Oryza sativa
ataaaaaaggctctattcatgcatttgtcaaggacggtgcacacacattgattcattttctttggaactccaatcaagcattgttcttaactatttgcatcaaagaattacttgcttactcttccaaaataacaattgcgcgattctgtatttccgctgatcatatgtttgtcaactaggatggcctctgatggagagaccccctccatcaaattctttccctaccttccatcaattccttttcctatcttcatcctttgatgatactattaggcagttctttgaaattaaaatacttgctggacacatgaattctttgattttttggaatcattttggcagattagtgccgttcatcaaagaattgattgttaactcttacaaaaaaaagggctctattcatgcatttgtcaactaggacggcgcacatggagtggtgccctctccttcatcaatttcttttcttattatcatcattagataataagcatttctttgaaattatttatacttgttggaatcatgaattatttgccttttatgaagcattgtcatcaatgtaaataccttgcatcaaagaattgctttactcataaaaggttgctctgctaatgcatttctgaaactaggctgactcacatggagagatgtcctctatcagtttattttcatattatcacgctttgataataagtaattatttgaaattatttatagttgctgaccacatgaattcattcccttttatgaagcattattgtaaaatgcagtatcatgcatcaaaga

SEQ ID NO: 41053 - DNA, 756 bp, Oryza sativa
ctgcacccctattcatgcaactagcattgtcaataatgatttgatgctaatcgagcgatgataaatgcagaagtatctatgagcagatagcacagaccagcatctgattttagggcaacaacagaaaagacttcaacaccacgttttcgctagctttggtgtcacatcaatttgtggaaaaatatcaggcataccccttttacctagattttaccaaatgggcactactgtctaaaatgctccagtatcccaaggtcttattcaacaaatacatgacagagaaacatgtgcactgttggttcaaactttacactcagcacaacctgttcaacaaggatttccccctggagtattgccgaagagaatgatacgttaagctgtggttgctggcatggcatggcatgccgcctaagtcataaccagtagaatgccaattcattctgctggattccagcgctcatgccaattaattccgcccgatttcagtaaaatcctatctttttctgcactagaagccacacataatgaagaaagttcctgatttgaccacttcaacctacctcatcgtggaagtaccgatttttttgcactgcaagcaccttatcaacaaattcccgatctttcttcaccaaaagccctagcatgagcacccccaaacaaccaaactaaccatcgcatcctccccactaaacggatccaacctacacaagaaagccgaattcgcacccagacggagaaaagatcaagcaggggcac

SEQ ID NO: 41054 - DNA, 654 bp, Oryza sativa
tgtagaatatgccaaattgccaatgaagcatgcacgcaatagtttgatagccaccaggaaggacaaatgatcttcttaatttggaccccacatgagacactgcacaagcacagagaggaaggcagcaacgagagaaatatatatatttttcttctgaactggagatgatcaatttcttaatccatgcactgggttagcaaaagatcaggctttacacactgtcatgctgctctgctaatctctagctctgaagtgaaatagtaagaacatcgttgaagccatcacctgctgaagataattactccatgggtcatggatgacatcattaatagtttccaatggaaattacaagccactatggactcctttttttataataagaatgactaattgtcacctgtgctattatggctcatgttcagtagtgctgctgcaagtaggatcaccgaagaagttaagattgacagtgaaagtcaaatccaaacttgagagctagttgtgcttaatttcagaacccctgaaattcacccccatgtagtatcctgataattgcattgtctcatccctgaaatgaaactcgatcgatcgatcgatcatcagctgatcgatcgactgtgtatccaaactgaagaaccaatttagtacagtaacctc

SEQ ID NO: 41055 - DNA, 953 bp, Oryza sativa
ccgtcgccgtaggctgcacagcagcaagaggctatgtaccgatgcagatttgttggttcgttcgttcacgttcgctacgacacgatcgtactatacgtgtcgtggtgacgtagtaggtaggggtgatctctttgtttttccgtacaccaactctactgtttgatgatggtatcgacgttgactagtcgaccgatgccatccgtcggcgatggacttttcgggaatcgtgacatctgtcacgtgctgatgcgctgatggggccatcttacacaggcagccctcgacgcttagggccatcttccttgaagaggttagaaacgtattaggcctgaaaaggggcccgagtacagcgctgcaagagaaaagaaggtagcagcaacagcatttcggccctgtttcgctatttgaaatgcatgattttttttattttatttttgtgaggattgaaatgcaggattttttttactttggtcaaacattgacatcatactgtatctcacacgttttctttgagtaattgtctatatgattcacatattctagaactgcactatagtaaaaggggtattttttaagagaaacagtaaaggagtaataagaaggtcctttagaaatttatggattgtccactggaggttttcactgatcttttctggaactagccaggttcccttggcttgtaattctgcatccaatgtttttggagagcacgcaaagtagtgttgatctctgtgaaaaccagtttcttttgacatccttaagaggaatgcgacaaatgctaactcaatgttcggttgcaaaaccaaaagaaagcaagaaatggtaagaaaatgttcagttacaacggcctattcagaatgcgagtcttaagggcctcaaacaaaattgctctctatttcacctgaaatacaaaaatggactgtgacctgatgcatgttgcaagcacagttcag

SEQ ID NO: 41056 - DNA, 1196 bp, Oryza sativa
cctcgaacagcatctactgcttgagacgtcaaatcgaatctactcctatgtatgtatatggccgtatccgtatgagcagaagtattagaagcttaggaataaaagcagtagcaatacctgttctgttcctaatccagacgaccagcattagcaaagtcgaaaaaaatccttatccccaggtttcatgttcttggcaaaccaccgaagttgatcaattcctggttgcttcgagacaaacccatgtggagcaaaatagcaagttagttcatggtttgtccgtacgtttttcagcaaccaaacttgaaacaaaaatccgtcatgctttattataaaactatttatgatcataaagtacagatagactaacaaggcaagtgaacgggtaaaaaaaaaacttttagagtgttggcaccggtgtcattagcttcaagaaaaatgatttacttctagatgcttttttttccaagcctatttataaaattagtttttaaaaggctaaaatacagagacatacacatatatatccaatcacctttaaaaggatcattcctcaatgatcatcttgatcttggattctcgatgggaaatcctctaagcacctcggtgactgaacccataggttggccactgggtgttggctaaagccaaccacaagagttgtgatgaatagtggagacagtcggggctcttcgtagagggagggggatggggttctgcaactgaactgatagaacaataatagatcacccacaaatcactttgctttgagctatgggactgtctactggtagaaaaaaatccgtcatgctttattacaaaactatttatgatcatgaagtacagatagactaataaggcaagtgaacgggtaaaaaaaactttcagagtgttggcaccggtgtcattagcgtcaagaaaaatgatttacttctagatgcttttttgcccgaagcctatttataaaattagtttttaaaaggctaaaacacagagacatacacatatatatccaatcacctttaaaaggctcaatgatcatcttaatcttggattctcgacgggaaaccctctaagcacctcggtggctgaacccataggtttgccgctgggtgttggctaaagccaaccacacaagagttatgatgaatagtggagacagtcgggactcttcgtagagggagggggatggggttccg

SEQ ID NO: 41057 - DNA, 615 bp, Oryza sativa
acacaccgggtacccaaggagaggcctttgggccgtacgacataggtgggcaaagagccgtaggcacatgcggcatacttgtaaataaagaaagagaaatttccagaataagatataaatctgggggatcatacatatctttatagatagaatagggagatctagttacaatcaactagatactttacttgtaacccccctcatcctatataagagggggcaggggtcccgagagggggaggtcggattatctccacaacctaggcatacatcatctccactccataccggacatagatccgatacacatacaactggattagggtattacctcacatcaagacagttggatcatcgagacaactggatttgggtattacctcacatcaagacagttggatcatcgagacaactggatttgggtattacctcacatcgagacaactggattagggtattacctcacatcgagacaactggattagggtattacctcacatcgaggacctgaaccaatataaagctttcatcgagtcatggtgctcgatcgagtagtagaaataaatcgtcatatgtagtagggattatgtgttaggataacagtagcttatcatg

SEQ ID NO: 41058 - DNA, 654 bp, Oryza sativa
tcttgaaaattttccaatgccacacgccgcacccctagacgcaactgcgatgcacgatggaggagtggagcacgggacgtcgccacattttctttgagtaatgtctatatgatccacatattctagaactgcactatagtaacaggggtattttttaagagaaacagtaaaggagtaataagaaggtccttaagaatcactgtaattctgcatccaaatgttatggagaacacgcaaaggagtgtcggtctctgtcaaaatcagtttcgtttaacatcctttagaggaatgcaacaaatgctaactcaatgttcggttgcaaaatcaaaagaaagaaagaagtggtaagacaagaacagagcaagaaatgctaagacaatatttgttggaattaatagatgggctttagcccactcaaagattaattctttgagtaatcacaaaagcccaactcataggatagcatgtatggggagtttagtaccaccttacttattctaggagaggaggacctccttaaaagggaggatgccctcctagccacttgaatcatgtgtggtggaaagaagagaggaaacacgcgtgtgcacgacgatgccagcctccttttgcagggagacctatctctatataaactgagccaacgccttcacg

SEQ ID NO: 41059 - DNA, 1735 bp, Oryza sativa
caggatgcgatcatatccggatcaccttttatacctatacctatatagagagctagatttaacctagctcgcacgaccaagcacgtgtacgcactacgcactctctaccgtgagttaattcgcgcgcgtgcattaactggagtctggaaatggtctctgctggcctggccggccggatcgacccgggcggccccgcgtcgcatcatgtaacaactctcacaagtcgctcgtatccccacccgccaaccatgtcttgtccctcacgtgcgcgcgagcacgtacatgtgagaaaataccatgtcctccgctccgattccccagcgcgcgcccctcgcccggccgaaaccaatggccgaattctggtgggcgtggcgtgcggtgcagcgccgcaggggtcgtcgtcggatgggagagtgttcggaaaaaaaggcgaaaaggcgcggacgcagcgtatcctgccgcgatcctgtgcaatcgaggatgtggatggacacaagcgacggtttgctgtttgcattgatctctctcccgttgttcttgccgttaggtggcgcctagcgagctacggttggagctagctagccatccacgcaagcagcctagtatgagatatacggagcatgtgtgtgcgcaagcctgcaaggccatccagccgcagccatgccttttgttgacacactgaaaccgagatgttgaccatcagctgctgttattactactagcacactgctagttgcacatctttctcctttttagctgaagatttggtgcagctcgtactttggtaaaatgccttcctgatcccgcagaaagcgagcggattcggggtaaagctcgatgctgctgtagattctccccatctgcatgctctaacgaaaggttggtcaagatacggaaacgggagaggatctggatttcttttggttaactacctgatctcatctccctaaaaaagctagttagcgactctaagattggattatagtacgtacatttgggccttccctcgagttaacacgcctaaagaactcatctagaaagttcatcgcacatggcagcaccaggacggggagccggccgggcggcgtacatacgtcgccttagatcccatttgccaatttggatcatatcgatcaaagtgaactaacccagccagaatgcaagaggagaagtgagatcttgttatctctgaacctcttgtcgttggttcagtatgatataaattcaggccgatcactcgatccccgatttgtttcccttttttcttttgcgattggagtacggatctagttgggcgtggctagctgcctgcctggcttagctgtaattccgaattctgcaccggccatcatatgctggggcgggcgagtcaggcgcgaccgcgcgagatgtgcatgagtcgtggcgcgtcacgggagttgtttattcagggggggcggccgtgttgtgctcctgcgtcactcagctttttctctctcctatcctcctcggtctccccccctttcccactttgtcagttcgtcactccaccaccgcctctctctccccgcctctcgcctataaataccgcccccctcgcctcgccaccaacactcacctcaccatcatctcttctcctcgtgctcgtcactcgcgagcaaatacatcgccatctctcctcctcctccttgtcgtcatagtgcacgcaaagaaacacggtttgcaatggcgtggtgcttggtgttcatggtgttct

SEQ ID NO: 41060 - DNA, 654 bp, Oryza sativa
tgtattgcctacaggataagatgccgctgtggtttcctaaacactcctcacagctgtcaagattcaagtcagaatttcagaaaacatgtactccacatcagaagctatggaaggtccccaacccaaggctcaggcagaaactgcgagaagccatcactgataaggtcattactggatacaaaaggtacctggaggaccatccggagctggagaaatgcagcagtgatctacaggacatggaagacatggtcaacgagctatttgaaggatgaataaggattattccagttttagactgacatggccatgcgtatatggagtgtaaactttaaatcagctacgacgagaagagacaaacaagttcacacttgatgccttttttattgtattttgatgttctatcctcattctacttttttctaggaaatcctcattctaccttactaggaataaaatgtatcaatataaaaaaagaataaaatgtatcgacagtttaatacaagcttcttcctgtattattatctcctcagctctttaaaatttacagtggctttataatataagtgtacgtactttacactgtaaaaatgatttgactattttttagtaaacaaagtggcttcgtaaatattgtattcccttcggttttgctct

SEQ ID NO: 41061 - DNA, 660 bp, Oryza sativa
attcctgcagcccgcctctcaggaagtggctctatcagcataaaaattatcatgcaatattccatcccactcaagttaaagaatttagagtctagccaagtgtaatacatgtcccggtgctcattaaccgcgactcggctattcgaatagatttggtttactcacactgcagtggatgtacactttacccgcactccgcgactgcccaacacatgagcctcatcccaacacatgagacgcgtcacggcaaagctttttgataaccttgcattggcagtacccgctccatgaactttacatcctcatgcactctaggcgtcatacgtttctagcagtgagaggagttctggcgctcccgggaagggaaaaacacacactcctacgttgcttcttgtcgttgaacccagtccatcatgattgttctcttatgggtatcctcatgtagtattgccaagccagcctctgaccatccggaacgggcatccgccattcacctggccatccgaaccgggcatctgccagcagactgctgccacatcacacacctaaaagaagaccactacgcatggatactgcctccgctcagctatctactccgctaggtctatacccatacgagaagtgcggttgtacggggggtcgtttcatgcttaacttcat

SEQ ID NO: 41062 - DNA, 590 bp, Oryza sativa
cagtattcatgtacacttaggatcgatgaataagctagctaccttgatgttttattccttcttatgaatcttcttttttatgcgatggccatgaatcaagtgattaacaattcaataaacttggaactctgatactctacacacacgttcaaattactcccttctggacaggcatggacaaaacatgacgaaactctgctatgttgttcccaacgtgatatccccttgtttatcaccacactagtacactgcagcacacatattctttccagtggaacattaaccaaaccttgtacaagtacggagtacgaccgatcgaccggctccgttgtcctcttaatatatatccaaagcagcattccaattttttccaagcatatactcctactactcgcatcgcatgcactggtcttctctgcccttcaaccacgttaacgttttggtcctcgtgggcacacggaacacgtgacctaattagcacgctagctctacctactacctctacctgcctaatgcacgtgctaattaaaaagaccaaaaaggggagtggtacgtacattgctttctgtccatcaggttttgcatgtcaa

SEQ ID NO: 41063 - DNA, 536 bp, Oryza sativa
tattgtgcactgcaaaatcaatcaaacacaaacatagcttcagtatattcaattggaacgagaagatcaaaataatttatattgttacattctactacttcccaccatgcagctgatgttacataccaactcattaagaggaattttacagtccaacaggaggaggtaccaaatcctatttgtccattgagcatgatccgacggctgataaacgttggtaccgcaaggtaccgtaatcccgtttggcggtacctcccctgggtccgcgttgtggaagggcaaataagaaacttcgcatcatacatctatttgcgctgaggcatgagggctgaagctcttcctcctcccgatccactaacccgaaggtgcctcctctgcatgagatttactcccatccagccaagggaggcggtactaaatcctagccatcaattgggacaaatcaaacgattgagatttctcgataccatgcggtaccattttagcccatatggtggtaccgtcttttgaagagaggtggaagggtagtatagact

SEQ ID NO: 41064 - DNA, 763 bp, Oryza sativa
attcctgcagccctgcacgataactatctatttcttggactgcatgaagtagatatataagttatcgtggataaaaagttgacaggcctaccaggaagcttatgaacgaaaatcaaacctatttgatttttttacctgatggaatgattaataatccatatcgacttatacgattaactcatattactttcaactggatataattatcgataacatagtaccaagtaatgaatgaatcaattggagatgaaaagtgtatggctagtttcatcttaattaccttgtcaacgaagatggataatcaaaacaaaatattaataaatctacaaaatgaaggacgaatcaactaaagttatactcccaccttcgaaaaaaaggtccaatccaagggatgtatctgtacatacacattgaccaaatacatccccagaactgtttttttttacagaggagtataacacaacttaaaaagcaatcgaatgtacagtgggtctcataattcacaaagaaaaagaccagaaataaaaatgagtgcacaaaaaaattatagaccagatgggagcatattattagaaaaaatatattagtgatataaccaaatactatgacgaatatactgcaattacatcaaggtgaatgtcgaaacaagattttggcaatactaaaagggggtggctatcaagctggaaaagtggatgggttaagagacaaggaattttatacaggttcaggccttcttaatcaagaagtaataccctactcc

SEQ ID NO: 41065 - DNA, 1132 bp, Oryza sativa
ttttttttattgttttcttatgaaactcccagacgtcaggtttttatacagaatctagcttttgggtcactaccatttcgcccctcagatacaccctctgttaaaaataatctaacttctgtttgtgtttcttaataagtaaagctttactaaattcagctcattacgttaaggtgatacaagtgtatcgagaacactctcagtctctgtacaacaaagatacacatagccaaatgaacattctcaaatttacataaattggagtacaagaagtattactggccattcattttaagagtacctccaacaagctctctatatgcccctccaagcataaaacttagcaactcggaaaaatcagtcctccaacagactggccaaccagattaccaagccatccggctagctaatattggatagtcggtatccctgacccagcctcgtcaagtgtgggtccacgccatctctctcctcaacccccttgccataacttgctagcaacacttgatatgcagctggctatcgtcgttgccgtctcaaggctattgctggaggtagcaagttggctgccatactgtaggcttggcagtgacgccctatagctcaacgccctggatttggtggccctcctttgcttccccttggcatcgacgagcaacaggccacccatctatgctatcgccgaccctagccatgctccagcaccgtcgcaccgtgggattggtggcagcgtcctgcagctcggcaccctagatttggtgggcctcctcctcctctcctcaggcctctatgttgacaagtagcatgttgtccctcctaagtcgttgcttgcgctagctgtgctcaagtgctatcgcactgcgggattggcggcctggatctagtggcccttctccgcctcccctcggtgtcgaagagcagcagaccgcccttcttgtaccgtcgattgcccgagcatcattgccttgctgctcggcggtgacgacgcggtttggatctggtggctgaggccattccctatgagattggcagtggatccctactcggtggagcaaagggacgagctcgccttcactatcatgagcgtcaacaatggtggatagagtgattgttgaagcatagaacaaatatg

SEQ ID NO: 41066 - DNA, 559 bp, Oryza sativa
aatcttgccggccaccaggggggtttttgacccaataaaatttttttcaaatggtcttgatggacccccagaatattcaagaacggttatggaaaaaaaatggtaaaattaaatggtattttcaattccttaatggtccccattccttaccccttccttttacttaaggggtccaaaagaaggtcttccttttaaatggattaaaatgccttggttactggagtttgggaattccaattgggaaagccccttttttccaaaccaaaaacctgttgttttaaaatgcactattgttgaatgggtcttcttattggattggtggaaatattcttggccctaagggattggatcttacgccaccttagtaaagcctgttatgccaaatttaatccaagtgatgttttgatgggccacttcaaacttggtttggtggtggtaacacctcaaattcacatcgtcttctatacttgatgaagctctaatgcagtgcttattatgctaccatttaccttctatttacattggttacttgtgtcaagccggctatgtccatggtgac

SEQ ID NO: 41067 - DNA, 578 bp, Oryza sativa
acatgcgtggttggcgtctgctccttcgacgatgtcttcactggagcacatgagtattcggagtcgacgtacgccgcgtctttgtagaccatgggacagagccacaacttcaaccacgactacaacgacatgttgtcccaagaaaaacttgttacaaaggtctagataagtagaatacaacacctatcctttgcgccaatgcgatgccggttgttaagcacatagaaaaacttgagctaaccaagcatgcacaaacctaacgtctccccaagcagtaggagctaccagctgtttgtctccttctcggtcgtaataaccagatgggttctactcttctggtcatagtcgtcacaatctggtatggccgggttcatccatctcgctggtgcatgtcatgcatgggcatgtggtttaggaggaaatagttggccacctctcgaaacttggccataatattgtagatgaacacttgttcatgtcgtgtgcctgtgctgaacctcaccttcgagtgtggtgatgccacaatgagaaagctcgatgagagagtgatgtatggctgcttttttggtagcccaagg

SEQ ID NO: 41068 - DNA, 567 bp, Oryza sativa
ttatcctcgagattgacaaagtctacattgagtcataggctttgcaatatgtaaagacacggcgaggacactttaaaggaagtgagtgattgatagcgaaaatatattctatatcctcggcaactaagttgtaaatggcttactagattgttatatttaactagaaaggaagcccgcgcagatgcgcgggcattttatttgttgttttatgaaaataatgattaaaaaaagtcacatttcactgtttctaccatatatatattaatatatttaaatgataaggatgtcttctaaattaaaaaaaacactttgttccggtttcatataaacttccctattgtcactacaatttattatcactttctaaagttgagtacctattaataaatgaaactgcatatgtacgaataaaataagtctaatatattattaatacactaaaaatatccactatacctaagtgtttttgtctcacttatttccaattccatataaaaacattctaaaaatccacttgtaccaattaataggatacatcttaaaattaaacataaatgcccctataaa

SEQ ID NO: 41069 - DNA, 665 bp, Oryza sativa
ttgctgggtgaatttggaccccaaaaagctgtaccttcaattgcatgcatgcaaatatatgcaattgcactgccatgcatttccactcacccagcccccctgtgactgagagaatctactgtatcctgagcctcactgtgcacactgttggtgtcactagcaggtgggcccatgccaacatgtcgtcctctgctggtacaagctactactacactgtacgtctgtactagctgtgtctgaccgtacatttaggaaatactcctacagaacgaaatacagtgatgtgggagtacgacgtagtattagtaataagatatgggggcaattgtgattttcacttccatttttcagggtttgtgattttgtcctccctttttaaaccgaagctatcttaacagtgctaattttagagttttttttatagtggaaagacatgtatagtcttacatattattgcaaatttgcatgtgcttttatacatcaattgtgtttttattcctatttttgtctttaaaattaatactgtgaagatgacttagcaattaaggataaattgaagtttcggttaaaaagatgagggcaaaatcacaagcctaaagaaagaagaggtaaagttacaattacaattaaaccaaagtatggcacaattgtcccggggctgcagg

SEQ ID NO: 41070 - DNA, 879 bp, Oryza sativa
tcgggcgtgatctccgcctctcaagggtgaggccccgtcatcgtggagacacttctcgagctattaagggacagttcagattaatgtcatttttttaagtaaagtggctaaaaaaatatttacatttagggtccctttgaatcacaagaatagaaaaacagaggaatagaaaatacgtaggattttgacaggaatataagtgtaaaacagatgattagaaaatacaggaaaaacacaagaatgaccgtttaattggaccacagaaaaaacacagtaatcggatgaaagagatagactcaaatgaatttttccaagagtttgaacctcttgctaacttttctccaaaatctctataggattacttattacataggaattttagaggatagaataggattcaatcaattatttcaaaagcttccatagaaatattttccataggattaaaatcctccaaatctcgtatacttttcctacaaatcaaaagggcccttagattgataccaaactttgataaatacatataaaatcctgtcaaaattttggtaatattaacacagtttagtaaggcttattttggctaaaatctaaacagctcctaaattggataatgtaatccgttttttaaagaaaattttctttatcaaacatttattaatttttttttaaaaaatactagtattatactttctaaacttactttcacccgtcaatctatcatccatgagtccgaatatattatttcccaacttctatttatttgtttttcacacttatgcttcccgaactgataaactgtatttttaaaaaaatatatatatatggaaagattgcttcagaaaattgtattactctattttaaaagttatgatacttaaa

SEQ ID NO: 41071 - DNA, 1329 bp, Oryza sativa
cagaggctgacggcggcggcgaccaggcggtcggccaccaggtgcggcggggcagcggggccgggcggcgcagacggcgcaggcgcggcagggcagcggccacgcgggcgcgcgcacgcgaggcaggagggctcggctcggcgcggctcacgcgcacgcgcgcgcgacgggcgggcagagcggagaagagggagagagagagagagagagagagagagagacccggggagggagggggagatgggccgagagagattcggcccatcgaacccggggaggcaaaatagacttttgcggaggaattgatttgggaaggatttggattcgggattgaactcggcgatagatcggggatttgagatctgagatggcacggacactagacaacaagcaaagaaacagatttcgcaaatagagtttttaagagatagttttcccgctaggcgccacgacggaacgggcgctaaaaactgtacgatatactattacagatgatcgtaaaaaatggctattgcatttggggaatgccccggatcggtcgctcgggggagggagaaatatcgggcgctccctcctccacgacgcgcgctctctgtccctgagcctcaccacgtctctgctctcacctgccacttatttgcaacatatactccattgtaacaaattaattatccacatattttagaaaccctctattaagggaatttggtttatttttttttccaaaaaaatgtttcatctagtgcactcacaatgtttcactatatatagatctaatgttgcagtgaactgaaatactctattgcaacaaatcacctacatattttggaaaccctctattatgggaattcgtttcattttttgttccataaaaaatgtttcacctagtgtactcacaatgtttcactatgcatagatctaacgttatagtgaactgaaacattctttcgctatttgctgaaacattgtttttatataaggtgaaacaacacccgatttaaacgagtgaaacattttcgatctacttagtgaaacaattccgatatacctgatggaacatcgtgcaacatttaaaaataattcaataataagctattttttcgtcggaatatatccatgtgtggtcttgttttgaaattttaattgtaatgaatttaatagtgcgatcggatcataatttgggtaagtaatttaagagaaaaatcaatttaaagtggttttgcaaggatacgtgacgctgatgtcatgctgaaatcagctcccgattttaaaaaccctccatcaggcgcccgagccggagtcatttctattgcatttgtgaagtgttga

SEQ ID NO: 41072 - DNA, 1646 bp, Oryza sativa
  unsure (1)..(1646): unsure at all n locations
tgcacccccttagctgaaatataaatatatcatttgattgatatttaggataatgaacaactagcagattatgccgtgcaaatttacacggactagacagcatctccagcagagcccctaaactaattaacccctaaatagtttttggggtgaaaggagaaaaattgagatccacaggacggcaggaccgctattaaagcccctaaaatagaaaggcaccgaaatctctgtccatagccctcaatcctagaggctctacacccaaccccatctctttttctttttggtgcgtgtgaaaattccctagcgcgcgcttctcccgttgttctcgcgctctcactgtgttgctaccctcttttcttttgtcgtgccgccggctattatctgatcaccatcttgctaggatagtccaacgttgccctgtccgatgtcgttcgtcaacctacgtgatctccacactgacacgtcgcaggtcgttgacctcatgcgtagcaactctagcaatgtctcgcgctagtagtcggttgtccggattgaaccattcatgtttgtagtatatgttattttaaaaaaatcatataattcttgtgaacttgcatacgtgtgtgattgtgaaaattgaattttattatgcattttgcaatgttgaaaattttgaatttaaatttgaattatggtattcaaaattataaatttgaatacggttgaattctacgtgtttgaattattctggtgttaaactagacataaatataatgtgcgtactaaaacacacacacacagagatggagcctaagaaatggggtttgtagctgaagatgggggcaacccccattagacctttagaggctttacaatagggggctaggggctgttgctggaaatgctaattggacttattgtacaacactatttaacttttgattccataaatataattatatttaatctatcttgtcaactcttaacttttaattctataaatttaattgcaatttatatacagtcgaaacgtggctacgaaccacggtgtcgggggttcgaatccctcatcgcccacagccttccaaagggttcacattctttggctctacctatctattatagagtaaatagctcttttcacaataagagttatccatacagtgacagcgtttaattatgaaagttggcctttcgtggttcaaaaacgcggaatctcgtctcaatcatcatttgtcaggacttttcgggggtaagttctttggcttggacaggaccccagtagtcctagccgtaaacgatggatactaggtgttgtgcgactcgacccgtgcagtgttgtnnnnnnnnnnnnnnnnnnnnnnnnnnnnnnnnnnnnnnnnnnnaatgaaacggctcattcttcaacaggcacgcggtcagagatcactttcccctcccactgcttgggagctcagcactgtttcacgttctatttcactaccccctaggggttcttttcaaaatctgtacgattttaccaatctaaattgagcaggtttccatgaagaagatcttgttcaacatgttctattcgatactggtaggagaagaacccgactcggtattcttaaaaaaagctcctcggtggaggagtagaagcgttggtccccttcggtcaagtg

SEQ ID NO: 41073 - DNA, 1104 bp, Oryza sativa
ttcctgcagcccaatcaggctcagggcatcaagccacagtgcagtagcatcaccgtacaatctcacaccccgaattcagtggtggaggcgtggagctgaaagatttttttttagctcgagcaaacttcaatattttctatagaaattttatcatcaatttactcatcaatactaaatttaattggagtttttgccgatgagaccgggcagccaccgcctgcatccctggtgaaagagggatcgatcctgccatatcgcagctctgttcatggtgcagagaagacaaacattttcttttcggcacgtcaggcatgggaacgacgctttcgtccttgctcgactcctcgcgacgtctcttggtagagccaaaaatgccaaacagccagccactcgcgtagtcgcgttcgcgtacgggggaccggacggacgggtggagcaacacgggtgccatgtcaaaggcgagagacttcgccgcgtgggcgcatcaacggaaaagagccggtgaacctggccgcgttcccgccgctgcatgccgccgaagccgtcccttcccttgccggcgcctgttgcggtctcgctgcttttttcgtctttacgcatcgtctccgcacgcaccaaagctgggcaaatttgctgctcggcagcgggcgggccatcccgttgatccgcccgggaacccggcgtttctgttctgttcggctccgcgcggcgcgcgtcgccactcgcctgattttcagttcattgaagtcttcggtcttgtgtaatgctaaagtggacatgctccgtgccttcgtgacgttgcactgcctgacgggtcgatgagcagcttaagtgcatgaacggaagaacggaatttgcagccacggaagtaggatcttttgcagtgtggagttgggtagtatagtaccttggtactgtcaatagtttgagtactagttgtagtacaattcgacctttgatgctgtttaggagtagtgcaacaacctagaatactactgtatatgtgaggccccaacggagacaggagttacagtaggcattgctggtatggtattggtcaatggaccgacgggccaaaacacgtgtatcaggggctgcaggaat

SEQ ID NO: 41074 - DNA, 651 bp, Oryza sativa
actgctagatagcattccaaatgaaaacataactttgcattctttttggtgttaggactaatattacttcagcatcacaaatgcacacacaaatacacaacaagctagaaaatgcaagtacagaacacaggagatcacaagatacaacagatccataaacaaattcattgtgttatttacatcatactgatgcattgcatggatatgttcctgacaaaatatgctttggtgaattcacttcctgaattggaattttatttagtattttatagtcatttcatagtaacacttcaattgtcagttatcttgtgcaattgtttttgtactgctgaagattgatgtatctatttctatttatgtttgttaacagaaggaaattgagggcaggaaactactccaggctcatttggaaaagaaggcagcagctgagtcagcaactggttcatcctcatcactctcatccaattctttagaagagactccagaggttctgaagagcccagatcaatcttcagtaactatctctgatgctgatattaatgcatcaccttcaaagtttggtgccagtaaagaagtcactccagtaacaccaaccaccatcctaagcactgagcctgtgcctactgttgcttccaccctgagtaaagatga

SEQ ID NO: 41075 - DNA, 611 bp, Oryza sativa
tgtgttggcgatgtcggcgtgtgggtggtggtatatttttttcttttttctggttacgactctccagagttataatcttgtaattttttcctactctatcaataaaacttcgcaccgttcgtacgagtcgttaaaaaaaaaagtgccaccgatggatcatggatcgtatataggaaatctgcttcattccacaccgaagattggtagggttacgcgccactgactacgtggaccacgtcacatggacagtgtcagttcgggaagaaattttgtcgagacaaactggccaatttggctatcaaaacgagaagaaacgttgttacttgccagctccgcgactctcatctcatgtgcccgggcacaaaagctttgtatacatcatcatcaccatcgccatctctccaatgtaagaatggcgagcgtgtcaaatcgaggcacattttatgtgtgaagccggtttctagtgcattgctgatagccaacccgacgtatacatgctttgatttggatttggacgacgtaaagttctattcgttcgcaagacacgttgtaatattaacaactatgtttattgagaatattttacctttcctcaatcttatgggtgggtt

SEQ ID NO: 41076 - DNA, 937 bp, Oryza sativa
attaaaaaagaaaattgttggccactgtatagcgtggagcattgtaaatgctgttagagcaagtttaataatagagccaagtatgagcttatagcttatattaggttaacatatatagtagatcagccataaggttatctctatttttctcctcctctctctatctctcacctttgcatttaatgtatttatcttgaagtatgtgaatggctagctcttgtataagagtcaaccctctttattttttaaattatctttcttccatataaatttatagtcggtttacagcctactattaaacttgctcttaatcgtcttcacggctgcatgagcgtgtgaggccgtgctagcaccggcgccagattagtcgcccacttttctctcccttctcaattttttcccatccatataagaataagatgatatgtcgtattttggagcatgcatgctgaatcagtttattgtatccgctctaagtaattttcatggtgtgattcgtgcacaggggcggatccagcatgggggcagtggtgtctcgagcctcactacaggtgtgaagactatgagaacctccacgaagaccccactaaatttttttaccatacgtagatgggttggtggactataactttatatagtttgctcagatcatactgctatttttttctggatccgctgttgttcgtgcagtaggtgcgggcatgtgtccaccaagtcggacatgttctgcttcgggccttcggggtcattgtgctcatgcgaagaccgatgccgccaacccccatcacggtccaaaattgctgagctacgtaagcacacgcctgacaaaaatcaagcagcaccagtagatactagtaccctgtagatgaaacacgcctcactacacgctgttacaaactgcacacctatagatggccatatggccgggctgcaggaa

SEQ ID NO: 41077 - DNA, 2731 bp, Oryza sativa
ccgatctgcgatcgcggcagccaggcaggcaggagcagagggcaaaaagagagagagaggagacggaaaaggttggcatgcgccgaccaaactcgccacgcctgagctatattattcccacccgccggaacgagccaaaaacgaagggaagggagacaaagagaggaagcaagtggagtgggggcggcggcggcggcgggggtgcgacgcctcgccggggcggggccggcgggcggctcaaccgaaagtcggctacgcgggccggcccgggacagcgacgccaccccggtcagccagccgaaaggtagtatggttggctggctcttccttctcgtctcctcgtaatactgtacaacatttgtattttggaacacgaaatttgtttagcccttgtttagttataaactttttcttcaaacttctaacttttctatcacattaaaactttcctacacacacaaactttcaacttttccattacatcgtttcaatttcaaccaaactaaacacaccctattcacgggagatgtgatgactactactccatcattttgtttatttgagaaataagctaaacaatatatttgtaaaggaatacttactatgtcaatataagagattttaatattttgcttacactgtttaaccattcgtcttattaaaaaaattagaattattatttttttgacttattttattatccaaagtacttttagcacaacttttcgttttttatatttgcacaaattttttgaataagacgaattgtcaaacagtgcaagcaaaatgtcaaaatcccttatattaggggacggagggagtaataatttgtaaataaaacttttaaatacgtgttttaacgatctaaaagcaaatgctaaaaaataaactacgatggaaaaaccttaaatcaatgaaattttaaatttcggctgataagtataagagtcaatccattttatgccatcgacaaagcgcgggtctacagtatgccactgacaaaactcagttctacaatataccatcgaatgactcattttcttccttatatgcaatcgacgttagtcaaccgttagtcaaccgccgttaaaagatgaaaaatgaccattttacccctagcataaaattgagattttgcataatgccatatcgcggtaaaaaatcttggatgataaaaagacaagcaatttctatttttcatcaatgagaataaatagtggatcatgatcagtgaaatcgatgaggatgcatcgtaccctaggggtaaaacagatattttcttgctcttaacggaatttgactaactgttgaccgccggcgatggtatgtaaggaagaaaagtagttattcgatggtatattatagaactgagctttgtcaatggtatattgttgaatccatgctttgtcaatggcatagaatggattatctttataaacataagcgaaaagataacatcgcacgagtttaaggttatgtgtatttttaattgtttggtgcaatttttttaattgaatcgcacgaatttcatgtgctccgaagagtgaatcgcgtgttaatatggtttgactgtactggtctcaacgtacctccggatgtagtcaacaatgatgtagattgttgtgctgccggtcgttgctcgcagactatggagttaatcaaatagtaaatcagctcatattacctttttttgcaaattagtttaggccgttttctatcgtacagtgtcctgtttcaaacagtataatacttgttggatactggatatggtattctatcagtatgaactaatatatattagtactagttgatatatatcagtatatataaggctgatacccgttgatgacatttgatatccatcggcatcggttggtgaaggttttattgtgagcgtgggacgcgtattgttgccgctcaggtgatgtatatgcatggtgcatttccctgcgattggttgcaagtggagggtgttaggcagttggctctcgatagtagcacctaatgagcaaccaaacctttctagttaatatattatgaactttcattatttttcaaaccttttaaaattgtaattttacgaataaacttttcctaactaaattttaaactctaaacattttgatcacgtcacatcgccttgtgtggcaaaataaaattgtcataccccccgctagactggtgtgacgaaacaatactcacttttggcagactggcgtggtcggccaaataaaacactggcacaccagtcagttcgacatggtctttttttgtcacggttgacgtggtcaaaatgttcatattcgaaaacaagttttgggagaatttattaataaagttaaaaatttaaatggttcagaaaaataaaaaagttccttagagttccaagtttagtatacgcatagactcatgtaagcatgataattgttgatatggaaaaatatcacctgatgcttcatacaattaaatattctagcacacatcatggtttcccaaaccaccgaggccggggttaccgcgcggtaaccgcggtaactgtggaaaactgtacgaaaccgtgcaaaatttatcaaaagttcaaattatttttaaacttatttaaatttaagaagggtaccatggtttttctattatcgtacccgcggtaagtccggtaaccacggtaaccgcgcggttaccgacggtaccataaaccttgtaacacatgcatatatgcatgaaacgtggtgaa

SEQ ID NO: 41078 - DNA, 653 bp, Oryza sativa
atttgaatttccatgttctggatttgggatttatcgtcacatacctcgtggacgccatgtcattcacacatatttctagtgaaagcacataaaaattataaatagagatagcgaccatcactgttgtcatagtagacagtggtacctaaaataagaggttagaatataccacggtcacgataagaccattcacggtgtcgtgtgctgtcgtttggcccgggcggtccacgtatgcgaacggtggaaaatcgccgccacgtttctcgttgggcccacaagacacaagcgcgcgtgaccaaagttaggcacccgtgctttggctggattgagaatcggtggcatggggataggaggttgaggtgcactgggaaggccgtggcttcgccgcgccgttcctcccggcgcgatttccccctcgatccccaaattgccctcctggtcgtcctcgcgtacgcgtgatactcgctctccgtgctcgcccttccctcccgcgcgagcgccgctctctttttcgcctcccacgctcttcgcctctcctcgctcgccgtggaagtagggcaaaaccgacgccgggagctgcagcaggcatagctgcggaggtcgtcgtcactgtggatcgacaccgggagcaagagctggcacagccgtggctg

SEQ ID NO: 41079 - DNA, 807 bp, Oryza sativa
gggacttcactaggtagcgcgccttgacgtgctgctggttgtagccgcgcctgttcgatgggaagcagcgaaactcccagtcgacttgaggcatagccgggaccggacaccaatagtggaactccggtttggccacaatgatgtgctccccttgggtgaggaaatggaaggctccatggtggtgcacgacgtccaccgcatcccattccctgcgcgggttcagtgggccgctgaacaagccagggaccaccggatcgaagatgcgccagaacgcaatcattggccggccttgtgggacgggaccgacgttgatgattccggcgaagacgcatcgtccgtcgacgtctggatagaatgagagggcggcggcgacgatggacaacggcaacagcgctccggtgtggtgctcgatgtgttggagttaatttatttctagaacataccagcctactctctaaccctctctactactcgtgaaactaaagtcaaggttgaagtccttgctctgtaaattttctagaacagtgtagtgtgtagacatgcatgatgtgattttacagtagtactagtaccagtgaagtttgacaatgtagtagtactacaagtctctagctaggtcctgaagcttcctacatgtcggtttatcaagcctataaatagaaagccagtgcatgtgtatagactgatgatggtgtgctgcccaacgtacaagcaagtgtactgttcagccctcaagcaagcaagtaaagaaaccagttaaaactagcacaagcttctctgctcctcttctctgatcccctgcttagg

SEQ ID NO: 41080 - DNA, 712 bp, Oryza sativa
aacattatagggtgtaaagttttgtgatgggataattgctagcgctgctgctccaacggcaccgaggacaaacggacggagagctccaccaaggcttgccgccggagataggccaggtgcatggtgaactggagcacgcagtcgtcgctcagcacgacggcgacgctctctcccagccctcgtgtgttccagcagcatctcggcatcgctcgcgccgagtcctgcaggcactgcacgcagtccgccggcgcgcggcccgccgcgcactgcgccagcacgcgacccgccagccccgtgttggcgccgtcgtcgaactcctgcgtcgccgctagcagcacaatgagtagctactgcctggtgttccggtcttgcctgcctgtagaaataatggcatatgagcgacagcatcagcgcgagcacgagcgacggaaatcagccagagccaggcctcggcacggcggcaagctgtgtcagcacgtagtcgtagggatacgactggcgctcgcggccccgactccatcgccgcgcgcccttcctacccggctagctccctgctcgtcccacgggcgtacttgcctgcctgcctggtgccggtaccccctagcctcctgtccggcgcaccgcgcacgcgcgacggccgcaacaggggagtcagggtctcagggattcggcgagttttgctgtgagtgctctcaaatattagcgagatgcc

SEQ ID NO: 41081 - DNA, 2598 bp, Oryza sativa
ctgtctagctatctcagttccagggtagcaccctctgctctataatcttgtagagatttcgtggcattaattatgtttcgagttgttaattagattttcaatccagccattattagtttgcgcaagtgcaaaccggcctgcaggctgcagctagaatctccagtttttaattaataaagtaaatatcaacataggccgaccaatccgtgctactggatttgcgcacagctgcacgtgtacgaccgacgaacgtgcgtcgtacttgcgagagtgtataccttcacatatgttcaaccatatagtaaactccatattgtagcatatctatttttacaagcaatatataacatcattgacttttatatatgttttatcattcgtcttatttaaatttttacaaatatatacaaatataggtaatgtttaaagaacatttcaatgataaattaagtaagaataaaataaataataattatattttatgtttaaagaacattttaatgtttacgtgcgtacgttcgtagtagtgagtgtacgtgcgttgtgagtgtctgcattgtactgtgtaattcttaaaaaaaataataatcatatttttttaataaaataatagtcaaacatattttaaaaataaacaatgtcgcactccctccgtcccataaaaagcaacatagtattaagatgtgacacattttaatacaacaaatctgaacatataggatgtgtcacgtcgtagtacgaagttgaatttttttggacggatggaatatattataaaaacggaaagagtacaatatatcttaggtgtagctatatttatggcgccatatttttcatcaaaaaatagtcggcatgtatttatattgtaagtccctaaattacatatgtaattttagtgtatttacaatgtaagtctcaaaattacatatgtaagtattaaaattatatatgaaaattcaaaaattacatactaattacatatgtatgtggggtataaatgaggtgtaactactgtgtaagtgactgaaaaaaaatcaactgtaacatatggcgccatatttctagcaactccgtatatctttagttttcgcataagaatacacgtatatggtcggtacaattatgcaactccgagggcaaagctagcgctgctgcatcacggcgcgttaggtcacgcaatgaactggataaccaaatctcatttttcatggcgtataatttccaaaatctcgatgaaagtgactggagtactatatgctagtagcaagtagtacgtatattaatttattttctatactagtacagctagctagggtgtggtgcagtgttagcaacatttcttgccgacatgtacacacttgaactcctatggctatggcgttcatttgagtatctttctgcatgcagctgtgtaaacattatctgtaattgttgcgtacgccaataagattagtttgtgctattattctctacaatcatctctgactaatctgtcaatttttctactgtgctactgcgaggaattaatgcacggaatgatcatcgtgttttcttacgacatattgctggtggcggggtgatcgtcctcacatcctgtgttgatagatttggctgatcagatcgactagtcgtttccaaatactcttttactaattggtacagttaatcgttaacatcgtcgtgcaggaaccccacacatacatacatacacacacatatatatatatattttttacctcgtttttcatatatagcaccattgatattttaacaaacatttaactattcatcttattaaaaattaaatatagaaaactaagttataattaaaaattttgatgattaattaagtcacaataaaataaatgataatcaacggcccctactaaaaatgacttttttgaatgggcaccccaatagtttacggacggatcataagtgttcgtgtatgtaaaaatcgaccctcatttttccatacagctccttaagatattcgtatgaaaaatatttttttcgaacagaccacttaaaatatccgcacatgaaaataagggtattttcacatgcgggactcttatctcacccgattgcaaaaaatacccctagaagtttcccactcctttttttattcttcactctctcattctctcccccccctcacccccactccactcctctcctctcccgctctctctccccatccggcggcggcgggcaacgatgatggtgagggcttcctcctccccccctcctcctctcccttctcctccatcccgacgttggtggagggttcgggcaacaggggagggaggaggaggggcgcgatggcgtggattcgacggcggccaccctccccccatgcaacggtggtggatcgacattggggaggcactggaatggcagattcggctctggctctagctccagcaacaggagcgggcagacccggctgcccctagccggcttcgaccaacgacggcgacgacgaggagggcggcggtttctagggttatgttttcgtgatttctagtttctttttttcggatttctatttttacgtgcagacgacataagcacccacacgcgaaaatcgtactt

SEQ ID NO: 41082 - DNA, 1592 bp, Oryza sativa
cccgtatatagtttggccgtgttctggccagataatattagtggcgcttttgaccagagatatgcacgcgtgatttctgacatgtatggagacgatctcagtcaggttaatctgaacttggattgtagctgtttgtttaatttgtagcggtccagttgattggaacgtactacttggttaagactaattaattaccatgtgttacaagcatgtgacttaatacagattaattaattaaatatataatatttggcataacaactgtcgaaaaaggcatactatttggcagaacatcatatcgatcctaaggataacgcacagatatataatattaaatactaaataaataaataaaatagacacgctagctagactagctagcttggagtaacgggggcacgaagtcatgtttagttcccacacaaaagttctacgtcatgtcgcatcgaacgtttaaacacatgtatgaagtattaaatatagactaaaaaataactaattatatagattgcaactaatttacgacacgaatcttttaaacttaattgctctatgatttgacaatgtggtgctctataaaaatttactaatgatggattaattagacttaataaatccgtctcgctgtttactaacggattctgtaattagtttttttattagtgcctaaataccctatgcgataccctatataatactcgatgtaacacgctaaaactttacacccttagatctaaacacccccgtgatgtagtagtacaatcttgttcctagttggagtggtgcacactcccttcgttttagaatgaaagatattttggttcaatcataagtaacttttttattgaaaaaaagtaagtcatacatccattttttaagtaatagatgacgtcgttgatttttatcacgcgtttaaccattcattttatttcaaaaaaatatgtaggagtaattataatttattttgttgtgagttgttttatcattcaagatactttaagcatgatttatattttatacatttgcataaacttttgaataaattgaatggtcaaatatttattaaaaaatcatcggcgttatctattaaaaatggagagagtactaactaagcaatccagtcatatatgtatctaccaataaattgatcactctaggattaacatgtttttttttatttttaatgaaaatttctagagacatttcgctaggtgagatgaagttaaaatgacttgattgaataacagcatagctagcaaaaagaatacattttgagatttaacataacaatattcctctaattaagttttttcccttgatatatttaagtctagctagatgcgagtaaagatcgttagctttgaaataagatatataacacattttgagatttaccagaagaaaatcctcttcgtaggtatagtcagttaataaccttttaacataaaaatcattcatcttattaaaaaaatatatagtgctttcatttatttttctgttatctttttactattaaaggtgatttaaccataacttatattttcagtgattaactataccacttttcatagagaatctcccataaaatctgg

SEQ ID NO: 41083 - DNA, 684 bp, Oryza sativa
agaaatgatacagtggcgcatttgataattggtaatattatgtgatagggaggctcacggtcatggagaatctcaccgacccggatggatcgatggatggatggatgcagcggtggaaggcaaagtcaatcccctagctgggagtttggtcggcaaatctgaagaccggtgatggagtagagtagccatccagccactagtggcgcatttcgtctagaactagtagtattacgccaagttttctttttttgagaacttattacgccaagttggaatagaattacagggatttcttcctctacctcgcctatcttacaacaggtacaatagcagactataaaccagctataaacacatttcgagaagattagagaggatagaaaagagcagcaggatatagatttgtagatagctgcaacacaaactccaacatgcatttgtatattacaggtgggacaaaatattaattgtgtagtattccctccgtcctataaaaaacagagtctagaatcggatataacatgttactacgaatctagacatatgtatgtctagatttgtagtattatgatatgtaacatccggtattatattggttttttataggacggagggagtatatgtttatagatagctattgaatgaattaactactaaattgactatatgactatagatgattta

SEQ ID NO: 41084 - DNA, 1231 bp, Oryza sativa
acatcccatggtggattatgtgtctggaacaagtgagggatcacccgatcggaggcgcgccagaacccaatcgtccgctggccccgggggacggggtcaacgctgatgatgccggcgaagacgcatccgtcgacgtctggttgggacgagagggtggcggcgacgatggagaacggcaactgccattcctgcccgggcgctccgtcctgctgcgcgatgaactcggtggggaggtcgatgtgagggcgggagtcttaggtgtcgaggaggcggtgctctcgaggacctcgaggtggagcaatggagaggatgaccagccatcgtcgtacgcgccgatgtagcgtgcgtcgtgcggccactccgggaggacggcggggtggatggcgcagttgctcaggacgaaggagacggcaggccgctcagcaagcggtaggatgagaaccggaagagcgggaggcaggggcacgggcgcttgctgctcgagggacgcgcgccatgatcggcagacggcggcgaagtgcacgcggtcgaactcgcacgggaggtggttggcgatctcgcccacgacggcgctgacgaggttcgcccatggcggagaggcagccatgggagacgggaggggaaggggaggttggggtggacttggtggcaaattgcacgggacgctcaccgctgcggtgtctgttacaagtttgattcccttttgcttctggaagccacggaacggaaggaggaggagggagggcttcttatactgcaaggaagagagatggggggattgggggatggctcgtttggcccactcgagcatgttgatcaggatgggcttgtgccccaagaaagaggaggaaggctcgcttggcacctgagcacattgttcgttcctgatgggcttgttgcggaccatttcatggcctgatttgattaaacatgataaatggacatgaaggtaaaacaacccaaatatgaagccgattctaaacacagagtatatccaaatcaaaacgagtttttttttttggaaaagttagatttgttttttatttgtgtaattttatcgttttgaacaatggtgaagtcaaactataaaatatttgactatgaatcatttaaaaatatttctcttataaatatgaagaccatatgtgcatattagtcttaaaaaaatacttcaataaaattatatatttgttcatatttgtatgtatattataatagaaaatagtggtta

SEQ ID NO: 41085 - DNA, 1365 bp, Oryza sativa
ctgcagccctaatctactttacgccatctcccacgtccccctcttcttatatttcacctccacgccccccttcgtctacctgcttgagtattccctaccttcaccataggcggagatcgagttccacatacggtattttctactagtactctatttttttctcttctatcaccattatggttgaatatttccttttcaaatccttaacccttgaaaccacagacaccattgtaggttttttcgcgacctcgaatcatctccgatagtgtcggctaggcgcgccacccatgcgcgctggcgacgctccgcgcagagcaaacgggagattatatggtatcaaaacaatgacttatacaccagaacaatgacttatacaccagacgagatccacgcagcatgttcctctctatttctttctttcttcttcctactagtagatctagatatatgatttcaaaactttggatacatatagttttgaggtcttccatggcgtacggtgaaaacttcctttttgcacggccctccccaccattgagatcaccgtttttttttttttggcctatttgcggcgcgccccggtcggccgtccctgtagctcagtccacccaccgctctcactttcatacgcggcccgccgcacgggtgcgcatctcggcgtcagaaagggctacagccctacagtgatggatcggacggaccgtgcggggaagaaagagaaacacatcggcgcaaggcgcaacctcgtctccgccccactcgccgaaaatataaattccccaatccaaaatattacccatcccccccctttttttttctctctcctcccttttcgtctcgccgccgccgccgccgccgccgccgccgcagtagagtctgcagcagccgcagccgccgccgacgcggcggctctctctgctcgccatccgcgtccggcgtaccggctgccgacgcaggtgagacgctaggccctttcctcccggccgacacgggatcggggaggcgcgcgcgcgtggcgccgcgggcgctgatgagatatggttgcggcgggggactagggtttgagggttagatgcgccggcctgtttggtttggctgttggggattttttggagtcgcgaaaggaattcaacgttgtctcgaggggaggcgtacctgagtttctcccgcctgcttgtagctttgcgttccgtatatatttccagtgaaattcggttgcccgcgcttcgtaacgaagggcttttggttttatatggatggtacttgtgtgcagtgatcatggatttctgtgggtggattatagttattctgaagccggtttggcttgagttttgagggcttagcacaggtttgactagcctgcca

SEQ ID NO: 41086 - DNA, 976 bp, Oryza sativa
aatttgaaagttgtgtatcactccttatttggtttctcctacattactcgatttttttttgtttcagaatataccatctgaaaactcaaaactgcatgtgctattatcttttacttttatgctcccaattcattgtgtgcatttattgtgtaaacaacgatccgacatttattgtacctcccaattcttccctcctcccatctatccacatccactatccgtggagtcgctttagttaggacgatagcatcgttttgtattgggatgacaggaatgcatgcatatctcacacttctgaaagctcggacgcactaaactaaggattgattagaaagagtggtgagaagaggagagaaaagaaaaatgtgcctccataaagcaatatatgggccggtaatgtttctgatttataggataatttaagaaatgttttgtgtgttatggatgggtcgtaatctaagggcccctttgaatcacaggaatgaaaaaacggaggattaggaaaaacataggattctgacaggaatgtaagtgtaaaacagcggattgcaaaacacaggaaaaacataggaatgaccgtttgattggaccacaggaaaaacacaggaatttgaggagagatagactcaaatgatttcttccatgaggttctatctcttgttaaaattcctccaaaacttgtatgggaagaggcattccataggaatttcataggattccatagggtttattcctttgatttaaagggctttgtaggaaaaaaaatcctataggaataaaatcctctaaaattcctatgaatttcctttgaatcaaaggaggcctaactatacgtcgtaggtgggttaaaattttattctgtttcaaaggtgtattctttattttttcacaaaagcgcaaaagaaatgcacgtaagtatagcagtagaaatagtgttttttctgttatataacgcaattgaccagactggccgtta

SEQ ID NO: 41087 - DNA, 895 bp, Oryza sativa
cccttccacggcccctcccttttgggactctgatggtgaagatgacgatcctggtatgcaaataacactacttttgttcactgtgatgataattaccgtaataattcaaaatgatagcgctagagtttgaaatttttatagcctatttatgggaaaaacaaacagccatttctcaactaagagttatgattagttccttaggaagataatattatgttgaaatatgtgtctggcaggccagtgctggaaactgtaatcttgagggacgcgcattaggccctgtttctttcagcttgggattattataatccagattattgggagtaagcagaaagaaacaaacaacttattgaagtagcttattataatctgttaagctcatttaggtgagctttttccagattattgggtgaaaaattacccaccatgccaccccactccctctttagacttgcaaacccaataatctaggctccattctactacagattataacaatctagcttatattaatctgactcaataatctagattataataatcttaagctgaaagaaacagggccttagtatggacagagattacatgcttaaatttgctatgaagacctgaaagaactattttttctagtcatactcaaaagtatcattagtttgtttactcctattgtttcttcctcttgtacacataacacattcaacgtgccagtgcaatgcagttgcccttctgaatattgcacttttggccacctgtacttatctctacctttaagccctatgtttcactctgggttaaataactaggttaacttaactcatttcttgtgtttggcagcagacgtagttaacctaagatactgtttagcttgattagtatctgtttagctgggttgaca

SEQ ID NO: 41088 - DNA, 519 bp, Oryza sativa
aagacaatcagtttaatggaacacgaactgatctgccttgtcttacggagtactggatgacaatcgccttgctgtgaccatcatgtaattcatcttgccaagagatattctcgctgagatacaaccatgacgttcacctatgtatgcatctgaagatcggactgttgaccaagtgggtgtggaccacgggacatcggttattaatattccaagtcgcacttttgtttgacttggcgggaatattatcgattattaatcagaggataagattgaggaatgctatctttcctacgatgaccagagggcatgggggccaactgccatgaatagtggcaggaaactgccttggccagacgaactctgtactaaactactagaaaaacaactgctccctctttgaaactgacaacgcacaaacacccccgctcctgatgagagatgccaacatcaattacagaggttcttctcttgcttgcgtgagggatgaaaacgccaccgacgcaacgcatcatcactacc

SEQ ID NO: 41089 - DNA, 626 bp, Oryza sativa
ctgaatttggcaaatttaagaaattggttcaatttacgagcagcatcatattagaaatactgacatactcgactgcaaaactattttcaagactaaactgaattggagattgatgttcccaagtactgtgataagaattgagatagtgtgaagtgcaggaaaccaaatagcactactacggatccgggcttcagtgacgggtcatctgtgacgggccaacacaactcgtcaaagatgagtcatctctgacgggccgaaaaaatatcctcttcaatatattgctactagggaggacccatcacagatgtatcgtttactaataattagctcttcaacagaacctgttgctcatatatttgacatggttttgtacagtagataataatcaagattcagtaatgagagtatagaagataccttgctgcacaaccatattgtggtgtattataacatttaaatataatatgtgtttggtgataggagagttatttgtacccatcattcacgtggttgaatctgctcttgagttattcttttagtcctgagtttaaacatagtgacaggagtgtaaatgcagtggaggaaatcgtgtattaatgccattggctcataactatgtttaatag

SEQ ID NO: 41090 - DNA, 716 bp, Oryza sativa
catatatttggatgctttcttgctgaatagggcggtaggttcaggggggcacagctctttctgttgtgtgttgtgatctttgtggttgcttcagtgtgtgttctgaaaactgcacaacttcacctttttatgcattgagatatacacaccagcatcagagcatcttgcaactgattaatttgcacttgttattatgatctatctattgattcttctcagagttcgagtacatgtgtttcagcaactgaaaagctagctagctcctttctaagcctgcattttgcatctgtttttttattctttttttattttttttgcagggtagtaccatcagcttgctgatctcagtcaaggacaagaacataacaagaacaaagtgaagctcaagatgatggtgcagatggagaagcttgtgaggcagtgcgacatggaggtcatgaagatggccatgctcaagcatgaagagactttcaagcagcaggttagatatatatcgatcaaacgcaaaccaaagatcacaatcatcatcactgcaaagaacaaaaagaaaaaactctaaaattctaccaaacaaaaccaacaaaattcttttcgtctcgatgcctctgaaggtgtatgagctgcaccggctgtaccgcgtccagaagcagctgatgagcgacctcaacaggtcgccgccggagctaacctgccggcggcggcagcggcgcaagcag

SEQ ID NO: 41091 - DNA, 1139 bp, Oryza sativa
gattgcttcgtttggtcgcgtctccgtatagaaatggcaattttcggttcactcggtgtatgatgcgattgtgaactctagtgtgacggtccgcaagaggatctcttatataggaggttgaaggtgccactgaaaatcatagtatttatctagttgtttcatatcaaaataattctaacaaaggataaccttgcgaaaaagagttgcgaggtgataagcaatgttgttttttagtgtgcaagagacaaccaacccatattctttgaatataacatagcacgtttttctcggggatgtgtattctttgctttcaatattactagttgtggagattatggataccccatatcaacataacagttataatttagtcggatatacggtaccaaatatagatagaatatctttatgaggactcgggttagtttctaacttgtatgtcaaggaaatacccgagatcttagtcggttacgattgtattttatttgtaatcgcatattccgttagggatatggactgtattttgtaatacggatcccttcccctatataaggaggggtctgggttcctctcgggatgattctctttttcccaaatcatacgatcaataacatactcggcggaatcatccccggacaggagtagggtattacttcttgaataagaaggcctggacctgtataaaattccttgtctccaaacccatccacttttctagcttgatagccaccccttttagtattgccgaaatcttgtttcgacactacttctcggagcgccaaaaatatatttggaaattggtttatgggagtgcccagcttaaacaaaatggttttatttgggggccagtagtctatgatcaatttggtattactgaaatgataatattttttataataaaggattggctaatctatacatattatcttcacatctaccagctagctccacatttgatctttgacgctatcataggagaagcagaatattatgcgcactagtgctactcttatatataattgataactagagtttttttttcatttttgatggcatagcccctataaaattacttgcaagaatatatactggaaaacacattttcacatacaacaaaaatgccttttctcatgcgggtt

SEQ ID NO: 41092 - DNA, 550 bp, Oryza sativa
tttgcagcaaaagttcccatcaaaaaacatccttccaaaaagcgcaagacgcgacggtccgttcgttcatgcctgtgcacttgcaggcagcagttggcccgatctgggccgtccgattatacgccctccaaagcctccaaatatccttctccaatcgcaacgggcgcgcagccgcgcactagaaaattttcccccatatccccccagtttttgcctccaacccaagcctcctcctcctcctctctctccactctcctcactccctctccggctctccctcacctgctcaccgcagtgcacaccacaccatccagcgaacggagccactcctccaagactcactcactctctctctctctctctcttcatggctccccgtcgaggcatcccactcgaggagattggagttggaggtgggttttctagttttagtttctttgcctagcctctctctatctttttcttttcttttttttcttttttgcagttgtgcactgatttggggggttcttgatttgctcgcttcgtggcaaagatgaaagcttttttt

SEQ ID NO: 41093 - DNA, 716 bp, Oryza sativa
actagtggatcccccgtagttttattcacaaatttcctatttttaaaaccatttttagcaaacaatgaacctctgattttttttcttcttctgaaaatagaccttctacctattagaaagctccatttctattcttaagggaatatttttctcactaggggtgtatttgtaatatatattttcacaagggttatttgtgaaaaatatcttagactagctatacatttatagtcaaattttaactaaattatttgaaagatataaatatagtagaatcatgatgtaatacattgtatgttgtaagtaattgtagtataacttatatgtaacttttaaaaatcgctaggtaacatgctatttttcataaaatgaaggtataatggtaccaaggttgtcatcattttctacctccctgcatggattttaaagcaaactgaacggctcaaaattgcattgtagttacatgcaagttacaatgtaattacattgtgattgtactatatttatttttgttaattttttagaaaaaaattgttgacaaatatataacaaaatcgtaaatttttaacacggattatttcgtccatagttccaaagataggatttttagaagaacattttttttactgattgattagaccacatattctaagctatttgttaaatttaatttttaaaatattagtttataatgttaattaaatatacaatctgtg

SEQ ID NO: 41094 - DNA, 725 bp, Oryza sativa
acgttcgttgtgaggctagaaattcccacattaatcggagaaaaagaaaagaagagtctaaatagaaatacaatcaaaaatagctgaaattcggaattaaaaatatgcaatattgaaagagaagtccatataggaacccaatacatgattaattaaaattcggaataaaaataaaataaatttcgaaattagaaaaagaaaaaaaaagaggagttcgagtaggaatacaatttaaaaataactaaaattcaaaattaaaaagaaataagagtccatataagaatccaatacaagattaattaaaattcagaatgaaaatttaaaaaaaaatcaaaattataaaaaaagaaaataatagttcaaggaggaatacaatttaaaattaacttaaattcgaaattaaatataagcagtattgaaaataagagtacatataacaacctaatagtatattaattaaaattcgaaataagaaataaaataaaatccgaaattaggcaaattaaaaagagagttaaagtaggaatacaattttcaaacaactgaaattgaaaataagaaataaaaatatcaaaagaacacaatacgaaaaaataaaataaattctgaaattagaaaaagaaaaatactaggaataccatttataaataagtaaaattggtggtaaaaaatcaagactattgaaagaaaatatcatctaaaacacatggcgagattaattaaat

SEQ ID NO: 41095 - DNA, 735 bp, Oryza sativa
ccctattctagcgacatttttttcactcaatggcacatgcacgaatctcaaagtaaaaatcatgcggtcaactaatcaactgatttttttttaaaaaaagaaaatctggtggcgacagatatgtagcaattccttttttttccgtgtgtggtggcacacacgaaagaacacaataacacaaatattatttgttgacacaagccacacactggttctagaaggttttcatttatatagagatcgataagatacatgcaaggaattacacctagccaatcactcaagttaattaccatgcaagtaaactagtcacatgcctaactaccagccatggcaagctagtcttacgccacaacgtgtatatgccatgcaaggttccacttctcaggacatttgagtttttgctacagtgtgggtagcaagcttgttgatcagcaagcctttcctatcgcccatgatgatgtgatgacaataacgttacgtatctgcctatgcgaggagccttgcttgatcttttagcttgcaactttcttttgcaaggcttgtggtgaatagcatttgttgaacatggcttttcagttttcatagccttgtagtttaggtttatcatgttctgtttgatgctgtagttgtggttttcgtatagtttctcttaattaactatgtaccgtaagatttggtatcgttttctccttaaaatgagaaaacttattctttatataaaaaattaagaaa

SEQ ID NO: 41096 - DNA, 755 bp, Oryza sativa
cctatatggtcagtcaacaaaacattggaaccttggatacaaggtgacaataacttaattagtcaaagtaaccttcctaatctgtagtgcgacaaattatgtcaatgtacgctagtactacaaattaaccaaacattaacaaccctgagtcactaagtaccggcagctactcgatcgatctatcaccaaaaacaacgccgcgacgcgcgttgctattattagccaagtgcatgtgtggatatttcgcagcagcaaacacgtacgcagtctcagtcacgcaccaacaaaacgcacgtacgctagcagctggctagcacattgttcatcgcttgttgagtagccccggctccctgttactacctccatattttaatatatgacgctattgattttttttaatgtttgatcattcgtcttattcaaaaaatttatgtaattatcatttattttaatgtgatttgattcatcatcaaatgttctttaagtatgacataaatatttttatatttacacaaaaattttgaataaaacaaaggtcaaacattgatcaaaaggtcaacggtatcatacattaaaatatggatagtacttcgtttcgtattatgaaattttttagcattatccatatttatatatatatgtctagattcattaatatcattgtctagaaaatcttctaatatgaagataggagtaatatttggttcctgttaattaatcagccgctcggagcaccaaccgatctgttttggagt

SEQ ID NO: 41097 - DNA, 1021 bp, Oryza sativa
tcccccacctccgccgccgcgagccagcatgccgtcgctgccgccgagatggttcttcgccgggaaagaaaggagcagcgcttgactccccctcttcctccgcaaccgcgagccggcgctccactaccgccgccgggaaagagaggagcacgccgacaagcagaccggagagagagaggaaggggagagttgtgcggttgataagtgggtcccacgtcgatttttacacggtgttggcattagggatgaaaacggtcggaaacggtcggaaaaaccctctaccatttccattttcattttattttctcgaaaatggaatcggaacggtatactcggaaacggtaacgatatcggttatatcggtatctcggaaacggaaccgtcggaacgggaatataccgatatcggacggaagtcgaaaattcatgtcggaaacagcgaactgtggtatcatcccgcatttaactatgtatgaagatgaccttataatttcacccttgcatcattacgctgccacacaacaccgttatatgatgattaataagttgacaataagattgataaataatataaataaagttcaatgatacttcaacatcaatgtggctaaagcatacaatgtggcttacatgataggattacagcataactaatattgtccgactttttttaggatatagatttgaagtcttcgagaacaccaagctcacaagctggcatggcttcagctgatcagctccttgtcaaacatcattcattatttcatcatcaattgacatagctatatcgtcgtcctacagtggcacattgcataagaacttttatgttgacactgtataactactgttgtaattaagtttcatgctaaactagactttttggtatttccaggtcgatcacagagaggagtcaagatggtggggcccgccagtggatcccacagtctttcttttcctctctttcttttattttttctctctctctcttatccttcccttctctcggttccttttcctgctct

SEQ ID NO: 41098 - DNA, 567 bp, Oryza sativa
agaagccgccgccgcaaagagccacgagaccaaggatcggcgcgcactccaattattaatagacgattgcagtgcaccgaaagaaagcgaccagatcagactccatccacccgcggaacggcgccaacgcaatggacgcactccccacgcgatcccagccctccgcccgcacgcgcgctcgtccgccacgccctccgcttccgctccactcttctcctctcccgcgcgccacgccctccctccccttccccttcctttcgcctcctcacaaaaccaacgcgccgccgtcgcccacagatattccccccgcttttttctttaacccatggcctctctcgtcgccaccacccgaaaactccagaacccgattccgtcccgtttccctttctatattacgtggagtagccgggtgggcagatcgcttctcgagcatctccgccgcgagggagcatgtgccatcctgggctgccgcctctgccgccggggtgcgaggtcaagcggcggagggcgccgccggtggcgcgagtgggttccccgccgcccgtgccgcggcgggagcagcctcat

SEQ ID NO: 41099 - DNA, 1714 bp, Oryza sativa
aggtatgtgtaacttgaattgtgctatattatttgtcaataatagtgccaattttgtggtaacacatgctgttataatgagttctgtggcctattggttatatatattgtaccgttccggattctcacttcgtgagattacctgatccttatacgaattatctgaatgattgcgctcatgcttacgttcttgccttttgtagctattgcatcgcaaagttttcatcttgtaccaagctggtgcctggttcatctattgggtttcataaaaaatttctggcagctagcaataataggaaataacacaaactgttttgagcaatagctccaatgggctctttggaacatatagtggttataatacacgaagtgctggttttcctacctactaatatacagttagattgcaatctgcaatattattttggtaatggatatatcctttgtttacagccattacatgtttcagtttttttactggtcttcactaagcaacttttgctgcttagttgtcacctgcatcagaaggcagagaataacttaactttacatgagataggtgagcccaattttattgaaacaatattttccacttgcaattttgtattcagattaactaaaggttgtccccaatattttctcttctcagtatagctttcagaggtgaaaagagaaaaaggagaaataaaaggaggtagcagatcactctgcatttcaagttgctgacctagcctaatcaacatgtcaaatgtcagacgtgtattgagtttgatgtactaaccactacaacttattgaataagtatgaattgggttttttaccattaacatttaactgctgcaatggataagtacaaatgaggatatttagtattaacatattactatcttttatagacacttgtatcagtctatctccattacaggtgtaacttctgttggtttgttgatatcacaaaaggtaaaagaaaaagtcgccttaactataagtctgtaactgtacaatatggcatatggttcaggtaatatatctgtaaagctttacaaaatatctccaaataccaatctaatttgttgtccagaatttaatcttactaaaggatatcttaatgactgataggagttaggactttatccaatttggtatgttttctggagctatataaatttagataattgcttatggaacaagttttctgtagtagtagatgttgttcaaatgatctgcagtgctctacgagtaaatggctttgttctttatttttgctaataaggggttgaaagcatggctgcaccagtactttctttgaaatttaaaggacatgaacgcatttgtggtactcaacagtttgattctctaatttgactcggtctcattatgcaattgttgtaaattgggcatgacccaagctgtataaaaagagaaggcaactcgccatcatgtactttttgtttattatcccccagtgcagaatatatacttcattcccgaacatttgagtcatctactatcttgcaatatcactcttcctctccctccagctcttttgacttgagcgcaatcctctccattccactctccgcaagcagtcccatgtgagttatccatataaacctaagtctgctcatcttttatatttgcaaccctcgtgtttcttaaataaagtgttgattgttcactgttagtctatcatctaccccaaaggtttggttgtt

SEQ ID NO: 41100 - DNA, 1866 bp, Oryza sativa
gctgctactaaaggacttgaaatgtatttttacagttgagctttatatttttctttaagatacagctgagtttcttttaagtccaagtgttataactaaagtaactacaaaaattattttatagttgtgcataagaaagaatgcgagatacatgctaccagtaatattcactagcggaggtgattcaattgcaaaaaatttgttggctggtaaacctactacttatggtgacatatgatggttttggtaactactcgttgtaacaactcaaccatatcaaggtattgacggttaaacctcttacaccactatagagtaatatgtggtggaacagcctgtaaagaacgaaaacttgcggtgacaggtgttctttcgctggcattaaaacattatattttagtaaaaacaaaatttaataaaaataattggataccacaaataacactactacaaatatatatagactcatgagcgacctaagatcccgcaactccggacgcctacttgcgctcaccaatgacccattcatagcactataaatcattatgttcgtgattgtttgcatatattattttgtgagctctataacaatttgtatgacaaaacttactaccaataaaacctaaccgaataattctgcatatattataggccacctaaggattagaaaagccacatggaaaaaaacaggtgagacctctatacccggttttactatcacaccataaatgttttctctatattaaagtcctgatacatataattctaatgaagtatttctactatatctatttttttcaaggaataacataacctctatactcggttttactatcacaccataaatgttttctctatattaaagtcctggtacatataattctaatgaagtatttctacgatatctattttttttcaaggaataacataagatatctcttatcatgattgatggagctccctcagggaaggaaaaaaatagtttgctattggtattggattatttttgtgggtagggccagttactctatctggtctaattctttattctttgaagtttctctattttttaagcaaagccgatgcacttctctatgacaatgagcttttgcatattttatttagctaagttttcgtggatccatgcacgagacatcacgttcagattccactctccaaaatgcaggactaaatacacactcgaactccgaaataatgtgcgatgccaatgtgttttccacgaaataaaaattaaagaaatatcctacggtacatcgtcaagaaaattagtataatatactccatctatttaaagttaatttctgttctaggttatcgtaaatcaaacaattctatttttatcatcatattttaaaaatttgtatagttaaacatcagaatgatatattatgaaaatatatctcctgatgaatctaaaaacatactccctccatttaaaatatatagcaacttttaacattcaaatatattacaaatatagcaactttcccatctatgttctcttctcaaccaatcgcattcattccctcatttaatttctccatcaactttttttctaaacaatcacaactttctctagtttaattcatatgcattcttaatattcgcatcgaatctttaaagatcttatattttgagatgtgagtagtatatattttttagaaattgatagtcacaagatataaatatttgagttatgacaaagttagaaaaacagataatttgaaacaggtattaacactagcggatgttctagattcaaatcatttttatacaattaatctcacaacgtgttctgtaatgtgttatatgtaacttactagcattaattatcacaattttagt

SEQ ID NO: 41101 - DNA, 553 bp, Oryza sativa
ttaggcattgcgtgccttgaagttaagggcaggaacaatccgaaaaggtaaaaaggggacgaatatatatcgagctttattcgtttccctccgatccatcacacgcactcgccgatggatcagctgctgacagcggcgcacgcaggatggtggccgggttggaacttggaagctccaaacaccgcgagaagcatcatcactcagctgcaacctgaagcaccgtggtctataaatatagctccaggacaggctctcttcttactctcacccagtatagttctccattgagcaaactaccaaagggtactcatctgaaacagaatgcagtgatcgaccaccatggatgatcgtaggtacggctactcgtatccaccaccccaaggtaataagcattatgatcacttgcagagttacattcatgatctatctcctcgttgattttacttgcttgattaatttgggcttgcaatgcgtgcgtgcagggtactacaatgggcccccggtgatggcgccgccgcagtacgcggctcccgccgccgaggcggccggagcc

SEQ ID NO: 41102 - DNA, 1342 bp, Oryza sativa
aacaggagggaaccaagcctgagctctttgcttggctcctaaatcccattcaaatattcttaaaaaaatcacatatttcttttttttaaaaaaaatattatgatgattacgccgaatatgtcacttgagccttaagcgtggagaatttaatttggctctgtcaccaccatcaggaattgaagcagggaaatgagagctataaccgttgaataacctctcaaaaaatccctgaattttagctgcttgagcaccttaaatgtgggatcaatattcattaagatcaagttactaacttgaaaaatatacagcatgtgtgtgttgttttgaactctaaaaatacctagacggagttatgcattattgaaaacataacatatgaatgcaaacttatactagaaaaacccatgaattctaaccttagtggtttttcaccaatatttctaataaggggtcaacctttggaagatgagaactctaccatttgaacacatgaatagtgaaaaatcaaactattaaagcttgacgggctagggccataactgagcattgccacgtcagattattgtacaattatactactctagcagtacatacactcttggctgtgtactgttgtacgaaacggagagtccaaagtagtagactgtccatatagttcagtttgatggatttcacccggagatacaccgtacgatttaattgtaataatacatagaaccatttgttttttttttgaactgaagaaccatttgtttttcatttacttttactttaaaacatggacaatgaatttgtttttgaacagggcttgaaactcttaactccgagcaaatgaaaattcaaacagcagtggattcaatattcaactcgaaacccctcctttttttcaactaaaaagtccgcaaaacttcccaataattaaaccgtgaaatttcagcgagacctgtatttaaaaatatgggccaaattcaaaatccaaagcaataaacaactgggctacacacaacatgcgacggcccatctcatcaagcaacaaggcccagcccactcgacacccaccgaatccacgccgctcaatcgaaaccgacggtccagatctcgccgcgccaaccccatcacacaaaccctagcaaccccccacctatataacctctctccctcacgccccgcctccattcgcacgcccgcgccaccacaaaaccctagccgccgccgccgccgccgccgccgccgccatggccacccaaacccgccccctcgtctccgtcaaggccctggagggcgacatggccaccgacaacagcagcagcctcgccctcgccgaggtgttccgcgcgccgct

SEQ ID NO: 41103 - DNA, 2056 bp, Oryza sativa
atcggttgttttggcacagttactgcatggtttctagcgataaccacaatattcacatggttattgccggttgtatagcagaacacatcttaactagtgaaaactaaatcacacgatgcatcaaggaatgtgccacgccttcaaaatagtggctctgttcggttgcaatttttattactatactgcagtcaataggaacagtgtttgtactgcagtcaataggaacaatgttttgtattggcagctgcagcagtgcagccgctgcatataacagccgaacagactcaatattaattgtcagatatgctaatagtgaaacgacatatgtcgttggataaacatagattacaaaactacaggtgctggtaaatcttcatgaggcttccagagtctccaaatccaaactgagataaatcggtgaggagagagatgtgcaatactgtaagctgaggacatatgtcaatgcaattttgtaatttgatccttccataaaattcattatatatataagctcttaatttaatatatctttgatttcttgaaatggtcgcattgtactaccttctcaacatataagaagtttaggattcaatacggatatttaaaaaataggtaaaattcaatgatagtagattacgattgattgaaatgaggaaaactggtggaatgttgtaattggttatttactcaattttttatggattttttttacaatttttgaccatgtataataggcgggtttgagtcacgcgaatgcgtgacttcgtagcctagtgaaattgaaatttcactagaaaaaattcgaaaaaaacacttaaatgtgtgcataaattggggataattggaataatatatctacttttggggtgtaaaatacaaaaattcggcattaatttttctatatatggacttcaaagcaattcaacattttatagcataatagcattacttgcatattgctaccatatttcacacgagcaacaaatgacccattattattacaataaatatccatccctaaacatgagcatatctactcacccaacaaataacatatcacctctacaaaaccattttccgcatcactagcaaaccatttttcacctattcacaaaatttcaaatctcaacaaacatcaatctttcacaatgtatttgacctaaacccaatacatttttctttttctaatttctaaactatttttgattttgccctcaaatttcaatttatattactctatttccaaaaacttcttcaccatctgccactaaaaatcaagaactacatccatgaattcttttgattttttttggaattttcaatttgctcgaatttcattcaaaccatatcgcggaaaaccgttactgtgccccgacggtaaccgcaattattgcgcgataaggtaaactctgattgaacgatgtagtatgaaatctgatactccatccatcataaaaatataacacatatataaggtagagtctctctacctttttgcttaaaaaatataacacatatatctctataagtgaatggtgaatcccaagaattaactaggatgagccacataatcaacaaaataatagccactggatccacatgaagacaaaatagaaagaagaaatctgagccattggattcactttatctagaaacttccttaacctactaaaaaactagtaaggttatggatatgattttacaatgtacacttttatttaaaaaactattttgcaaatataccctattactctatctatgcaactttcctttgaggaaaaaaatacaaatagatcattgacctatatttagaaatattcaacaaatgttgtgcatataattttacaactctcacggtttacaaataaacctcattttttaataaagattaatatgatccaactaagctttatatcattcaaagttatatatattagtgatgagcatatatatgtgtgtgtgatatgctgatgtaactattagttatgcacccattaaagatgttatgattaatcatcattacaaatttaagcttattattgctaccacaatctat

SEQ ID NO: 41104 - DNA, 3869 bp, Oryza sativa
ttattctatctatgcaactttcctttgaggaaaaaaaatttaaaatagatcattgacctatatttagaaagatccaacaaatgctgtgtatataattttacaactcacacggtttacaaataaacctcatcttttaataaagattaatatgatccgactaagctttatatcattcaaagttatatatattagtgatgagcatatatatatgtgtgtgtgtgtgtgtgtgtgtgtgtgttgtgtgtgtgtgtgttgtgtgtgtgtgtgatatgctgatgtaactatcagctatgcacctattaaaaatgttatgattaatcatcattacaaatttaagcttattattgctaccacaatatatagacagtatttaaaagagaggtagcttatagttacgtgatgcacaacttaatatactagtatacttgagtagatacaacctaataaaagatttggtactatatttttttatagtactatatggtatatatcactatattttattttatgttggaggaagtattcataggaggatatttcatctcgaacctatattaatgaattgacctgcagccggtctgagtcgaaggaggtattcgtcatggactatgactccttctacgagtctcctgcaaatctcgagtctcagccgtctaaccaaacatattaatgcacactgcaattgacttctgttgctagtcccctctagtcgtctcgcccgtccaccatattagtgcacacgctcatcatgagtaatgacaattgatccattgaaccaggggttagctagacgtgtttttttttctcaaaacggattaggaatcatgcttctcatcttaatttgttcatcggcatttcttaaaaaaatattttctaaatcgacttttcaaaatttaaaatatatttcttttgtttgttccttcaaattaatttctacaacagaaaattataaaactttatagttattttgggttggtaatcatcctatataataaagaacgatccaacggctatggtattcttgatgatgtgtctacatgtaattgcagataaatgaggctaacttgtataggaatagtatatttggtcaagctaaaagaagtgacacgtgaaaatataaaatttagatatggaacaaaaggattggaagattattcagagctgagaaaaaactacaataacccgatggtgaaatttttaattaatattttaacatcttgaaaagtttgcttatagattcagatggtggtaactcgaagctaataaacacaggagtgagtgcaattcactggtttaacatataaaatgttacatacacgtggtttatttgcctattaaagaaagttgaaaaaatacctaaaagtttcaaagcaatttaaatttacagaagagttgagatttgctaaaaccacatacatgtagaattggaggaactattaactttgcatggaagtgcatgcatgtgggctggggatacattaatgcctacaccctctattttgcaagttataaacattcatggaaattttagcagaaattaagactaaagtgagaaataatgtgattgcttgaaatgagaatgtaaattaattaatttaacaagaaataattataattggatgagacaaacgagtagatggagaaatgtgaaatcctataacacttatatttaaaaatggaggaaataaatttatcaatggtgtacatgtcctttgtacgtggaagccagaacagaagtagagccacaagcagacaagctaacagcaatttgcaccagtccagaactgagaatgcgttgaataagccaagacttgggccgagtttagttccaaactttttcttcaaacttttaactttttcatcacattaaaacttttctacacacacaaactttcaactttttcatcacatcatttcaatttcaatcaaacttctaattttaacgtgaaataaacacacccttctcgagcgggttctaggtctttgggtcatagattaatttgagaatgtgtcggcttctaatttcgtccaaggcatgagtcaagtcgtctcctatcataatccatgaaaaatcagtatataattaagtgtcagtgtcaaacactggactaaatttaatttcaataggtgtcaatgtaatgagttgactaaatacgagataaatccaataacacataagtatatactaagtatatatgaaagatcaggaaaaaaaactaattatattgtaatcatttagctcttttctatatagcagacatgaacatatgtcgaactgaaacatgcatgtgccctaactgttgggtgtgtgtgtgtgctgctgggatcgccactgatcggtgttcaatgtttcttaattatgctttccattaatacattatgacaatataatgatcagaactccagaagagtacttggctagcttgccacttgaattgttgtaatgtgaaagatcatctgtgctatatttatcatcaccaggattcaaaatgttggcctgtaactatatagaaccagagacccattacgtaaatttaaattaattgttcaaattttgaatttatatttaaagcttatttttccacacccggttataggttggtaattaacctcctagttgctgataattttctttttcaaaatttcagtttgcaatttcgtcctgtaaatttccggtaaccagcactccagcagtaattaattagccagttaccggtctgtgttttcttttttgttaattaaagactgtcatggtcgggattacgtacaagcgatgaagccagagaatagtgacaatgatcgattccatttgttttgattcagtttgtcacttgtcagcttgttatccttgagaagaccagtagcagggccgtcccgtcaaattcggaggtcctgtgcaaagttgaaggataacaacttaattgatgatataatatgaaaataatttatactctgtaatatatttcatagcaatctagaatgacctaaaatgataatccaaaattagggattaccggattagaaattatcagaaagaattagataggggcgcggcaggcgtcaggtggcacgaccgcacgagagaaagaggtgaggcgtcgtttactcctctcgttcgttgtgattggcaattggcgaggttcacagtgggaggcgattcaagattgtgaaccggtgcaactgtgcgaaccggcaaaggcgtaatcgaagccgaaacgacgagaaaaataacagattttcggaactagctgggctaccaatttacttattgagttgtatatctagtgttgaagttttgggcctaggggccttaaaaattgggggccctctgcgggcgagctggccgcacacccctacggcttgtttggcaacttgaaggaaggggattgtgagtttacacgagggaattgatggttagattaagatgggaatttgatttttaatcccagtatcttatttggtagatgttgtggaaattgatagggagtttagttggagattaggtcattaatgaaaacggatggctgagatttgtttagacaaaataaatgaggaattccctcctaattaccatcccctacccaggtattgaaaaggagggagttcctccctcaattccccatctccatcccaccaaaaatcctatgtatcccattcaaacaaagcagttaatagcctaatccctctaaactcccaattccttctaaaaactccctccaaccaaacggacggggacggccctgaccagtagcaaaacaaatggaattggttgttgctaacaaatcctgtaattgaagtacaaatgcgaatacacctagatgtacccaccttttatatgaacacatacatatacattaccaatgaataca

SEQ ID NO: 41105 - DNA, 600 bp, Oryza sativa
ctgaaaggggggggttagtgtgtgtttgacagtgacacagtgtattgcaaatttgcaatgggaccaccacattagttagttgttacatcaatctagctagagataactaacccgtattatatatatatccttcaaacatatatacacatatatataaccacctatatcaaagtgtgtactggtcggtcagagtaatttggagccactgctatataaagcctctcagagccttcttcttcctctcatatctctctctctctctctctctctctctctctctctctctctctcgtgtgtgtgtgtgtgtgtgtgaattttggctgtgtttagttcagtacaaagtttggattttggttgaaattagagatgatgtgactgaaaagttgtgtgtgtatgacaggttgatgtaatggaaaaggactgaagtttggatccaaactttagatctaaacacagccttgattgttgaggtgcaaccattaggagctgaagctgccagcatgatctgatgagtgcttattaggtgagggcagaattgactgccaaaacaaagatcagatcatgctgtgcagtttcatctgcttgtggctgcacaaaatt

SEQ ID NO: 41106 - DNA, 738 bp, Oryza sativa
aaattgtaataaggtagttacatctgccatcagcccatcacccctccgccctccacgcttccgtattccgccttttcgcttcgttgttgtagctgtttttttctctctcttttttttattattactagcaaatatgcccgtgcgttgcaacgggtgaaaaaacgtaatgataatatacgtttttcatgcataaccatgtcgataacaatcagaaaattagaactacgaaactttattttctagcgcgttttcttttgtgcttttttctgacatttttccctcacgtgtttttttaaaccgtttttattttctcgcacattttttccttttttaatatactgtagaaacttctctttttatagttagattagattagattagagataaagaagatatataaatggactaaaaaacgacgaatataaatttgacttttttcctccgcgcttttttccgtccttttaattttttttctcgtgcatttcttttacgaagggtttttttcaccactttcacatagtgtcaaacctttcaagatataataggattcgatttttttaccgcatcacgtataattcctttttctttagaaacagacaattttttcgcccttttttatcgcgtcaacggagtcggaatcgttttgattttttccctttttttggatcggacagatttttttttgcctggtttatttcgcccgatcgattttttttaccgcgtcacatataattcctt

SEQ ID NO: 41107 - DNA, 664 bp, Oryza sativa
acaaggtgattccccacgctttgctgtgggaattactaagtaatttttaatatatattttttcgttacaatcaagctaggggcaaaaagaaaacaaatgaaatatcagggcttatcagtatttatcatgaaacagacaaatgaaaccacactttaatgtgtaacatattgataagtttatgttaaatattataaaatggtagatagatttgtaaaaatattgtgaaaatgatgtgatgtgtgattattggatatgtttgcatgttgatttgtagaattaaatagattataaatgatgttgcatgttttcacgaggttgaatatataattattgctagtgggtgatgatatagcatggttgtatgttaagctttacagttagtgggttgtaactttatagaagtataaataagatgacttgtttatactccctccaaccaaaagtttatagcatatttcttgtttcaccaagaccaaataaaaaattaactcattctatatataacaaagaaaaaaaatatgcattcatgcaaccagtgttaagatgctaatttagcacttcattcaaatcttatatgcatatggagactacaaatatgcatatctcattttcttttcagaaaataaataagctttaagacttttgggtgaaaggagcaacaaaa

SEQ ID NO: 41108 - DNA, 1163 bp, Oryza sativa
atctaggagaccttacagtcaccgaataaaagaactaccctggaggtatagtgctgagtccaatcagattagtttgcaaggtaccccactaacttgtaacatcatttgttaggccatagaacaacgacggaagcaacgcagcgctcattgaatcaggcaacacaatatagaacaaaaggtatgggtgcacagttctagcatcttgatgtgaaagtacgcaagtaaattgaccaaactccaacaaaatgcaccagattctcagttggggttgtgttaaacattcaagagttgacatgaactacaaaagtatttcattaagtatggttcgtggacaactggtacactatcagaagcaagatattgtcccttattcggagatgcgttcacaaaactacttaatgaacagagcaaatccagaatgaacaatatcagaatctggaccgacttctttttcccttccatttttagcaatcaaacggaatcggaccaacttctacagctcaaagttggaagctgaacaaagggggagcagatgactaaactgcaggactgtcacttatgcatcatttaagcttcacaagtccaggactccaggtacaatctatactataagagcttccagtttccatgctctgagcagccatggcttgtttccttagtacaaaaggaggcctaagaaaagcccctaaatcaactagacattctacctaagccgttaattaaccgtgtgaaaggattcactccctatgaccctatctactgcattttaaccaaaattacctagaccatgattcagacaaatcggctatccttctgaattctgattttgagccaagaactaggaacatcttatgatatccggaagtacattcatggaagaatccccagaaaatggtagtaacttttttcctaggaaaagtcaaacctcttctaatctttttttttctgaaactgaaaacctcttcttatctgtcagatggggtagaccaatcaaccaatctggatcagatggcacacaacttcacctaaaaagcatcccttgattccataacattgaaaagcccaatcaagatttcaaggagcaataatagtacagtacagcagctcagatcggaaccatgtactcaaagatctaatttggaccacactaaatatgcaaaaac

SEQ ID NO: 41109 - DNA, 1076 bp, Oryza sativa
tatagttatgacaattgatatgaagacttgtggttgacctatcttagttcttgcgaggctcatatgttcaaggtattctatattaagatttgtaataaaatacataaaaaaatacacattacttgtgctagtctgctaatttcttacttcctccatcccaaatatagcaacgaaggactagatgtgatatattatagtacaacgaatctggatatatctgtccaaattcgaatatggatatatatatatatatatatatatatatatatatatatgtatgtatgtccaaattcattgtattaggatgagtcacacccagtcataggttgctatattttgaaccgagagtacaaattagtactttctccatcctaaaaattttagtactaattagtactaaatatatcctaattactacttccttcatattcttataagttatatcaaatatgatattatttgatactatgttgctatatttcaggacggatagagtatttgatttattggaaaagccaaaaacaaaattataccaaatggccatagattttatccctttgcaagccaaagcgagctgagtttatccatgtcatgataactttgctgagttggagatgatgtgttctatacggtcttctacggttgcacgtgcatacacacttatttgtcgtattttaggacatacactagagcaaagcatatctttcgaatgttcgtgtgttttatcagatttagcatcaacagttatctacaagattttttttatataaaattacgtcttttacaatattaatttaaagaaaaatacttacagtgcatgcgtaagactaatcgatccaatggggtcatgcgctcatttatattgatattattttattgtacctgttttggtattagagtttacttattccaaatctagccaaatgtggggcctccgttctgataaagtaaatgtaatgcacctgggtgtttcctaacatcctgatcattggtagtataaattttacaatattattttttttttcaaaagaagattcaactccaataataaaattttagggttaatatgttagtat

SEQ ID NO: 41110 - DNA, 509 bp, Oryza sativa
ttttacgcatgagcaaattcatcagattgaaattattctaaattaattttagttcacttaaaattctacactactatgcctaaaagtgaattctcagatttcatgtaaaatgatgaattacgttccgactttacatgaaaaaaaatatattttggatgcatgacacattttccagatttatctgattcatctcccaaatatgcagtatttgttacatttaagcctccaagaacttagtttatgttaacaaccttaaaagaaaacatattgataaacctattatttttagggttaattgatccatgccactgcaaatatggcatattagaaaaataccgatactattcacgatatcggctatgtgccactaaaatttgggaaaattagaaccacgccactgccgtccaattatctctcaacctatgtctaagccccctgttaaatgtcacttttgccccttccccttccatctctctttttcctcaatcccggaggagagacaagatggg

SEQ ID NO: 41111 - DNA, 2633 bp, Oryza sativa
attgttggaaacgatattaataactaaaattttatgaaaatggtatcactatggttgggaactttttatatttataaatctaactaacattttagtgatgacttcaatataattcatacataaattaaaaaaaccaaattttacataaagctaaaaacaatatcttacttttctttatgaaaacaatatcggtatggtcagaaatttcctacctttttttcactagttattttttctatatcaactcctttctgttctttttcttgtcgtcatggtaactgacatgtcgccgtcgctctatatcgcgccaccgtctttctctggtgcctattccccctcgtagtccctggaggtggccgcgctgctgtttctccatgatctccctggcgttggatgtcgctaattatacggccccacattaccacatgggggtgttgtcggcatcggctacgagcaagcgataggaaagctactatacaacgctcttggagtgcgcatggagcgagcgactatttagggtatgtttggcagagctctagctccaactacatgtcttctggagctaaggcccaaccaaacagtttcaactccacctaaaaagggagctagagtgaaactgactagaatgctctcataaaataaattaagaaggtgaagctcggtttaaactgctctacaacttcacttcaaatcgagctcttgaagataaacttcgaagttgaagctctgctaaacatacccttagtcacttgtttgccttctctcttcactaatctcttttcagctcagcatgcaatccaacgtggaatgcttatcgctatagtattggagtgccattgtactttttttaaagtatctagtcatatgcagccctatgaaaagcaaaactaatacagccaatgattaataaccgtaccaactcatggtgggtactgcatctttattaaaaaaacaacctcactttgaaaccacctatactatcaccatggttgcacaattggatgacactacacaatagaatttcctggtgagtatcaggattcgccaaaccgtcttgtgagattacctttaacccacagtaaggtggttatcatgtgcagaaactgtgtggttatcgtgaaccatgctgttatcgtgaggattaccgtggtttccaaaaactgaaaaggttaccgtacgttatatcattatatcacgtggccagggaagcaaccggctggcctcttaccgctctccatctagtacttgtgatatatgcttgatactctccatacttttaaattttattttaaaaatatagactctctagtatctatactattatctcaatcaatcacaactatcttttatttaatttttccgcgttctcttcttcgtatcaaccaacttcaatacattaattgttataaatatgaataaagtgtacgtgtgtttatagggacaagtgtactaccatgtttctttaaaaaaaaatcctagggagtgagtaggattttggggtttccgtggtagctaggctgtgagtgtcatgtggtccaaactccatagtagaattgacttgagaaaaaatcggaaagcctagctacggtctttcacagagttttcctcgtccctgacgatctgatcacttcctcgtcaacaacaagtctctctgtcgtccactcgatccgatccttcctcccgtgtccctcctccactcgatctgctacctcctggacacggcgacgtacggctgatccgtcgtccggtggctggggttcctggcgggagacgccggtcgtgcagaggtcggtctcctccttcctttccatggcagcaaagccggccgacataggagagagagagaaatgagtttagaatagtattctcttagttgcaaaatatagtaaatctaggattagatgggaatacaatcatggtaccaatatatctgttcagattcgtagtattaggttgtatctctttcgattgctatatttttaaatagatgtatttttctctttttcacattataggacgttttgggattttatagattcatatatggatccatatatatgtttatagatgtgtataaattcatatgtatgctagtatatttagataaaaaacgtcttatatcgtggaacggaacgaaacggagggaattgtagataggatatattataggtataactaattaattacactgggcaaaaactgtcacaaacaaccggggtatttactattttcttgttgtacatacatgcatcgagctttaatattgtgaatcgatttgttgctgtttgcaaaaaaaaatggaattttagcacggagcatatgattattcttggtgctatggttttatagtttcataaaatcatgctgttaataaattgttatttgattgaccatatttgtgggttctaaattaattctgaaatatatgaagaattatttgatctattgtataaaaagtttgatagccattaagttaagcattttttttttgtttttgttttgacacaatagtagcaagtaaaattaataaacagtgcggttatatgaaactgtaggactataatatatccagtgttatatgccacgtgccaaaacttctggatttatgcaatttagatcataatatataccta

SEQ ID NO: 41112 - DNA, 668 bp, Oryza sativa
aatcatgtacgatgacctctacacaaaggctcttgtgctgagaacaaggataggcatgattctccgatgcacctctcacgcatgttccctccttgcttttgcactgttccttacatgtgacaaacggaggaccaccggaattgatggtgccaaccactattcgcttgttaatcgaaggctttttccttgatctttctgcagggttaatctcataatgtctccatggactggggcgtggttgaaggctcaaaatgccaaccggctggctagctggtcctggttccttttttccagtgatattgagctggccaaagaaaaggccacggtggtggaattccatcggacagtacaactttctgaactgggtttctggtggagaccagccaagatcatgcaaccagaaagtggtggctctagtgagaagattgtcgagtttagtcggtgttggaaaagaagatttgttctggctagcaagacgttggacactgagcatgtggaggccgatgaaaagacgatggagtttgtcgtaaaggggattagtagcttgagcgatgaagtctccgagcaacaacaatggcagcatcttggcccattgctgaaaaagatacggatctgttttgtcgcagatatgggatgagctattgtggtgatgcacatattcactcaag

SEQ ID NO: 41113 - DNA, 855 bp, Oryza sativa
aaagcagccatgcgtcaagcacggcgtggatgtggatcacaggatcgtgggaataattaactatttaccactcttacaaatggtcatagaggatttgtcactatacccacatatcatagatacatgaggacccatatgttatagacaacaagtggcaaatccttaattaccatatttagaagtagcaaatagttaaatggcccattctcttttttttttcatctccttcgatacatggaatgtgcttgctattgagagaatctgtttaatgagaagacgaaccacatcgccactgagccgtaccagagtatggacgctgtttgcgaggcacatccacacatcggcgctaatctccacagcgtccatcctagtttcgtgaatctaatctatgatttacaatttatttaactaaacaattattaattaccgtatataaaaaaatcaggagaatatcacagttccaaaatggagcttaaacattggcatccttaatatccatgcttccttctgaatcattctctaaattcgtaaatgccaccaaacaagatatagggcctttcggctagcactacaagatgccagcacggttcgagcctcacttctgggtctgttcggtggcactggctgcagcagctgcgcagcagcatcagctacagtggctgcagcagccagccaacagctgttgtaccctgtagggcttgtaggggagtagttttttctgtaggggctacagcagtttctacagtcgaacagctgggctgtgcagcacagcccaaacagctgtgaaaatgggctaccgaacaagccctctctcactacgagagatcagaaggagcgtgtttaacgttcaaaaac

SEQ ID NO: 41114 - DNA, 2568 bp, Oryza sativa
gttctttatgaagatatacaaggaaaccctacatgtaatgtgatttgaggctagctttctccaatgaacggttctttatgaaggtatacaaggacttaaccctatatgtaatgtgatttgattcaaattatttttgtttaatagatattcatcaacaaataggaagaacatcatacttcatgggcataccagtgattgacttactgaaatcactatcatgtcataaactcatccagatggcacacacactgaaaatgtgacccaaacttctccaagggttgaatattaccatcagcattaatattatagtgatataaattgttttccgcggtccgatttgtaccatgatgaaagacataccacacaaatttaataaatgattctaaaatacgatgatagctaacacacattagttgtgtttcaatctggccccgtcgtgctaatttttttgtcgtgtttcaatctggccctgtcgtgctaactttttttgtcgtagcttctcctcttcctcctctaataataatttactaaacttttaaaaccgtaacgtatttaacatactaggacttaattaaagtaagtagagagataaagtaagaaactaacaaagtataagtagagggatcaaagtaggacattgagacacaagttagaactcgagtatttgtagacttaactacttgaggttaaaatataatgttttcattttgttatcagcttgttatactgtatatattaatctaacattgattgtgcagtgcacaaataaaatctccctcaactgttaaatgggggctaatttatcttccttgatggttgtttagattaaattttcgatacattgatttggttatcattttatatggtggccacatagcgtttacatattattaccgtaagttaaaagatatccatgtagttattttaattaatctaaaagtagaccatccgctttcaaaagtgtttcttctcattaaaaaacttaaaaaaaacaaaagaatcaacagtgcattaatcctcttcccccttaaaaaaattattcatgcctcttaaaaactatgtcctaaaatatatctctaaaaaatataaaaacctaatacatcataaaaaatcattttagaaataaactaaatcatatttttatatctagatcccattgtaatgcatagccatttaactattaaattgtgaaccgcaacacacttgaatagtatacatagtgcactatgatcattggattcataacaattgttaatctctaatttatccataaaaaatatcattttatatcgttcaacattattaatctttatagcattctaaattatgtttagcaaaaatatgtttccagttgttaaaaaactagtcaaataccttatataaataaaatatcattaacaaagataatattgattatttattgatgtagaaacatagataatatatattacagagcgcacacacacatgagcagctgctagaaactcccccaaacagaccctttcgtatgagccctcaccggcggatcctgatccccttcatgcttccttaatggccccacctcctatacttccccctccccttctttggctcgcctccatctgcaacatcgggctcctccgcctcggtctctgcctagcggcgcagggggctcgccctcaaccagtcgctcgaccacaccgctgtggcaagcctggaagcagcagaaggaggcgggtcttcgttgataacatggtaagaagaaggtggaggtggatgtggatggaaggagtaggggggaggaagcttcacatgcaaaacctacattttttttactggcaatgggcatgttacctctacaacttttcttttattttttagagaattgctacgtaagccccatgtgtggaccaattactcacgataaaggcatgcaagcaccatataggacaaagcaccatcaaaactattgaaggaaacaaaatgaaccggttttattacttgaggaagtcacactatctataattggggatgcaaacttcggccaatagttttgggaggtaaaatatatttctttcattgatttttttcagccaattcggttaaaggcacccttattttatttattttctttttgttgtttttgcaaatctccttgtttttattttaattatggaaacatatatattacacctcaactatcttgtttatctataactagggatgaaaacggatcggatacggacggaaactagctttatcatattcgttttcatattttttttcggaatcggaatcggaatcgaaaactcggatacggaaatgaaatcgaatattatcgaatacagatacagagcgaatacgagacggaacgaatacggtagcggatatttaccggtatataaaaaacccctcaaattgagtttcttgatcaaggaagagatatcgcttattattttagttcaacatctccaacatttgtatcgtcaattttatagacggtcccacaaccctatgtgagaatcgattttcatggctattcctcttagagatccatatgcaaatatgattatcattttctattcccaa

SEQ ID NO: 41115 - DNA, 1405 bp, Oryza sativa
tcatcatcgttgccgtggcaaccatcgtcatcgtcttggcagccgtcggcggatccaccttccggccacgggtccgccgcaacgcccctccctgccgccggatccacctcctccaccgcaaccacccctctcctttgcctcctgcaggccgaatctgtcatcctccccgccgcccgcagcccaaccctccccgcaccgccgcagctccccttgccgccgccaccacccacgattgagggagagttgggaggggaagggagaggagaggtggtcggtgtatctcggaggtagggagaggtgaagagatgcggcggagaggaaatggacgacttggacgtagtctccacgtgatttatgcctcccacaatttttttatggtgatcgctcatagaccccgccagtaaaatcgatttttactagcggggtgctcataagacatttttattagcggggctaggtttttagtatctcctgtgattttacaagtgaggttttttagatccattagtaaaaataaaacccttgtatcacgaaaataaatcgttttttaagtagtgtatgtatagctagctaattaaggagtcactttcctcgcttcttgctagctggggaccggtctgccattttctctggtcagtttttagatttttatttggcatttttaggagttttgcgtgaggtagattagggtttatcgtttaatattcttatggaggtagatttgtttagaatcttttgtctctcttacctatttgtcgattgccactacatttacgaggtcctcaatgaagatccatccatgaaagtttgtttgttggttgccgatgatccaattgacagaacagggtttaaggcctagaccatcaatttgtttggtgatgctgtcttataggtttgtcaaatgatcgaatatgggggtagatacttgttcaaatactcttccattcttctttatatatatcacgtcagttagttcatatatttagggatggaggtaatatcttttacgcatacccgaagtctcggtgaattgatgcgttatgtctgaacacgtctagctactcatgacttttacttgacttttactaggatgttactagggccctatttagatcccaccccaaaattttacgccctgtcacatcgaacgtttaaacacttgtataaagtattaaatataggcttaaaaaagttgcacatattacgactaatttgcgagacgaatcttttgagcctaattgcttcataatttgacaatgtggtgctacagcaaacatttgctaatgacggattaattaggcttaataaattcatctcgtggtttactgacggattctgtaattagttttttttactagtgcccgaacaccccatacaacaccctatataatatctgatgtgacac

SEQ ID NO: 41116 - DNA, 2609 bp, Oryza sativa
gtacttacgaaaccagtcccttcaattaatatcaggatcaatgggctaattatataggtaggttatgctaacactcagagtcgcgcaaaacgcgactaagtagctagtctataattgaaaactaaatctagaactcaaactttcaaacttaattagataaaattatttcaccattaaaaaaaaatctaaccttcgatttgtactacgtacgtacataatccggatcatgagacaaaggtggtgttcttttcttctaaagatgaagatgaagattaagttttttatgcaaaacgatttggtattaacgtatgattaattgagttttaattattacaaacttgaaaaatagattaatatgatattttagagcaactttcatatataaagttttcgcacgaaacacaccgtttagcagtttgaaaagcgtaccacagaaattttaatcttcatccaagtcttgttggagaaaagaacgaggccaaagcctgttttctaaacattaatcatcaaaccatgtttttttttttgctaaaaccagtttcaaaaaccttgatcatcacaccgtccaacatgcttttccaagtttccagcgtctagtcaactttccgggttacacaaatcaaacaagcttttattattattttttgtcaccagtttatacagctcagtaatttacacaaatcaaacaagctttgaaaggatcaaagctcacagttaagcatttacactcgtctaatttggtccatttcttcaatccccgccattaatacctttgacttttttttaaaaaaaaatagacttcatccttgatagtactttttaataaatcactggagggatgagattcctcacaataattttccattacaaaggattgaagagaaacaggattctttgaaacaatataatttttttaaacaccaccataattgattggccgcgttataataagaagagtgcttcattttagagaaaaaacaataccaaaccttacaataaatagttgataacaggaaaactgtgctaaaaccccagacacgacctagctttcctaaccaccaagaaggactagcaccatccaattggacgactccgacttccccagaaaaatcaagggaacaagatgtcaatagcccgaccgataccaacttctaactccctggacttaggaactgctccctccatccataaatatttgacgccgttgactttcttaaacatgtttaactgttcgtcttattcaaaaacttttgcgaaatatgcaaaactatgtgtatacatataagtatatttaaccataaattaaatgataggaaaataattaataattacttaaatttttttaaataagacgaccggtcaaacatattttaaaaagccaacagcgttaaatatttagaaatggagggagtagaaaatttcgcgcgcgagtatttaaccctgaacgtctggcgccgcgccgccagccaccgttgacgacacaccgacgccggcctttgctctgcagccaatcttcgcaccttcttggtctcttcgtcgtcatcgccgccggaggaaggcgagcagcagcgtcgtcgccccgacgaggccaacgtacagggtcgcggtttcttggcttttcttttttaaaacttacttttgaataacggggtttcgatcttggtttgattttgagcgctgatttggggctctacaactagacccatagatcttcacaggccacccaatttttggctgtgattacctgtctgcatagttgtgtgaggaggggtccggtttccgaccacatgcgagactgcaaagatccattttcgcggacgaacaacttaaaagggtcgtctgcgataatgtttttaattttgtaggcgaaccttaagccgtccacttgtaaaaaaactaatttttataggtgaaccgctaggagtgccacctgccaaaatcgccgatggaacaactccctaaaaaaatctatgtcgtccccgtgtaattcttatcccaatataataactctatcgactaccccaaccttagatatcctctccctctcaaagtgcgcagcggcggctcagtgctgagaggaggagcagcggcagtgaggtaggggtgccagcggcaggagctcggctcctccctcccctcttcttctcctccccgcttctcccctccaatcctggcaacagcggtggctcggtgatgagaggaggagcggcggcagcgatgacgatggcgaacgccactcttcccccactcccagcaacggtggccggtgggtgctactttcttggcctctctcctgtctctacctctccctttctctctcgatctctccagtctctactctgccactgaagcgcagcagccagcggggcgtgggagtagagcagctggctgggcacgggatccgccgtcgccgcgaaggagttgggggtggcgcggtggagggcaaccacgatgacggacgaccaaatccagcaaagacaggaggtggtggatccggccgtggcggatccagtggtggctgtggcatccgtgatgacgatgatgaccttgacggcgatggcatccatgaccacaacctgcttgctgcgacgatggctggcggcggtggg

SEQ ID NO: 41117 - DNA, 1661 bp, Oryza sativa
cacgatagcggcattagtagacggcataacgctattgaagattcaaacttgacaatactgagacaatttgttaacaagatttagccaaaatctacaacccgaactgataattataatatataaggaatcaacgagccttaggcctcccagtcgttctcttgtctagccatgcaatcatctcagatggtgcatctcttgtttaaaatagtctaaaataagagtttagctacaaatccaatcactaactgacaatgtaaacatatttaatacaaactctaccttggcgagtatgctacaccaatttgaattagttccgtgtacatttgaatctccgtgcacctgggcttaagctcattcattgctcatgcggagctatctgataagccttcaccaggtcgttcataattagacaaattattttgtggatttgctctaaattggttttttccaattttcctagcaaaactatagttaaaatttgtttgtgttcgtatattgtgaattgtccattttttctcatgtaattcaataaggtatgagagttagatgttttaagttcaagtcctaggtagcacaattaaataaaatcgtataactcatgtatattatattcgacgtttgagatataagggaccattgactaaggaagccttgagcgaggggaagttttccaatatagtgtggggggagtgttggaatataagtattcgctcgtcaatttaattaagcttttagattgaattgattggtgtccgcaactcaatattctcaatatatgccgcagatcacacctagacaatggaggttagcatcggcaagccagatgacgggcaatcgcttcttgctaatgttgaggcctccgatgaccatgccgcctttgatgccatggccacaagctcgcgccgtccacctagcttgcgccctctgcggcaccccaatgtgacatcccttgcaccagtaagtcacctcatactcaaacttattgatccattaattctgccatagcagacatgaacatgaaagggtgggtgagaccgtgtttagatgggactaatcttttaagtccctatcacatcggatgtttgacactaattataaatattaaacgtagactattaataaaacccatccataatcttggactaatttgcgagacgaatctattgagcctaattaatccatgattagcctatgtgatgttacagtaaacattctctaattatggattacttaggcttaaaaaatttgtctcgcgaatcagctttcatttatgtaattagttttgtaactagtctatatttaatactctaaattagtatctaaatacagaaactaaagttaaagtccctggatgcaaacaccacccgagtcattgtcgtttgtcttctttacagttgccaccactccatcgctgtgtaccacgacaaaccgaggtgatattcccgccacttgactcaccggactcctccgagctgaagaaggttatgtccatcagcctgccagcaacaccaaccggctttgccgcacctgttgccggtgccagcgactcgtcgggcatagatctccggaggcaagccatggcgtcgaacatgacacaaaggctacagcagcgcttgccaacgtcgcagagcaacaacggccggcggctcacagacgagaca

SEQ ID NO: 41118 - DNA, 1512 bp, Oryza sativa
tggatgaaagagttaaaagaagttagagctcttcctaactctccttcaaaatcttgagatgattgtgcattccacaagaattttaaacaaaaggttagggttcaaatctttgtttttaatagggattttattttcgattatggttaaaatacaccaaatttcctttttcttttacaaatcaaaggtggcctaagtgccgggacaattgaatttggatagtggtatatacatatactgtaaactaggaaatcataatgttttagcacttcctgaagattgatcagattttttttatggtctctgttcatctctcgaccattaattattcgttggtcgtcccaatctaaaagagacgtcaatattgaagttctcgagccccttaaaatgtccctaaacaataaatagtgtttcttataaatgtagtatattattccttggaaaatatgactaacttagttagaaatttttttaaaaggagagatatcattataaacgaggtaaattgaacgttaccaatcattagaggtataaaataagccaaaatagtttggggttgcttcgagggaataaaatgaatttttcttacaaaaacaaatcaaaacagaaatcctttagaaaacttaattatttcaggtcggcagtgacaatgcaaagcatacaacaaacagctgtctgcagcgacagtcaaaattttggcttttttagaaaaaaaaaaacgtgttcctttaattttgagtggtaagagtcatgggccctgtttggttccatgggctaaacattagcccccaccttttagccatgaattggccctcaagtatccaaacatgtgggctaatttttggttaaagtgaattagcctccctccaaacattagcccctccaaggggtgctaatggggctaattttgcatggggaccataaaaaggcagccctctctctccttctctctcctctctttttactctctctccaccttttagtcttgaattagcccatggatccaaacataccactctgggctaatgtttagcctaccaattcatgactaaacattagctctcaaaattagccatgggctaatcttccaaacaagcccatggaatagaagcttctttgccggcaaattaaatggtcgttttcgcacacgtgcaaacgatgaatcacgtatagtttataagttaattactttcttggaggtatgaattaattattgcataggatcgatggcgtggtcgttgttcatgagaactgagaaagtatgtgggagcttaagatgtgtctagcgtgttacacaggcacaaaaggtatcgtttttggcattgtaaagtaagtaagtcataatttatattatgacacctaatgtttgtaccaacatccaaaaactattgcataaggacaagggttagcctctaccaaaatttaaattttaaaagtaatatattttatggtattttcaacgtagattatttttactttggatttttaagttgctaagtactcctacctatagaa

SEQ ID NO: 41119 - DNA, 3252 bp, Oryza sativa
ttggctactttctatattaaggatagactctgcaataaataggggcaaacaaggaaaaccatatataaattggtatgcatgctttatatttgaaacaagatgagaaaaactatatgccttatagaaagaaacagatggggtacatacatttgataatgttttttttatgacttggacgagtagtggctaagctattttgttatttagttgctaacctttcaataaagcatgcaaaaagggtagttgcttgagatagcgtaccatgattaatttatgtatatgttttttagcatatttaaaggcaaaaaattttcatgcatttgtgtacgtaaaaatcgcaatgttatccatgtcatttcacaatgtttatccctaggcaatgtcggaagtatagcaatattactaatactccctccgtttcatattataagactttctagcattgcccacatttatatagatgtcaatgaatctaaacacatatatatagctagattcattaacatctatatgaatataggtaatgctagaaagtcttataatatgaaacggatgaagtagttgtaatatgcatatgctgaggaaaactacaaattgtactgtgagatttatgttccttgatggcatatcaattaattaaacttagctatcctttgtttatttgcatatttgtggagtgattgatggctccatagtatatgttgtcaaattttccatgtttatttagatggcatgcatgcaagaaattaacaataatatatgatcaattttaaggtctaaaaagacttctccatagtgataatagagctgtaatgtgtgtgagtttttgtccaaatgcatatggaggcatgtagacattcatagaaaaagttgatgacacaaccaatttagcattttagccacaaaaccaaaattctcaagtcagaaccaaacagccgacctaggaaactaagcccacatctaatggcgccatgcatgaagataagatcagaaattaagccatatacatcaaacccacacacactgacacagacacatttgcaagaagacatgaattgcaacatacactttaacttgacacaaagctatccataatctctctcccccatctgtaattaatcaaaccaaaaacctctcattatatatccccgataagatatatcatcacctctatccctatcaagggcttagcgtgggagcagatggctttgtggcaatcaaacaaaggctccaaaaaggcattgctttcatgagggagaaggttaaaaaaatgaattttacattttgtggagtgaaagtggtgtgtggacatgtggctggtgaggccactgttctcccattcatctaaatgttgaattcccagcatcctatttatgttgaaaaatagataggtcgcaatcgcttatacgtgtatgcataatattatgtgtttgcaaaacctatgctccatcaagatcaacctcaaaaagaaatggagacattgttatcctctttcttttgtacactctctctggatttattgattatccacttgaaaattttgtaactggtagcatatatccaccattgtaaacatactttctactttgatagatcaaagttgtggcaccatacaagtttgcactccattattgacccactgaaatgtgcaataatgcaaattcatttatgtattcatggatacactactctattattgacttatgtgttcatacctgaggtaattgttatttgtgcaaaattataagacaattaattaaatggaaataaaggacaaaagaaaggtgacaaaggctggaagaaagtagaagcattctttagagctaaggctagcagtatcatctgcctgctggtggagctcacaatctatacatgatgcattcaataagccctttcttgtcctgcatgctacactgcatgtgggcccaggacatgttatggtcatagtgaccccactattaagtgcaaatgaaagtgacctttcatgacttttgtagtactgctatttcatttgagaaaaggctcttggggcaaatcatgcatgcatccttcatgatttccctaccaaatcactacactgcatttatttgagaggaaaatcactctacatgtctagtgttgcctttgtatatgtgtatggttagtgtaataatttatctgccaatcatcacaatgcacttacttgtactgtagttttctagggcttgaccatatgaaaggcattcttcaaccactcaagtattcaatatatacatcctgaataataattacttgggttaccaactggtacatactggattcatattaaccaaagtttaccttaattttctttgtttttttttgaacgaactggtacaaggtggtgcaaatgtaattaatagatatctaggaaaaaaactttctatgcaagtatgaaaaggaaaggtataaaaaggaaaaagttctatacttaatttttattaatgcaacattaccttctgaaactagatcatttatactactcactctgtcccaaaataagcgcaaccagtttatgtgtccaattttgatcatccgtttatttgatttttttataattagtagttttattgttattagattataaaacatgaatagtactttatacgtgacttatgtttttatttaaaaaaacaaataaaacggacgattaaagttggacacggaaacttatggctgcacttattttgggacggagggactatatatcaaattgaacaacaaaaaaaaatgttcattgttgtgatttttcatattaactaaactgatctaaatcttgcaaaatcttaatgagagcaacattgctgctgactgatgagagaggtagcagtatagcatgtcttctttttccttggaagtcagctgtagctgatgtgatcttcccttttcaagctgttcaatttgtagggcctgatcttccctttgattgctatgcacattgcaatgttctgaaaaacaaaattatggtttcagaatgtctatccatagatcctaatactgctaggccttagaacacttgaagaactacactcatgcttataaggctgtgtttagttcagctcaaagtttggattttggttgaaattggagatgatgtgactgaaaagttgtgtgtgtatgacaggttgatgtgatggaaaaggactgaagtcagcctaagttacaatgatctttacagtgatcgatctgcctttcttgctggtgcaacctatgatcctctacctactcactaca

SEQ ID NO: 41120 - DNA, 3372 bp, Oryza sativa
ggtcttagcggtcatggaaacaaataagtcaagtaaaaaaatatcatctaagaaaacaaagactcggatatattcaagtatgtagtaatagtagtagaaaatggatgaaaacaactactacatgcttcaaattttcgtatgttggtaattgtatatgcaaaattaagggtgattgcttgcatatcatgatatcgttatagtaacaatgtagttgctttttagaaaaaaaagggataaaatatacaattgaaaaaaatagaactagaaatgattgtttggtgcaatttagatttaacctatcctttctcgaaagatgtattgtgcatgcaccagcacctacctgaagcagacaccttacagacagaacaatcaagtggaaagggacaaacaatattcacaaggtgaccataatgatgcgatggtttctcttgtagttccattggaaaaaaaaacataaaaatcaaaaccggccatattgtcaaagtatatataagcatccatggttcatgaaaactagcaaggggcattaagaaaatgaatttggacaaataggtttaaaccatactctttgcgatttttttagttaaccaatgattctttaatttagattccatgtgtaatgtataaatcatcaaacaaagttatttacgtcgaacaaaataggaaataactagggtaacaagccattatttacatcgaacaaaatagaaaacaactagggtaacaagccattacttgtatcaagtaatcacgggaacaactgtaattggtattaaaaggttgttgctattgatatttcacaagttctacaaaacactaaaatatatcatgctatccattcactcattcatgtcctgaaaaatcaaaatgtggtgttgtagctgataaatccaagcctagaccaccttgcaaccaatccaaccgctgtccatcccagcaaggaaaatgagatagtgttgctatcaaaagacaaaaaaaaatgtaccaaatgaaatcataaactacacagagaaaaccatacgatgtatctggacatgtacaccacacgcgagagtagaagatcccggaaagcacgtcatcaccgctctttggtgcgcgctgtgcttgtaggacggttcaccaaaatgttcttgatccaaaatgggagataacggttttcctaatgttataaaaaatgtttaaaaacagttgaatcccaacacaatatgatcaaattttaaatattagcttgtattttttttgaaacttaatcagaaaggagccaacgtcaaacttcgaattttaaaacttaattttagagttgatttgatgtttttttcggcgtagtttttttcggctttaacttttaagttgctatggatggatatacaaaaattttactcacaatttttttctcagtaataaactgttactaccttataatcagtcataaactaccgatgagcacggtcattccggggggatttgtttttggccttttggaaaaagaaaaaacgccgatccctactgagcacggaaggcatcatcccgcgcgcgatgcgcttgtggccgtgtctgtggcttcctgaggccgcgccacgtgtacttggtcgaatcggcccggtccaaccgaaagcgaggtgggcagtgtggagcccaccagctgggccgggatgaactgtatctttttgggagggtttgtttgtgtagaactgtagatcaatcagtgggtttggcttgtgtacgtaagcatcaaattatcactgtcaaatatatacgtcattgtccagtatttaattagttagtaaaattttaactagtctctcagtcccaaaatagttgagaccagatgtgacacatcatagtataataaatctagatataagtgtgtctagattcatcataatatgtcaaatccgataggaagttgagtttattttagaacagattgagcagttcttaaaaaaaaagtacactttgacgtgtgacagtcacttatactgccagtttaatagctccaacccacacaatttttttaatatgttgtatagagtttgtaggctaaatcagtggttattttactgattttgctagaaagctgctaatattttttcctctcaaaactaattttcagtttgtggccatccagttgtcgaacccggaatccttggtgggaagccacgttagccaaccaaccatgagtaatttttagctgaatttacactagttacatatcgtatatctacaatataagtacactttaattatattatagtatatttgatttaaaaaaaactgacgaatttgtatagctaattttttaaaagacaaatcagtggcttcgaaccactatttatgttcttccataataatcagatgatggctcaccaataactttgtctaacctaactctatctcaaaaacctagctttatttcaaagaatatttagagctaagataccaataaacccaatgaatactttgaggctggttgtacgatactaccatctccattctaaaataagtttatttttcacttatcccacacataccaatacaaaaccacaaatactataatatccctacttattaaatatctcaatgcaaatatttctcactttatctactcccaacataattattttcttttttataaactctaatgcaatgattattaaaaataaacttattttgggataaataacaggagctaatagtaaacttattatgagatggaggaacaggaagactaaattaaactgaaatgattgtgctttttttcgaggaatgattgtgcgatttttaaccattattctaactgttaatgtgattttcaaaggtacatttgaaatgaagtagttattaacttatttatatatcaaaataggcagcgatagcgttttcagaacacgacagttattacaatatcatagtatcacgtgaacaaccgtatggttgatatgaccactaacttctatatagcatcgatatatacattttttattattttgaataatttcatatggtttgtttttttttttcatgttggatgtttggttcttaccaattaggaactatcatcaaaattgaatatacttattttgattggtacaaaactgtcgatgttttatatataaaagtattgtactgtttttttctctgtgtagctaattttgatattcatattaagttatgctataaatgacataacagaggcttccagtttttatagcaacccctcagtggccacttttttttaccaggcctccaaagccatgattattaaggcgctatgaatctcgaaggaaattcataggaattttagagggtttcattcatatatgattttttactatatagccctttgaatcaaaggaatagatcctatggaat

SEQ ID NO: 41121 - DNA, 822 bp, Oryza sativa
cttctccttagttttacatcactagaagcattgttatttatttcaacttgatctgttgtagatgtgttggaggcaccgacagagccaagctcgctcggggaggaaattaatgggaagaggaaatttatctttttctcccttcatgtgccggccttttgcttttatagttaattggatccatgccaaaaatatatcaattcagaaaaatgccactactatatattcaacacatctgttacgtgccactggaaattgggaaaactagaaccgtgccactccatcatgttatccgtcaaaaaatttgttagcctcaattgcaagtgggacctagctgccagttcctctcttttctttccccttcctctctctccaccaccgtagacggtggtctcgagctaacggaggaggacaagatcgagtgctctgacgacgggggcggcatcccggcagccgcctcgggctcccgtgacagctgcttcggactccgatgacaactacgaggaggacaagatgcagtcgccgtcatcaaccccctccgcagtgggaggcctcgggacttcctctctctccaccaccgttgcagccgccgtcgttgaccacctccacggtgggaggcctcaggagccactgccgtcgacgccgtcgtcttcgaccccatctgcggcgggaggctcgggagccaccgatgtcaccgtcgtcaacctcatctacgggggagagctcaggagtagccgccgccgtcgctgtcctcgtcgtggtcatcagcgagccgcaccgcctccgcccagatcaggcgaggagggccgccggcgttgtctatgg

SEQ ID NO: 41122 - DNA, 1187 bp, Oryza sativa
taatttttataactcacatatactatttatcatgtagtttttttttaataacgcgtgtgatttctatctagtaccaataattcgctcattcgctgtgccctcgagaaaatataataataattcaatgtgcgacggtgacgacatgagtgataggactatttcatccccctcatttctctgaccaaataaaaacatgattcactccatccatctaaccaaacatcctatcacaaaatttagagaataatccaatccatctcagctcgatctcacaccaaacacgtactaagataagaagtgggtagatgctggcagaacaagttgacaaaagaagaggacaagatcgatttaggccatgttcagttctcaaaacaaaatttttcacgctgtcacattgaaatgtttggacacatgtaaagtattaaatgtaaaaaaaaataactacacagattgcatgtaaattacgggacgaaccttttaagcctaattacagcataatttgacaatattgtgctacagtaaacatttgctaatgacaaattaattaggcttaataaattcgcctcgcaattttctggcggaatctgtcatttgtttcgttattagactacgtttaataattcaaatgtgtgtccgtgtatccaaaacccaaaaattttccccaactggacgaggcctttacaccccataattctcgagtggcagagtgaagaacaagctagacaggatcgatcgatggccggcggcagcgagtttgatatccaggaagccgcggcgtcggcgtcggcgtcggcatcggcgtcggcgtcggcgtcggcgacggcggcggcggcgccgttgctggagaagaagatcacgtactgggaaggttgccctggctgcgccgtcgagcggaggaaggcggagaatcccggcgtcccctacctgcagttcttccacatctggatcatcatcctcgtctcctgtacgtaatttcatatgtactagctcagttagcttaattaggacactaatttaagtaattaggattgtttttttttgtcctggaaaagattcctcctcagaatttgttgattagcacgccttcttacttaattagcttaggtggaagttgcttaagagcaagtttaatagtatagccaactactagctccaattcatctatagccaatctaatagctcattca

SEQ ID NO: 41123 - DNA, 1775 bp, Oryza sativa
tgcaaattagtctaggaatgcttatatagtggtacaaaatttaaatacaagaagcccttataattaggaacggggggagtatcacagtgtcgtttctagtagtacatcagtacattagtagtctacacgaagatgttcaagtgttaacagatacatcaatgtgatattgtttctttttgctgccctttatttcagtctttttttttccatatgttcagtttagttgttttgtaattgtagcacgtttgccgtctgctataaaaggtggatttctaatattttttttctttttattctaggtttgccaataacatttatatatcccttcctgtatttcatggtaagtgcttctcattttaaaagatcaatagaaacaataattttcttatccacgggattgcattgcaatgtagttaggagcttaggtatcatagtggctctgacagccagctaacagccctatcacttcttcccataaaaaataaaccttgtacgagatgtgaaatatcataatactacaaatttgaacataaggttatctagatttgtaatactagatttgtaatactaggatatataacatctcgtactatgtgtaatttttataggacggaggaagtgcttgtctcagtctcactgactaaagaacgtagtagagggcaaagaggacagtggcagcagcatatatgcaaagggaggctagggtggggtgatagggaggcgaagtagagtgtagaagaaaagagcccaaggagataagggagagggttctggctggtggagactagagacaaattagggtttaagggtggaaagtatgttatataaacttttggacaacaaatatgataacacttaaatggggacaaaatggaaaagattattatggatacgatttttgcttagaaccttatgtgataatattaattatggttttcaataaaaaccatctaaaaattatatttttaattatgttttttgaatagctcatgtgggaaatcccattgcatatgatgtttaagtagaaccatctataataagtttgtgtgacagtgttaagaaaccatttgcaataaggtgtccctacgacttctttttaggtagtggatgttactcgattctcttttttaatgttgtcacaacccactaaacaactaaaactcaacatgcaagcatattaattattattagtgcatcctaaagactaacatgcaagaatgccacgtcaactcaataggtacctaaagctcaacatgcaactatagctattacatatacaattttattacatcctaaacctcaacatactaggatgctaaattatcattcctcacataatttttgtaatattaatttcaatccaaaccaaatctatccatgtcattgtcatgtggggcacggcctatacacggcgtcgccgggcgcgagatgtgcggagagctgcggagcgagccgcagcgcgtgtcgcggcgcagagcgcgatcaccatgaccgtggatggcaaggacgggctcagtggctaggatcggagtagccttgattctaggagggtttgtttccaagttgttagcgtttatttccaagttagttagccggagggctatatactcttgtaccgaaacatttgagaggaaagcatgaaagttatcgtctaatctccctcttattctgttaagccactagctgaggggtataacctcgcaggtgaggactggagcgcgactacgagttacgtagtcacggcccgccgtcgttgagcgcccaggcgcttgaca

SEQ ID NO: 41124 - DNA, 738 bp, Oryza sativa
tatattcaggcctttgccaaaagcatttttctgtgaaagctttttgtatgccatccgtgcatctctactagtttccagttcaagaaatgcaaaaccacgattacagactggattatttgaatcagacttaagtgttacagaatcaatgttctcaattccaattttctttagctgcttgatgacctgctttgaagagcaacatatgagaatataaaaatgaaattcaggctaacacccaatcaagtcaatcagaacacaaaaatgaaaatgttactcacatcttcttttttccatttcttgttgatgtttccaagaaaaattctgtcattcccaactggaactgcagctcgacagagcttcccacaaatctgtagcagagtttccataaacaaaattggagaaagaggtgtaataagtactattcattacagcaatatgtgggactagaagacctggtctatccaaaattttcacaagaaaccatttttatcacagaaaattggcactgcataataataaagcaaccaaatatatacgaaatacatgtagaagtttatggatttgtgctatgatgagtcaaccataacaaatggtaaacaggataggaattaagatcaatgtggcatatcccattaggggatgctggatcaactagtacgacctgactcaataaaatcaatcatggcatcgtagagagaagtcactggtccatttgacagtggaaaatttttaagctct

SEQ ID NO: 41125 - DNA, 1080 bp, Oryza sativa
ggtggcggggtggcggcgtggcgaggggcgggcgtgaagaggcggcgcttcttggggggcatgagcgcggacggcatttgcagcgacggcggcggggagaacggcgaggcggcggcggcggcggcggcggtggcgagatggccggggacgcaacggcgcgtcggttccatcgcgtcgcgtcgcgccgcgccgcgcgggggaggacgagtttttgtgtgctttggtggaggggtttccgaacgaggcgtcgctgtcccgtctcctggtgcgtgtttatgcgctgacacatgtccatgtgcattttctttcacttaaaaaaaatcttttttcttgttatattactctctctatccgaaatacaaagaaatgagagagaggggtgcatatcccaataccatgaatctgaaccgtactgatactcatcatgatatgttacatccctccaaaatcttttatattaagggacgaagagattatgaaccaaatgagtttcggatttgctaaaatgatgtcgccatattttatggctaattatagttgaatttctgactatctgatgttgttcggtccacctcggcatctctcggctatcataacatgactaattaaaacttaatatgattcattagttcaagcttttgatgttttaacccacaagtatctaatatagtagatattatatcaatatgtgtaatttacaatgcaaaatatagaagttgcattgcacttacattataattacattggacttacatatataattttagaacttacattatgaatacactaaaattacatatgtaatttagatacttacaatgtaaatacatattgattttttttaaaaaatatggcaccataaatatagctactcccatgagttttcttcccaaaattcaaaactatgaacacatttagtatttagagtatattttactgtgtcacctttttattatcaatgtttcgctttggatcacactttaaccattgttttcacttcaggtaatcttacctttgtttcattttggatcacctcgatactcttctaatgcatataaacgatttcgagtatgccagctt

SEQ ID NO: 41126 - DNA, 1165 bp, Oryza sativa
cctattgttgagaagaggatgaaaaatgaaagtatgaactagagatatgcaacattatctggttgcttaatcagatcttaatcactacttgtactagcgtgagtgtatcatatcacttggtatcatcagaggctcagagcaggcagtaggagcagtattaaaaaatatgcaagtatggagtactactagtagtgatgcatacttctaaaaaaacctgcagcgtaattatacttcactaaccactgctgcgaaaatatttggaattccaaattttcaaccactttgccacaaattagatagagcaagtaaaccaactataaacatacatatgtgaaaaagataacgagaagtgaaaaaaaaagagagctataaatttatagtcaaattatagacttctaataacaatagactttaacatgttgtttgtgtatgtgagagcttgtttgtgtatgtgagagcagactaaatattaatagtgtagtactacctctgttttttaatagataacgccgttgactttttctcatatcttttattcgtcttatttaaaaaatttaggaattataatttattttgttatgagttattttatcactcataatactttaagtgtgatttatatcttatacatttgcataaaatttttgaataagacgaatggccaaacatgtgagaaaaagttaacggcgtcatttattaaaaacggagggagtatatatttataggtaactaagggtattagcttactagattaattatagataatttgaagctaatagtagattgtattattaaacttgttcctagtccatatttgttctggagtactctattagtcctgaaaaaaacattctagaggatgaatctggataaaggtagtctaaattcatccttataaagggtcaggttggttttttttactagggagtaaagtttaatcttccactttgaccatgacagttacgcgcgggtgacggttacttttgcgagtggggcccaggtgtcatacaccgggggcagaggcagcggtggcccacgtgggccccaccggcgggcgtgcgggcagcagacgagccgtgcgggtgcactcgtgccgtctcgggagccgcgccggccgtcccatgacgatggcgtgcgtggctgcgcccccaccaactctttactc

SEQ ID NO: 41127 - DNA, 2855 bp, Oryza sativa
ttttaaaatatgtttatactggctattgtatatgctcttaggttgagaaaattttacggtggccgaagaagaggcaggcagtttgatcggcgaatccaaggtgtgtggggggtggtaaaaagttaacgcgaggaacggtgaaataaaaaccaactgtagtgctgttttgcattgcgttgcgcctcgaccatggaagacgagctagcgtgtgcatcgtgcttggtaaatttatgttagctttgaagcaacgatcacgcctttacggtttgcgaaacacacgcccggggtcctcgatctacctcacccgctcctcaaactgtttctagcaacaatcatccaaatcaactgtttcttaacaagccggagtatgtcaattcgagtgcgggcataaaaaaggggtaaattaaatagtattagaaagctggcttagaaattctgatgatgttcgtttttaatcgcatcatttaattataggtttgaaaaacatgcctgtgataatccggtggtcattaccagggttcaccgaaccgttttgggtggggttatcgccaccccacggtttggtggttattgtagtaaaccgcacgaaaactatgagggattgtagtccagtttcatttaaaatttgtgacataaatatattaattttagaagttatacaaccaatcagactaaggtatatgtatttattggaccctacgatgtagaaatggcaatattaatgaggggcgccatattcatttcttttcactactaatttatttaagaattggtagaaataaagtgtttgttagatgaagtgggtaaaatagaagcaacttttatatttgaattttgtgccaaatacaagcatttcattttgtacctatcccatcaatcatcgttcattcaatttgtttctcatattatccctaaccatacttccaacttcaaacgtctcttatttatgtttttttttccggaacacaatatggaacctaggtgttggataatgactcaaatatattattagtcctaggcactagtttaatatgtgcctatatataagggtcacccttatacatgtaatcctaaaccattatagttgattttgtcttccgtggtttttcctctttacattagaggggttttccgcgtaaaaattcgtctctttcgtatttttttcctaacactaatatttatatgtgtatacatactaccctctattagcatctccgaacatcatatgtgttccgttatcagtggatacgtctctattaaaaaataattaaccgctgatacgagcattcctgtccttatcttttgtaaccaaccttaattagaacttctacaggtgtttatgatttgccatgaagggagtagatacttggtcagtcagtacccgtgaaaccattaaactcgcttttctgctgcactatcggagtacccgtagtcctagtccagtaccagtaactgctcctgttttggacagatagctgttaatattctttaccccgcctgatgtgaatcagcttgtacttgctgtactggcagcaagtacgctgtcccattttcttaatgtgcatcaggggagtaaatataaataattaaggacgagtctggtcatgactacagtgcatactctctcagtaaaaaaagaaaaaaaaagtaagtctagaactcgatgtgacacattataatagagtgaatttacgatgtgtcatatttaatagtgctagattggtttttagggacggagggagtatatattaccatgcaaaacttttgcattactaagtttcgatagctttctttttcaacaaagcaaactcatcctaactctactttgtaacttgtaattgaaacaagccgagctcgaggcaactcgcaaacaactcatttggcttggtggcttgtgtggcctacgtgtatttgctcaacaattatggttttcgagattgctaggtgtgaattaatgataataggcaatatatgtactaatataccttttgaggcagaatataccttttgaagcagctgggcaagtgttctagtatttggaaatggtcggtttataccgttataaaaaaaattgcagatgtatgacatatatgcgtcaatcagtccttctgccataaagtttctgagacttattattgcttcatatttgactttttagcggctttatgttaaaaaaaatagtttataataagtggttatagtttctttaaaatactagtagatacgtcgagcccattttgtgaggcctatatgtcagtgggtggtaccaccacaagaaacattcaaatgagtaaagaaaatttatgtgttatttcattatcatttttttttaaaaaaatgcgtgagctgactcgagaaagagaattgagccaagacaacggccgagccggccagccagaacaacgcaacaaaggatctgtttatatctcatctcaaaattttacaccatatataaagtattaaatataggctaaaaaataactaattgcacagattgtgagtaatttgtgagacgaatcaatcttaaacctaattgctatatgatttaacaatatgatgctacagtaaacatttactaataacggattaattaggcttaataattcatctcgtggtttactgacggatttagtaattagtttttttaatagtgttcaaacaccctataaaatatccgatgtgacacgctaaaactttaccctagatctagacaccccccaagacagattctggtcctatactgggctttgaacatatccaaactatcaggcccacggcccatatatccttcaagcccacagcccattccacacacatgtctcgcccggctgacacgtggcatcaatcaggcttcc

SEQ ID NO: 41128 - DNA, 1012 bp, Oryza sativa
gtagaagtattcaataaggcaattcttgagcgctgcttaaagttgtataatgaaagaatggaaagagtgggtctaccagtatcagtggataaacttcagctgattcacaatttggcagaagatgaagctagaaagctctttgacaagcagcattttggtaaacatcatactacccgatccatcctcaagcttgatgaagagatgagaaagtttgcctgacaataaatattcatgcgtgtttaatgttgtcttccattttcagataataaaacgacgtcattgatgcaatttttatgttgtaatgaatatgaatatggattgaagtatatgttataaacattatatcgaactgagatgctatggtcttcagttcttcacataagaaacacttgattcttcatattctgtcataaaattctattattaattactaatagccataaatcaagtttgatagttcattgtgtagtggtagtacatcttttgtgtagcaacaagttggatttctttccatgccttttgtgcttggatgctttgttttgaacacgaacgaattttttctttcagattttatagggtatctctggtgagattcttacatttgaagcattccatttaggaataaaactcgtttgttgcttacaacctatgcaaaatggataatatatcttcaatgtgtttaactgggtattctttttaggtcttcggaaactttggttttgccaatgagtaccagtcatcgaagctgtgcaaagcaaagttttcagagtgtgaagataaaatggaacaccttcaatccttgaagcttccttcgatggcaaaatttaatgctggatttcttcgctgtaaccagagttttgaaatggagtgtgtggggcctgccaaggaaagctatgaacgtaggatgtcaaaggtccgtctcttttaacttgagacattttctatgatgggaaagaacaaatggattttgtacccacttaaaattcagatccatttagggataatgcagtaa

SEQ ID NO: 41129 - DNA, 907 bp, Oryza sativa
ctactacatatgttgtaccattagcaagttaaagaaacacgcacaccaaaaaaaaaaaactgactcggtccctatatatgggcaagtggtactcaaatgaagtagtatatcagtcccaacttctttcaggacggtaatgatagcgtttcattttactggggagctgattcttatcagtgacatgacactgttgaatctttaaagggtgtggaatctggatcgcttcctctctacattcctttaaggtacacactaccaatcgtgcaataggatctgcaagtattgttataattaggtatctgctccttattaccatgttaaacctcagtaacttgatcaggtttcttcttcacaaccacccctggagaactagcttccttagatgaggtgaaaaagccaatccagccaactggtcgtacaagtgagatccatctggtgcagcctggaaggttgatggcttgatacagaggtaaactagcattaattcttatagttaatcttttcagcagtactccgttattctgtcatctaccctatagttcaccaacacagtgttacattcatcattcctcattgatcggtcaggatcgtctcccacagatccgatgccccaggtcgctcccacctccctcacggcctcaccccatcaatcatgcgtcacaaaatgtgctctagcgagagatcattagactagaatagttcatttcggtcatggaactgtacttcaccttctatgttacagtggtactttgattatcaattccatttggtactcatgccgatccagatttggtgcttatcattttcatttggtactcatgcttcaataattcttgctttgatgaattgttgctgatccacatctttcatgattaatgtaacatagtctgtagtagcagtttaaaac

SEQ ID NO: 41130 - DNA, 2001 bp, Oryza sativa
catggggcgtcctgatgtgtaagtggctgcattgatcgttgatgcatgcatggactttgttttgtagtgttggataaatttaggggctatctatgcatttgttttcttctgcattttttttcttctttttatgtttgtgtaggcctttatggttggaactttgaaatgttgtgatttatgttgatgtgttttggagcacctttcagaattataggagcggtgactgacaggtgacgaagaaagtactttaggttcaggtggatgagatgaactgaccttaaatagatatgtagaccccagtgcattttctctcctcgtagtttcatttttctcatcgaggctatatttggaacacaggaactccatggaaattttggggggaattgcatatatcagctcatttcctataggaaaatgggatcaaaacctcacaaacacatcattctagtgggtgatccatagtaagctgaagttttatgcttctgaaaattggtagaaatgcgacatcgatgcattctcaataagaatttctcgattttattagtttccttagtatattgagtgtatgttaaaaaggagccacttttgcttgtgtgcgtggtagagtgtgtgcatatgtatttgtctttcatgcaatgaagaaatgaggggaaatggccaatattgtccttgaagttccattccaaggttagtctagtccttagcgtttttatattatccatacaagtgtttaatatttatcatatgacctaatatcgtccttaggcccacataaatgaccacttgcgcgtaccatatatcctcccatgcgaaaaatgatgatgaaatgaagtaaattggacccatcatatatagattttgtatgggagatgataatgtgatataaccgtggtgatttcgatggcgcaaagggttatattatgtgtcatgataaatttatcggttcatttggataatataaaaggctagcgactaaattaacctgagctgggacatgctattctcccaagaaaaaaaaaagagtcgatgacaatacactattttactgcagattgacaagatatcaacgttaactacaaatgcagctaagggttcctttggaacgtaggaatacaaaaacacatgaatagaaaaaaaatgtggcgaatcgaggtgacatgttaattgaatcctttggaattgtaatctatagggattgttaaaatttgctgtttgggtccataggaaaagtataggattttaggagagaggttgacataacaaagttcccgatgaggtccaaccttattttagaaatccttcaaaattccaatgaatcaagccactccatatgaattttgtaggattctcaaatacccttccaaaggagcacaaaggaaaattttccaggggtttctaatcctacaaaaatcctctatttttcctttgttccaaaggagccctaaacaaacggcatggctggtgagctgtatacactttaatcgtccatggatgtacgtacgtttcaccgtatttctacttatttttctgacaggacacatgtacgcattcagtagagttataaatatgtacttgtacaataactccatgagtgctatactagctcacgagaaagctcgaaatggttagcttgaccagctagctagcctttttgtcagttttttctagtatgtagtccctccgtcctttaaaaagaaaaacccaacttaaaacttggatgagataaaatctagcataacgaatctagacaggcttttaggttgagttttttttttggacggagtatatagctagctagctttaaattgtgccagcccatgctgctgtacatactgtttgtatattcaacactccttgtgcataaattaaaaatgcaaaaaaaaaaagcaatcttgattcctgtgagaaataaactgaaatttgtagatagaacacatgaatttcaaggatgagttctatttataaggttggggaaaaaatcatacggccttaaccctaaac

SEQ ID NO: 41131 - DNA, 764 bp, Oryza sativa
taataagctgttttggcatataatcagcttttggccgattgatggggctgtaactatgatgcattgatctaatgtatgaaacgcattatacttcacagtaagttaaacaaaccaatattgttgagtttattcatcgacattttttttaataatgtattttataaaacctagcctctacaccaatccaacatgagtgtatacagccacttgtgcatagacattactattaattagttagttcatatccagaaaccagtcaatcaagcagaagcagatcatttcagataagggcttattttaccagggcatgacgccaatgacggcaggatcacactaaaagttctgaatttcttaagacagattagcaaaccagttgtcgacaacgtctttactcagaacctgacaaggcaaaccatgtgtagagaactagagatgacacctctatcaaaccagagttaaattaattaccataaagttaaactatagttatggatgcgtcacgcatgctcaaactaaaatatcctatgtgaaattgccaaaaaaaagtatattaaattaattataaatattattgctacacgaatggatgtgataacatctctatataaataacaatcaattaattaccattatcaatggacgtacttgtgtaagacaaactccccaaatatatgatttggtgtaaattattaacaagatgagatcgtcatagaatatgccaaacttgtactacattaattaattaaactgtctacaaattaatg

SEQ ID NO: 41132 - DNA, 823 bp, Oryza sativa
ttatccttttgcaatcttgtggagtggcatattatccgttttctcaatcaaacataccaaatgcccagccccggttttaggtgggcaatccttttttttatgaattgtttttcaatttaattttaggggctttcctagttgctttagggcctgtttgagggagcttctagctactgcagcttctcaaagaatcagaagctcccccaaacaatccagcttttgatccagattctgataagttgtagttgtagaatccagaaaatgaattagaagccataagctggaaaacccaatttttctagattctaagaagctggctatcaaccagctgcttctcagaatcttaagctccgcaagcaggccctaagggttttcctagttgctttttcacggctctccttttttcagtggttgctacttagacgttttaagtttgagtaaatttattgaaaaatttagcgatatctaaaacaccaaattaattttattaaatctaatattgaatatatttagataatatgttttggaaatactattatattttatataaattttgtcaaactataaaaaaaatcaaaacggcttataaaacggagggagtaagaagataactaaagcaaatatatgaatagacctattccaaaagaaaatcaagctacaaaattcatttgttttggactgtaatctaaaactagggccaacagggctctgaccattctaaaactaaggtatggcaaatttctgccataggcactcggttttttttcttttcaacttgtatcttcactaagaaatcaacagggatatttaagattatttttgc

SEQ ID NO: 41133 - DNA, 637 bp, Oryza sativa
agcatatatgtatgacatgtgggcccggaatgtcagtaacagggaatcctgaaaaaaatgcagctatgtgataatttctaacactaatgttgcagttttctgaaaagtggcgcaaaggttgcagcaaagtaatagtttagtcaataaaagtgcagttttctgaatttactcaaaaaactaatatttatgtttttactctgtaaggaaacaagaaatgttgtatctaaataaccgatatattgatatctatccctaattaataattattaatatgtctcttgcaatcatggtgattactcaatttaataaacccacgcaacgagcatacggcatatttggaatctttcgaggacagaatacgacacttatccgataagggttttgtgaccaaagccaagacatagatctctaaattctccctcttttgcacttcatgttttttgaaaaggggaatatcattgcttactcctggccttctgtggtggagtgtgaggagaacctcctcctttcccctgtgatgtccccctatccaagaactaaaaggcaggataaagccaatggttcctttctcttgccaaagatttgtgcaaatcaaatctttctaccacctgtcctaactcctcagccttcctcaggt

SEQ ID NO: 41134 - DNA, 541 bp, Oryza sativa
ggtcagggaggagaagcaaatgatatgatggaggggtgccggaagctgtccaactacatgatgtacctcttggtgaaccacccttccatgctgccgctcaacgtcagctccgaggctacgctggctgaggctgcgcagctgatgaaggtggtgagagggcgagcactggaggagatggtggatccagcgacgaaacgttgagggagatggtggacatgtggacgaggctcctcatctacaccgccggcaagtcccgggggccgatgcacgcggcggagctggcctgtggaggggagctcatcaccttcgtctggctgctcatggtcaaggccggcctcggggattccgaggcgaaaggatcctcattgcaaattctgcttgcgccgacactaatacgaaggaagcctatgccttttatttcgcttcgtgacgtgtatctatgtaataaccatgagccgccggtcagaccgaccaaacacctacggtgtcagaccggctccgtgaaggaataacagttatttcaaaattttagtaatgtttt

SEQ ID NO: 41135 - DNA, 744 bp, Oryza sativa
cacgactctggatctaagtaagtgatatttgcataaaaatatgcacagtaagagtataaaataggaaaaccacatccatttcaaacacaaccactgaaaagcatttgagttttatagttcaggatgaaaaatgaactttaccgccaaattaatgaggtcaaaactacacataatataatctagacgggaaaggttgctgcaatagattggcatgtaagaattgtcaagttgtatgtgcactccaccaaattatctatttgttccacccaaatcacatctgcaaacaatttatttatttttggcaaaaaataaagggaccttctacatttatgtcaaaaaattttcattagcaaacaatcagaattccagccatatattatctctgtgaaattcacaagttacaaggatatttattgtaaatttcatatgcaaaatatcacaatgaaaagtttacaggtatctgctgtgctgtaataacatgacatcaagaatatatggctgaccaactattaacctcggttcactagaaaggcacctataaaacaacaatcataaaaatttaaatggaattgggcactgctatttgatccacacgaattgcttgtttatcgatccagcaaacactacaacaaaaatgcactgtagagacatctttttaatactatagaaacatttttaaaatgcctctacaatgcaatggaggcatttttcaaaataccttttggtgaattatctctagaagtg

SEQ ID NO: 41136 - DNA, 949 bp, Oryza sativa
taattaataattatcatcattttttatatatcatctcttaatttctacatatatatttgttactaaaatatgagtcctcaggtttgaacctatattatccttttctttctcatcacaaaagtaggaagttgacgatgggggacggtaacatgtggttcatttggtcgtataatatcatttccatagaaaaaaaaatactggagagttggtgatatgatggtatgagagtcaaattaagcatacacgatcactgttcctttttaaaggaatatagatatccgagaatagaaatgtatgaatgaactattataaagttaattaatagctatttaaaaaatagtttttacgaaacttgtaccgtttagaattttaacaaacataccccccatatttttcatccattcatgagattacaaccggatggaatttggttcccaacatgcaaactattactatacgtacgcggccagctccatcgcgtaggcaagcatatatggtggcaatagctatcataaaatcacaatggaaaatatttccatgttttgtgttaaagttaaaagaaattattgtaatctaaagtataacaataatgtaacattccaaatgtatcctaaaatgtactactaccaaacttttcgacatcactactacaaaatatcaaataggtgtcgccactataggcttttttccacctccgcggattgaaatcacaaaaaaaaattgacatctttaaacaattataagtgtcggttctaaataaaaaccggcacctattaggtgccggtttttataaaaaactgacacctttaatatgtcaaaaaccagcacctattctaggtgacggtgggaggcaagtggcccatgccccctcagctgcgggaggcggcatgagacggttggatgaggtagcctgcgcccctcagcggtgggaggcaggcggcccgcgccc

SEQ ID NO: 41137 - DNA, 797 bp, Oryza sativa
tataggtaaatctaccctttgtcgtctttttatgattggaagtttgtagtctcttgtcctattaaagcctgtcggtaactttgtttagatagtctcttgtcctattaaagtctgttggtaactttgtttagatatttgtattggcacgtttcttgttttcaacacgagtttttcctctgttgacaagaaaaaatgagctgtgaatctgttaactgttatattcatattcctgcattccagtcgagtccatgtttgtttttcagatcccttaaatattgcctcatttttatttttgacggttcataaaaccaacaagggaacaaatgaagcaagctagagaacaaagcatgccatcagcacccacaacacaacatgaacaccaacattagaccattggagtgttcagtgcctaacatgtaacagaagcttaacacaacacaactttccctgtcattttgtctgacattgcttggcaacttggcatcaggtaacagttaaatgggcttggtcctttgggacaatctgttctttgatccacatggagaccggtaccagcacaagtaagaagcacagatcatttcgttttgttggcattgcttggcatcaggaaacagttaaattggttggtccttggggacaatctgatctttcatccacatgtagataggtaccaggcgcataataagaagcggcaagtcgtccccatgaccaagcggaagatgaaggtgaaaaggattcactggtttctcaacatcttcagcctttggaccaagttgcaacaagaacaaaaggtgaaa

SEQ ID NO: 41138 - DNA, 1094 bp, Oryza sativa
cagcatctctaggttaaatgaggaaaaacaaaaaggagaaaatttaaagtaagcacgaacaactctacattatttaagcatggcatatttcatacatttttaatatagttccctagctgtttgatgaatgaatttcaattttggtcagaacacatgcatgaagtaataaagggaaaaaaattacagagacttaatatcagataagagatgatcaaattgtccatacctgacaataatggcatccaacttatcatcaataatggatgggccataaggatcctcaataggctccacttgtactaccagttctggtttaacagactgcattttatacaaaaccaatcatgagctttcaacaaacatcataattgagcatcccagaagcagcagtttcacttttggcagctcctcctaagtatgaacatgcttaattgggtatgtacttatgtgaaactgataacccttacaagtttttttttcttttttttgcggggaataacccttacaagttaagaagcatgcaattccaaaattctatatttttctaaaatgtagacgactaggaacaggtcttcagtacaaggaagttatggaacaaatttcgcagcaagttggtcctaaattgccacataactcttcaccaaaccaattcactgtataacttcttattactcacctaaagtaatgtgccacatgagagaagctaattctcatgcgcgaaatctaaggtttactgaattgtctttgtacagaataaattatacaccgcctcccaaatcaactgaaaattacacctttgatttccttcatttttggaagagaaaagattcatcttgtcacaacgtctcacaaacagcaataaaaagcagctcagtaacttaattcatgcaaactgcttccactagtcatcacccaatgttccaatccttttaggagtatttactaacagaaactatatactacataataaagtaggcaagattatcccccaccttgatgtaatcctccacagccttcatgcgcttttcgacgggctcgatcaactcagcgtactgcaggcacacacacagagggtggaaatcaagaacacaacc

SEQ ID NO: 41139 - DNA, 1167 bp, Oryza sativa
gggagcggcgacggcgagccgacggggtctctccggtgatgtgggctgaggttgccggcgattggccggcggcgcgagaggaggaagaggcgaagagcactttctacttttgacttttaccctttatttcgtttgtttatttgtttctgttttttttctcttgcgaggaaaagaggagaaaacgtacacgtggacggtccagattgactgattgacttctttagaaagagaacgtatacgcacggcttccaacttcttctgccgtggacggtccagattgactgattgactttgtttcctagaactccatccgtcccattttaaacgcaaccataaattttcgcgtccaactttgatcgtccgtcttatttgaaatttttatagtatttttattgttattatatgataaaacataaatagtacttaatatgtaacttatgttttttaatttttttaaataagacggcgattaaaattaagcacgaaaacttggacggagggagtaccacgtagtccaagaatttctttattccacatgaaatgaaattctttatctcacgcttggtgttaaattttttgaagaggaatcatatttttccatcttttttctcggtgtagctctattttttttctaattctttcagtagtaggtgataaatccttccacagcgaagcacctgtaataacttcatcaatctcaagacatattggtcaatctttaaaagtgctaatagggataggttgtaagtgtgtgcatggatagcggtggccggtgggtctgcgcgcatatggacacctatatctatattatgtttagaaaagaaaaaagaagaatctcccacctaaactccgcttgattctcatctctataaccaaacaaggggtgtgttcgctaccaggggatgggaacggtgtacagtgcacacgaaaaacggggcggtacattagcacgcgattaattaagtatttattttttttaaaaaaaatagattaatttgattttttaagcaacttttatataaaaactatttaaaaaacacaccgtttagcagtttgaaaaacgtgtgcgcggaaaacgagtgagagaggttaggaaaagtagcatccgaacacacccaaggtcatcaacttttctcttaatctcccaatcccctttcccaaacacga

SEQ ID NO: 41140 - DNA, 679 bp, Oryza sativa
gcgggcaaactggaggaggcccagaagatccagctctacaccggcgggctcctgccaccgcttagcctccaagtccagatgcagaacccccagtccgtggcgtccgccatgagtctggcacggcagttcaagctcatggccgaatacacgaccgcgccggccaaggctccgggccgcgcgtcctgggcgccccacaagcgcgtccggctctgccggcacccccgccgcaccctgacaagacaccggcggtcaccaaccagggcgagggccgccaggcgaagcgcctcaccaaggaggaacaggcggaacgccgccgccttggcctctgctacaactgcaacgagagctacacccgggggcacaaccgtgtttgccggcgcatcttccacattgccggggtggagctcgacgacgacgccgccgccgacgctcatgaggagccgaccacggaatcgccggtcttctcctgcacgcggtggccggcgtaccgcgcggcgggacgctgcagatcgcagtcaccatcggcggtgcgccactcgtcgccctcctcgacagtgggtcgacccacaacttcatctctgccagcgccgcgccacgcacgaggcttccggtggagtccagaccgcggctcacggcggtcgtcgccaacggcgagcgcgtcgcgtgtccgggcgtcatc

SEQ ID NO: 41141 - DNA, 938 bp, Oryza sativa
tattgctagtgggtgatgatgtggtatggttgcatgttgagcgcttagtaggctataactttatagaaagtatagattagtcatagaagcccgaaatcaaaggtcatttatatttatattgtgtgactacatgagtctagaattgatgaggataggggcacatttataattttttatttagtggatcgaagaatgaaaaatatttaaggatgaaaatgcaatagtgcttgacaaatggtctggcagagccagggtttacgatttcgagatggccttctgtttcgggctctagcggaatgacggttttcacgaaatctggtggacaacctgtagattccgaacaaatttcacaaaccaaaatttgaatacaaattttctgagattaccaataagctcgcaaaaaccggtcagatttggcaaaattccgagcaaaatcatcgaaatttcaatcggtaactagaaaaagaggtaagtatttttttaatttcattattcttttctttcctactgtaaattaatacattattttttaaaaaaaaattatcccataggttctatgaagatcatactatttataagatttttttctcttttttatcaattcaaatttaaatttggatgaaactcattcaaatctcaaatggtttctacttttgagcctcgtcgaaacgtcgaaatttcgtgaaattcgactggttttcgtcggaattatgaacctgggcagagccgtccatctattctccatggagacgttttcagaacttttcccgtccttaattcaacatttatctgtgatgtgatgtacgccacgtggtccaatcagacccaatacaatccgccggcttgagaaggagggatgatgatatgtttagctgacccaaagctaaacaatgcaaaaaaaaattctaaaactatattttataagttaaaattgaccg

SEQ ID NO: 41142 - DNA, 698 bp, Oryza sativa
gtcaaacatccgatgtgacaccaaaaaattttcttttcacgaactgaacacaccctaaggccatgatatggagaggagaggtcatgtgagatagaacccctatagctttgagagctgggaagaagaggtggcatcacgtggcctgttcacacaatggatggaggcatttgtcgcgtcgatggctgctcacacagggagggaccccctaggggtgtgttcggcacctccttttcccaactcatctctctcgttttccacgcgcacgcttttcaaactactaaacggtgttttcttaaaaaaagtttctacacgaaagttgtttataaaataaattaatccatttttggaaaaaaaattagctaatacttaattaaccacgcgctaatggactgctccatttttcgcgcgtattgttcccggttggaaacctgtactaccaaacacaccctagggaggcatatgaggagtgaggatggtagcaaagcacctacgtgttagggcaagtactataatacttgatgtgttgcacctgaaaatgtcacatatatagaattgaatgatgaggtagaagaaataagtgagaaaagagaaggtgagccacccctcatgcaatacaaggggtaacctccacacaaacccaaaaaaaaagagatgaaaaaaaagatgggattggacaacactcccgcgtcattgagtgc

SEQ ID NO: 41143 - DNA, 1995 bp, Oryza sativa
ctaaccaccacctttcagttagggtttgtaaaatatattttctgtatacatggatataaatgcatatatataaacaatattggccacatgagctctatgattttagtctatgcatttagggccatatttaaatttttggaagtttttttcgggtccctagtgccagccaaccaccacttgagatcttaatcatacatagtactttctagtcttttgctaagctattctcattttgtaataatttgttgatgagctagcttttgtaccattttgataattttgataattaagccagggccatgtgtaaatggatgctgctcccaaagtatcaacaggtcaagcatttggatcttgcatggaaaggtcttggtgatttgatataatgaaaatgtatttagttttttatttgtctgattcctaagaaattgcttttgaattattattagcattgtcttgaccatatatataattaagcaaacaattttagcaacaagctaggaaagcgagatgcatatgcctgtgaaatgaattctatcacctgtctggtagctggcgtattgtgtatcgtgtgatcatgcattgcacacatacattagaaaatttaatgaatacagattaattaatttgtaatatatagctggcatgtagtacactagtaccttgcagaaacaaaaatatgtatattagtatataacatgtgtgtgcaggagatctacacgtagtacatggcgtgcaaggcttgcactacagtttttatcttaactaaaaggtataaattattggagatgcatgcatgatttaataattgattaattagtggagtagttgattggatcactctttaaaattatactgtatgtaggatgtactatacgtatattaacagttgttatgttgtactaatgtactatataatgcaccaaatttggcacctcaattctcatagcatgtgcttgtgtgaatgagttgtctctcgatctagctagctaggagtacgaaaaatactcccattaattaacatcgacaaaatactcccgttaattcaccatctacaggttatactccatccattctaaatatagggtgtagctatatttcttcaatagtaatataagatatgcatccatgcatacaattaattagtatttctcctctaaattcatttctttaaaaattctgtatgctcttgatctctaatcccagtggggacatgcattataggacatgcattatatttagagaacttttacggtacaacatactaccagtatatactggcagtatatagaagggcatgttaagaatttgatagaaaataaaataacactttagtaatttttggttcagattgaatttaattgggagtagccggtcctggatcttatcgtgcactaggggaggagcatcttgagcgccatttgatgatgaagcacgtgacgatagcacgatttgatgatagaataacgaagaaaagataaaattaccctttcaaactttatctgctatctaattaactaaaaaatccaatcaatctacactgttagatcatatatactagcagtatattgtaccgtaaaagtcctctatatttattggggtgataataattatttcttggtcttttaactctttatgttagtagtaacgtcatatattttggagtggagtgagtattaattaagtatgtatgtatgtacactagcatatattcaacaaatataatcaatcttaatgcaaatgataaactaatccgaagctgttcaagctattcttaactttgatcaaactactatatcttttacatgcatatatacatgcagacaaatatgtatatggctcaaattctactacacaacaaataattaagcataagtctatgctgactgagaacaaagaggacaagtaatcccttggctgcatgtgtggatcaagagtacacactacaacaaagtgaggtaaaaagaataaatatactgcagctttgcaagtattgaa

SEQ ID NO: 41144 - DNA, 1330 bp, Oryza sativa
aatcccttatattataggacggatggtgtagatcatatcaatgctggcggcagggcagcttcacccattcctttgggcagttccaagattgtatcacaagattaatagattaattatacagtatatacacaagtactagggaatcacatgttctcttctcactgctaaccagctagcatctgggaccattcatgcatgggatctctaagaaagacactggtgactagctagctagctcctatgaattaatgccaaattatttctaaggtgatatatagtttaattaatttagcactgaaaggttaacctgggcgacttcgatctggttaaaagaaaaggtcgataattaagcaaaactgaaagaaatgagggcaggagagagattacatagaacaaaagtacaaggaagaaagattccaagaacaatgttaagaaaggaaaaggaacaaaataaagaaggatctacctgcactcagtatgatgaggggtcattttggtttgatgccaaaattaccctaccagattgttgtcattttgaatagtagtttagttagtgtttagtttgttacccaaatataccaataagatacataagttgctaaaaaaattaacactaccaaaatttacttatgttttggtattgctaatattttagtatggtagcaacaaactaaacaagtctgatataaacatagtgctcctacatgagagtactcactccggtttcattttaattgacgttttagacaatgacatggtttacaagatatatctgtgactttgtttttctattataatatatataataaataaatacatgtttatttttattatagtgctttaaaagacaaatctatatatgttattttagttcctttaaactaaatatttttaaagttattgatagtcaaagttataaaagtttgaccttaactttgttcaaaataattaatatggaagagagagtatgcagcatcttcaattcattaacctgaggtaggtctatctagatagggagaaactgccaatgaagaagactagcaatagaagggatccgtagtatagctagctaaccctagatgcctagctagctatagctatgtctagacagcagcataggctgctgcaccacaagagtgaaaggctgtggatatgtgttgagctgttgaagatactactacatctcaaaatataagtgtttagagttttaaagaagcttaaattgatcgataatataataattatgattagttaatatgagaaaactattatgtgaacatttaacaatagatggttgtttagttgagatgacaaaagcatgcactactac

SEQ ID NO: 41145 - DNA, 1069 bp, Oryza sativa
ttggattgcattgggagcacagctagctgaaacatttgacagctagctaaaaggatcagtactcttttactgttaatttcgctagatatgcaggagtagcattaggtaggtacaacagtctagtatcacttgtctcgtcgactatctgctgccgtagcttcttccttttgtccggtcaatggtgtgcattccctgcatcgcattggtgtgcatcgcaatagtgttcattggagtatgattgcgcttcctccttccctccccaactataaatatgtttatgttgtttacttcctcaatactaaaatggagtaaggtcgagtttagttctaaactttttttaaaaattttttaacttttttatcatatcaaagcttttctacacacaaacttccaacttttccgtcacatcgttctaaatttcaaccaaaattctaagtttaacgtgaactaaacacaccctaagttcatttttcactcttctcatacatatcaatgcaaaaacaaaaaataatagaataccctaatataactattcatcactttatctactccaaatataactattcactactttatctattcccaatataattgtttcatacttttacaaactctgatacaattattacttaaaagaacttattttggaataaatagatggagctaaaaataaatttattatgggacggaggtagtaacaataaagggttaggagaaaacattttgatgctccttaataaacttaataaagaagggataagtatagtgtgagtgtgatcggggataagatgcaaaatatttacaattaagtgcaaggtgattaataagataagcattcactccatcccagaataaagctcctaggagtattttgaggtaattaaggattgtggtgaaattattctcattactagatggtggggtgatggaaattataaatattatgggtggagggcaggtttcaacggttgctgggatgatgagcgcgccaggtagcatgtgaagtaatggggtaaaaatccccatttaaaaaattcaaaattaaccaaaaaatggggtaaaatttgaa

SEQ ID NO: 41146 - DNA, 1306 bp, Oryza sativa
caccttatattatgagaaatgagagaaaagtggttgtgtcttatattttgggttggagggagtgaatttaagagcaaaataacagcacaaaacataacactacaagtatttgtggccatatgcatgtgtgtttattagtacttggcaagcaaatttttaagggctccttcgacacgcatggttatcaaatacggaaataagaaaaacatgtgattaataattaagatgtcatgccactctatccgtactaaaatgtacgtagctgtttctgttttgcattttgtagctatttcatgttaaatacaattttgagaccgagggagcataaaactatatgaatttctcaaaaagagtactactccattaatttaattggtttataactcgaacatagcgttagtgataaggttttaaacccctaaatatgtacttttgtggtaatcttattgccagccatgtagttttgcgatacttagcattaaacatgtagttttaatttattgttaaatccgtagttttataatacaccatcttaaatatataatccttccatattttaatgtatgacgccgttgactttttaatcaacgtttgaccactcgtcttattcaaaatttttatgtaaatataaaaatacttatgtcatgcttaaagaacatttgatgataaatcaagtaccattaaataaattataattaccttaattttttgaataaaacaaaaggtcaaacgtttgtcaaaaagtcaacggcgtcgtacattaaaatattaaaatatggaggtggtatatttggcaataattcattatttggactgaaatttcctgaaatctactcaaacaaaattatgacatcctacctaggcccatcccatctggcccggcccactccacctccctcacggcctcacctcgatacatgcgcgaataccaccactccccgaccttagccctagccgccgccgccgcgcgctcccctccccatcccctcgccgcgccgcgccgccggggaacccccctacgctaggccagccgtcgccgcgcgccccgcaccctttctccgccgccgggcctgccggcaccaccgccgcgaggcctcggttggtatccatctatctatactatctatatcttcttggatggcagttttttttatcgagatgtgttgctaatggtgctgcgttagcacgcccactcgcgcgcccgcaggtggtggtcgaggacgccatgcccaaggcgaaaagaaccctcatgtcttctttgacatagcgatcggcggacgcgccgctgagaggatcacatttgagg

SEQ ID NO: 41147 - DNA, 1219 bp, Oryza sativa
caacaggtcttgaagagttcaagagctgcacgtggagacaactgcaacgtgcaagcgttcttctgcgcaggatatcctgcgcgcatcagttctctgaaaagagactgcttccttatccgatccagacgagacttgcgtggcgtggaatcaaccggtttccagaacgtccaagaacaaacaggcctgcggcgaagcagtgaagcacccgttctcgctgcctttgcctccgaagaggaaccacgcaggcagcgatgaggtagcgctgcagcattgcaaggcagagctagacctgacatgcaagaatatgtactgcactgcttccctagaaaaaaaatattgttccaatcagtccatattattcctgaaaaaaattcttgctccaatgaaattctgcattggtatagtagtacgtagtactccttgtatagctagcttaattagcaccatacattcatcatggctgatcacaccatttcattgcatgtgtctgtacgtacgtgccatgccgacgcatgggccgtactccgtacctcgcacattactcgcttggacaaattcaggcggtgcggcaggtgcatcgcaagaatcgatcgatcggcacacatgccgcagcagtggtcgcgacgacggccggcgcccacacggcgtgtacatgatacaccgtatctgcgtctgcactggcgcagttcaatggatctcggcggttgccgtacgtctcatcgatcccctactccccctgtgtattgtatgatatccatctatcactaataatctcctggttctacagcgagcgtacagtgcgtacgcgtgcgtgcgtgcatgcatattgtgtatgtgtgtcaagtgcgacgtctccatccatgattaatttgagcggccggtaagcggctacaggattcttccggtctaagcgattagctagccagggacccctgcatgtatacaaatcactcgactagctcggacgtactcgatccgtccatggacgtgaaggacacggtcgaaccgacctactagtagctgctgttccagcgacgacgatcgatcgatcgatgtggggagtaccggacggcttataaatgtgctgcacgatatcgatcgatatgattaatcgtacgcggacgtctggcccctgggcaccaacgaccgatcgagctacagccaagagccagcgtacgtacgatctactatagcattaactgtttccgatctctcctga

SEQ ID NO: 41148 - DNA, 2428 bp, Oryza sativa
ccacggtagcttgctatcgggctctcgcgtgtcgccctagcgttgcactactgcttgggcccggcgcaccccaaccaatccacgtttcaaagatttgatctgctcatttagttttatagattttcatttgttataaatatttttttcaacttgcctaccgcagcgcaatgctgaattgctgcctgggctgaaaattagtatatcaaattagtatatcagtataatcaccggatggacgggggcatttttcctggtcgattagtccatttccgtttccgaaccttttggtcgattaatccgtttccgaaccttttctggtcgatcaatccagttccgaacctgcatggctgttattcgatgactcctgtttcttgactgtgttattctttactaatccctctcgctgcccgtccgttctatcgcaagggcgtggtgttggggctgaaggaataaaatgtgcatacttgtaacatgaataatctgtaaaaggatcagtagagatgtaggtgaatcactgaaacatgcaaacgtgcagtaatatctcatctgtattccgaagacgtttttgccctttccgtcagggcgtcggggaaagcccattaggcccagtttagttctcaaattttttttcccaaaaacatcatatcaaatatttggacatatatataaagtattaaatatagataaaaacaaattaattgcacagtttgtatggaaatcgcgagacgaatcttttgagcctaattagtccatgattagccataagtgtaacagtaacccacctgtgctaacgacggtttaataggctcaaaagattcgtctcacggtttacaggtgagttatgaaattagatttttcattcgtgtccgaaaaccccttccgacatccggtcaaacgtccgatgtgacaactaaatattttcttttcaccaactaaacaagcggcagttattgagccttttcatttacaggcagtggaaagcaacaatactagactaggcctatcaatcgtgtatcgaactgagacagttcacaagctcagctacgcaaacagagcaagagtcaacttttgtagcatggtcattaacataaactactcattcgaggtctcagtcattatttgacttatacttataatttaaaatttaaatgttacaacttggagtaagtttccatttgttttcttaatcatagtttattttacttcatttgcttttcttttacgggtcacgaggacgaaatgaagtgacacacttagtttttttctcgaacacgtaaaagtattacacgtcaatatattaaaagaatagaatgacacacttagtcttccgtgtcaatcttgttgggctaccttggaggcaacgcctcagcacttccgcaaccatccacacctactcgtcgcctaaaaacacatatataaaagttttacttataaataatctttatttgctaacaaacaattaagtgaaacaatgggttgctcgatctcaagctacaatgttcacacaaaaactatagatttcactcaagtatcaccttggttttcaggtacatagtacgtaccattgctcatcctacccctagctagctggacgcaattcgaagaaactgatgtagtgcacgctggtaaggagtccaaggactgataacctcagaaaatccaaacaaaaattcctaagcaaatcctaaaatccaaacaggtaggagtagtgtttaccatacaccattccacgcagctaactcaatctacgcgcccacagggccacagggaccgacgctactgtctcttacacccaaccccaacgaccaaagcgggggagggcggagctagtatatatagggaggtgttcaggaaccggtcaaaaaatttttttaagctatatatcatctattttcatcatgtatgcactcgtcttaatataaacttagacacccatatgagcttaaactcgatctaaaatagaataaattaagcaagtggcaacatcctcctttacgctttagcaccgcccctgaagacaccacgaaccgtccagtaacaaacataaaaaaacagctaacgacgaacaaaagctacagataaactaatcgcgagatcaggagagtccgtaccagctgacggaactggcgagcagatgagcggcagttgcggcggaagaacgaggatgaggacgacgagagaaggctcatggtggggctcatcggcggcgacctccccggtggccgtcgtgctacacggtatcagggccggattagtggggcgaaaaaaaaatccagcagctcagtcgtcgtcgattcgctcccggcgtcaatccgggccggacaagtcaacaagccccgttccacatctcccgagccagccacacccgtccgatctcgcgtcgcgattcgtgcaattccgaccggcaaaggccacgtgggcggccgat

SEQ ID NO: 41149 - DNA, 2305 bp, Oryza sativa
gataatatccaaattaattgcgtgtgatgtgcagcagtaggaggtaaagtatgcttcccatggtagaattggcgccaatttttacttccctctcagacttttccctccaaaacacatctgctcgagtcagagagtagttgaatagctgggggaaattaagcaacgaatctagaccatcccttgtatgctggatggttagatgatggatactgctaaagttacatgatccgaatccatctacccctggcttctcatttcacacggcaaatgaaaacagtatatattattgtcctgtgcgtgcagcgtgcgtacgtgtctcactcttgttggtgtttatttaccggcgtccgtcgccctggtcccgacgtagtacgtggtgttatgttaacaggcggccgaatgtcgggggtgattcgtcccctaacctgccactgacaaacaacatggcagtagaatcgcagcaggtacactggtactggttacagcaacagttttttttttaacaaggctttccagtttccacatgcgtgtgtaacttctttgtaacatccagtgtgagtgccggcgcgtctttacatacatatacatacattatacatgcacatacgtacatatacgtgtcgtgaatgggcaggatctcttagggtgtgtttgaggagaagggaattgaggagattggggagttacgcaaaatgatgtgagccattagctcatgattaattgagtattaactattttaaattttaaaaatggattaatataataaagcaattttcatataaaattttttttataaaaatgcaccgtttagtagtttaaaaatcgtgcacgcggaaaacgagaatcaatctcccctatctcccgagacgaacagagccttaatttactcatgctgctgctgctgcgtgtgctgctggtgtacttggcccaacgccgacggttgcaactgtgcgtaggagtggtgtggagtggaatgagtggcttggagtggattgatgcgatggcggggcacccgggggaccgtcgaatgcataactgtaacaacagttgagagcctatggctaccgaacttttttaatggatcggcgtcgctccttttgggtttattttggaccttggccggccggcctgggcctaccgttttgcggtgcccccatgtgaagcgagtaaattaaacaagcggacaagtggagagattttggttgcaggcgacgatgtgacgccttcgtttggccacctagctcactgcacgcgccatggaagacgaaggtctgtgtgctctgtgtgcgtggagggttcgggtggttctactggcggagaccacatcgagcactccagtccgactgactgtgtggcttcagtaattaattaccagtagaatccaatatgccatgtaggattgcttgcctttaaaagtcttggttgcaataagcttcacagatctacagtgccctgcatatatacacagcttgtttagtttgtactaacacttttaacctttggtatgacaataaccaacattgctatcctactaaaatttatgtagtttcggaagttttcactcttaaaacctcaaaaaaaattgatgatggtataaaccaaatccatctcatcacatataaaaaatttgacatcaccaatttttgctagggttagtttgaacaataaaacaaacatacttggtgacatttgaaattattaactcgattacaatgttttttttaagaaacattgtacaaacacaaagctttcacaacatgcgcaggtgcgcgcacattattccgagtatcttcgaaagactgaaccgatatatctagagattgataaagtcaacataagcacctcattatcaacggttacgacgcctaccactaaaaaaataatttaccataaatacgagtactcgtgccaagtctagaattttagcccaagtgggctagttacactacaagaatctactagtagagctacttgattacaatgttaggtcctttttggcatagctgtggatccaagatttttggagctggatatttctagattaacaaatctatggatttaatatagtttgttgataacatttatataaattattttgtgctcatttcaaataaattttaaattttaagcactataatttagcatataaacttcaaatgtactatggatatgagatctaaagccgtactaaatagagtgattggaaaaaaaaactttacaaataacaaacagtttggaatacgtggcataaactatgtagtaaaagattttttttctctttcataataactagctgggtggcccg

SEQ ID NO: 41150 - DNA, 1353 bp, Oryza sativa
ctctgcgtgttgcatgatatgttcagtttacatggttgttcattgtgagtatagcatgtggagaagacacagtcacttgttattttaattaaatatttctttttataatctatactaaaaaaacgttttgtttactgcttctattatatgggcaggagtcttgtactgtcaaaatcgaacaaacatttgattttgaagcttgcagaatagtaaatactaactcacctaatgatttaggacaaaggctgggatgacatcggctgcagaaagtataaccgagagcctccgccgatctcgccagttgatggtccaggttagtgcacctgttttcaattgatattttatatgctaatgaatttttgctcttaaattttaatctaactactatacatgtttacaggaagtggaaagaagtgcaaataccttggcaacatttggtatgtttcttgtgttcctaactaaatctgtgtacaagagccaagaggcgcagttgtaattttattctaactattaaggcgaagttgtaagcgaactttaaaattatgcagatgaatcaacaagtgttcttcgtaaggctgaaggtgaatatcaaggacaccgctctttgctgatgcgtactcgtggtttgctatctacaatgcaacggcaagatgttcttgataggtaagtatcttccaccaatctttcgtatggattggagatgtatgatgtgggccatgtggccatgcggtaaaaattatgttttccgatcaataaagatcatacaaaccacatcttcacataatgcatgtgtcaactgccattcaccttttttccacctctggatgaactcctcaccttgttgcagatcatctttcattagatggcaattaaccgttgtaatctagcctactactgcagaaaatacatatcttataagactttattaggatcgcccagttggccagttctctcttatcagactgatactgcaaaatgcattgacccagaaaatgcatttggtgtggccagggtgcattctcttaattatctttgttcgaaggagtacacaagacagtccaataagatcctgtgcatagatattgcattactcattcttaatactttcatttggaaacactagtaaaatacttgtgcgatgcgatgatttatttaacataaaacatgattatgagttctcttggtaaaaaaaaatcctgcctcatgtgtgaaaaagcaatgctcttcatcttaaaaggcaaaagtaaaagagtgaagcttcttgtcttgctcaaatttcaaatggatggtacactgaagagagcaatcaaattgctcatgtggggtcaaccaatcccatgggcccacatgttg

SEQ ID NO: 41151 - DNA, 2416 bp, Oryza sativa
cattattttctgtatacatctcttaaaaagttagggagttggtggtggttcagattcaccactcaccaccaccactattcctttttaaaggagtatagatagaaatgctcttctcttttaaaaaaaggtggaaccaaatgcgcatttgatttaccaattacgttacttgatgattccaattttcttatctgccaaacaagtttctgccggtgcaatacttagtattaatactattttctgggttgtaccaattgctaattggctttctttaccaggatcatccttaccattggttttctcattttctccttggcggtgctatatgttgtctcgagacgtattggcctgttgacactgcaaaggaagctggccgatgccatcagatcaggctcaatatcagctgaagacgttgtagcaaaagtcaagaatgtgcctgtcccagcacctgctgctcctgctcctgctcctcctatttatgatgaactatgatttacttttgtgtattgtttgtacatgtagattcagaagaaaatattcaccatcattgtcagttttatatagtaaactttaaaaattctgattaaggtctctattaactttttttaccgaggaaatgcaggagctgtgtcatgtgtttcaagtaatatttgcaaatggaggatatgattggggacggatgttgttctcagccttcttcggttaaaaaatgtgttgattgcacagttttccaatctcttgaaggaactaattttgactcaaacggtatttactggtattgcgcatccatctgttcgacatgtaataccagcgaatgtaaggctagtttctattgccaaaatgtatttccttctataaccttagcgtgatcagtaaactggagtgaagttttgacaaaagccaaaataaacacggtgtttttcagaacttgtttgactttctattgttgtaggagagtatatatcctgctagcttggtaggtgcagatctcatactgaaattcaggattcaggtcttgcaaaaaattgctgggaataggatgaagcggcagaagtcgtgcaatggatgttgcaacacttagtcagactgctgttgatcaactgatttgattatttcaagcatgaaagctataaaaaaaattctgaaaaagagcaccagttcaagttctgaaataggagtaagagctaattgaatttgagctaaatgctaaaaagttcctagagcattcccgccaccgttccaccaagcagggcctgacaaattaagcaccgatgcatctctgagcctctgaaaacacaacaactactgctgcaaagagcaaattttgctcttccatggcatttgagaattgtttccgatgcatgtcttccatgacacttgagacctgtttcagctgcaagcaccacagaaaactaattttggtaaatcaacacatgagctccactgtctctgatgagatcgtatcgtattcagggattaagagagagtattatatgcatgccagaccatgaccatccatctctgcagttcaccgactcaaaaatactcagggagaccagctactccgaaatggccctgtggcctgggagcaaatgagctactgagttcaattggaactgggacaaatatgacgaatttctagttctctacagttctacttcagcgagacattgagtgaagatgaagattaagtggttgcacgtaaaatgagaaagtattaacacatgattaatttacttcaattattataaacttgataaatagatatattcgatattttaaattaacttatatttagataatttttgcacagaatatatcgcttagcaatttaaaaggcgtgtgctaccgaaaactgagttaaaatcaaaatcttaatcagaaaagaacagggcctgagcgaacgggggaagctagctggcgtgtgcggcacgcacttccgcgttaacgctaatgacagtaatttgaaaaaattgtgaagattttttttcggagatttttttttactaatagattaaaaaattaagttagatttgaaaactttcgacttaatatttaaattttaaagtcaaattttgaaaactttcaactcagattcgaaaactttcaactcgagattcaaaaactttcaagtccagatttgaaaatttgaaaactttcaacttgatgtttgaaaatttttaactcgagatttgaaaactttcaactcaagattcgaaaactttcaatcccaggtttgaaaattttcaactcgagatttgaaaactttcaagtccaaaattaaaaattttacattcagatttaaaatttactagtaaactaatcacttgtaaaaaataggaaactaatggctattaaactaattacgggttttttctcctacccatatggcatcaaaactgcaaaggaatgaaaaaaa

SEQ ID NO: 41152 - DNA, 1299 bp, Oryza sativa
caactccactccagacccaactcctagagctaaatttaggagttggagctgtaccaagcaggccctcaatccatgaggagatagatatgtgcttgttatgttatagggcagttcgggctgtactggtccggcccaataggatggcgaataaaccgggcccatatacggcgcacgcatcgcggaaccgggtgctccgcaggttcgctgcctttcgtcgtcacgcacatgacgacatctgggcctcttgcttgacgtatcggaacgccaaaaatccgagaaaattttgagccaaaaaaacaacaggctgatccgctgatgaccctcactgtgaataatcccggttccaatctgggtcaggacttaggactctcaggagagcgaggaacaacacacgccacaccagcggtcgttcagtccagttatacgctcctccttttaagcttagccatcggattgttgtaacggattggattatttactccactcttcgattaatacgatttatctattatattattaatacagctcgaaaaaaagacaccacgttcaccgtggaggctagaaattcccacgttaatcgaagaaaatatgaattatttataccgttggattgtaagaggcatagatttcaatgtctgagatttaagataaacttggcatgttaattaagagatacggagtacagtacgcgtgtagaattagaatcaatctctagctaggacctttatatgcaaacggactcaaaagagttttgtccgatttcctaaaccaattaaccaaagttagagatgaattaggctataatatacatatataaataaagcagcgggcaacgaaccactgtagaaccgtaatttggatgcgtttttgttaatatgaagatagatgctaacggcgagcgatggaaatccgaagcagcgggtcaagccgtgcggctgcacagtgagccgtatttgggtgatgcacacgtcagcaaccagaaaagcatgatggcatgtgcacggatttttatttgattttgaaataacacaataaaaaatgaaagaagagttcatatagaacacaattaaagattaattgaaatccgtaataaaaaataaaatagatttagaaactagaaaaatcaaatataagagttcaagtaaaaataaattttacaaacaactgaaattaggaataaaaaataagaaatattagaagaataattcatatagacacagtatgagattaataaaaaaaatatgagattaataaggaatattaaaagaagagtgcatataagaactcaatatgagatta

SEQ ID NO: 41153 - DNA, 977 bp, Oryza sativa
aagtaaattcaaaaacaacggccggtccgcagtcgccatgtctctagtaccatggacgaactagtttattcttagagtaaattgcgccagcggtacaaaaactagtaggtgggtgcgatttaatgtaaaaaattgtaaaataagcaaactgatacataaacttaacaatcatgtgcattttgataaaaacacggttacatacctatggttcatcgtattttattggttgtatttgtaaacatgactgctagattaattgttggcaatgagtatgttttacagtgctcatcaccgaatttgtatgatcatatggatcgctcggaaattttgttagttggcatgcacttagttttgataatcattatttttctaattttaaataataggttattttagtattgtaaccaagcaaatgcaatacatctaaaaccttattcggaactcaagatgacctaagtggctgctttttctttacatagctaaaaaagtatggtgtggaagagagatattttaacaaaaaatgcaggcactaaccaagttgttacatctatataatcatttttcaaattcttgcactagatcgtacctacctaccacgcaatttactcttattattacaagcatgagctcatgagcaataaccttggctaataaattggtaacgcgatgaaaaagtcatccaagaaacagaagtcatcgaacacgatcatgatagggattagtaaggaatgtttaatttggtgcgatcgaaaacgtcttgtgtgaaaggtcctccttcaactgcagaagaggttcgcaaatgtattgctgatcgaccataaatggattaatgaaccaggaaacatgaatatctaatctactaatatgatcctttccttgagtgggcctcgaacatatgatcctttgagagttgagtgggcctcgaactgaggggctatgaaggttgtgccattcaacatcgcggcccaagtatcatt

SEQ ID NO: 41154 - DNA, 702 bp, Oryza sativa
caaacaggttatggggatccttttgaatttccttttcgattccatctgaaaattctcacaacaatcaactctatcaacacatcaactccagacctcagcagttcagcaaatgcaacagatggagtctgagaagctcagatgacacagaagcaccactactgcacactgcaacagcgaaaggagattacgccctcacgagtcacaggaccccgcgacttgtagtggtatgtcaggactatggggcatgggccattgcctgcctagctttcctccgatcccagtagtggttcacaatctgtgatctgtgcagcttcttcaactcgcaaactgtctgttcagtgatcccctgataccagatatctggcatgtagaccatatattcaacggtacgcagacagagcaccgcattgcagctgaactgctgaagatttatactcactctcaaggcacattgcattaccggtttctcccgcacattaactgatcacaccatcatcgcatcaaagatgcaaataggagtacaacacaaacagtgcttgcaactatatttgcattggttttggaagactaggatgcgttatacccggtttttggttttggaagactagcgatgcgttatacccgcttttgcggttcagtgatatgatttaaactcgacccttagacgagagacttcaagtgaactttcttccctgatatatc

SEQ ID NO: 41155 - DNA, 514 bp, Oryza sativa
agtatatcaggagagagagagaactactcgatctacctgtcttgcaaaagctggggcatatattttcagctgaaaagaatggcatctttctcttcattcacttgagccaagatcatacgtcacacattgttgttactgtccatgcattgcaggcagcagctcacttttactcctacagttccaggaacaaaattgttccccatcttttcctcctcgttaattattatttcttccatcttttcttcgtaggcctcaaacaaggaacggtcacaatctgacagtgacacgaaatccgaggcatatgtggattggcttttataactgaatcccccacgggacaagtgcccgttactgtagcgcctgcctgcctctacagtaggttgtctagagaaaaactgacacctgtttctgtgtgacatttcaaccgaagcatgcagtagactggtagcaagtgctagtggtagctggagtaatctctacgtcttgatgatgcagtatgttgtgagtagcttcg

SEQ ID NO: 41156 - DNA, 3545 bp, Oryza sativa
catcacagggattggcattagttgactatgaaagttttgaggaagcacaaactgcaatcaaagcaatgatgggactcagctgttaacaaggactgtctatgttgactgggcattcagcagaggtcctatacagaaactcaccagtacaaggtgtgttattaaccatgcttttatcttttgcatttgctgggatagggatttgttgtgttacactggcatagggtttcatttactccacaatctcatcaccaaacaatgtcttgttcttttttctgtttgttctgaatctaaaattctaaatctaaatttcctggcaattgccctttcgtgaaatcttgcatgcaagatctgtaactgtaacatattgtttcatattcagtggctattttttccctatcctagtggcctgtttatttggtttggtttgatctgggatttgcataagcagttcatccagacttgtggaattttgacataattagactcgtgtaaacctgttaacctggaagacattacctatgtttcatactccctccgtcctaaattagatgtcgttttgactttttgcttgcaacgtttgaccattcgttttattttaaaaattattgtaaatataaaaaaggataagtcatatttaaagtacttttgataataaagcaagtcaaaaacaaaataaataataatttcataatcttttgaataagacgaatggccaaaagatacaaccaaaaactcaaaatgacaactattttgggacggaggtagtaagtttttttctgcagaaggtccagtgtttgtgaactcatactatcacatctgatctaggttgagtgttaactttattcgatctttggtgtgcaacttcaaccactatttttctattataatataatgataatatctaataaaattataatattgtaaaagtacttataaagtagtaaagtatacctatatgttttctacgctttcaaactatatatttttagagatgatggtcaaagtttcaaaagtttgaccgaataaagtcaacaatatcatatatttaaatacggagggagtactaaatagtccatcacctctagctctattgctgtatttccaaattccaactacttcgataaattgatggtggaaacaagtagtttatatttgtgggagcagaagtgtttttgttctcttagttccgtgattatgagtaaaccgcaaatgataattcactgtttcaataaccagtctgaggtaatgatatctgagaagaaacaaagtgagtccaaactctgacctatttcttgtgaactcctactacgtacagtattagacagtagcgttgaggaagcgttatctgagcctgatctaaactgcagctagtgcaatgccccattctctagacgtggaacttctgtcttaataatcctctggattaattgagtgcagatttgtattgtgtaacaggaattcagatatggtgctgaccacttctggctagaaattttatactcttactctgtttaacctgctgactagtttgtctccctgacaggccattacatcggcgatctcggactccacctcgcaggcttgctgccttgacatgttgactgggagctactatgtccgcaatcctgaatgttctcggtctgtgttttttgatagatggtacgaacgtagtcttaaccgatgtatggtgtgatatatcttccagatccagcccccctgagtcttgattctgctatccttatatatctgcactaagtttgatcaactttgtttgttgaactatgttctcggttgctggcctgtggtagaggctgttgtactgactgagtacgctagctagaaggtatattgtgtagtgatgacgttgagatggaagtgtctgccgacttaaaagcctactactacattttaaggaaaacaactttcgtagaaagaaaaaatgctctcttttgctattgtttgctattgtctagttcgtgcttgttcattttgacagtaataagttgtgcggtatgcaggcttcatttgcaaggtgcaaccacgtcagtttgcctggttataactgatgctattgttagattcaattgtgcaaaccattaccgtttccttgcagtatgcagacttgctgagattccaccgcgatcctattgttgccgtcttacgatgctgtcaatacttgcggccgtatctatctagttgtcatttgcaggttgcaactataaatacccaccacatttgtgctatctcctcatcactttggtggaatttgagcgttccaaaaagagggtatcatgattgttttaccacgggaagcggcgtggtggttgtccagccagtaatttttgctttctgggtctgtgtctgtctccatccatccatcctctcccctcggatatcggatatgagctactccctccgtctcaaaataagtgcagttttaaactattcacgttcaacgtttgattgttcgtcttatttaaaaatttttatgattagtatttttattgctattagatgataaaacataaatagcactttatgtgtgactaatttttttttatttttttcataattttttttaaataagacgaacggtcaaacattattttgagtaccaaacgtgcaactgtgcgagagtaatgtcctgtgatctgatggtttccactgcagctgcgagcctaaccatccgagtgcgccgtccatgcttccctgcggtattattgccgaccttgaccacggtgcaggtgcatgcccgtctctcagggaattaaatttgaaaatttattgttcattcaatttttttaaaaaatattcgggattcaaaatcttttgcacaaatataccatcggtctcgcacaaccattacgcacgtgaaaatgacgtcgcaaccggtatcgcacaagtgcgagatcacgcggtctcgctcaaacaatcagcgctatcgctcaagcaaacagcgaaaccgttccttcccaatttaattatcctgattaaggattttaataattaattaatccctaatcaggataactaattactaattattaattaattgttaatcaaataattaattactaatcaaaaggagcccattggacagtgtcgctgattgcttgaacggtctcgctctttcagtccgcgaaaccgcgcgggctcgcggtattgccgcgggagaccacccgcgacgtcattcctgcgtcattttcgcgcaatggttgtgcgacaccgacggtatatttctatacaagtttttgcatcccgaatattcttgagaaaaaattgaatgaacagtatattttcaaatttaattctctctcaagtgatctagctgatgcaacttaatatggcctagttagtacctcttccatcctcaaatatactagcaacttttagttacatgtctaaataactaaattgttaaaagttgttaatatcctggggaccgagggagtaggacaaattaaacgctcactttacttatatctcaatttcgagagcagtgttaagaataaacgtgaatcgttcattcctttttatcatattaa

SEQ ID NO: 41157 - DNA, 2861 bp, Oryza sativa
aaagaatcccatcacctagctatatactgatcctttttgttttctatgagtgacactagcatttgtctcttgcttttggtgatagtttgagtgtacttaatttatattagcatcataggaaaggttcgaatgctcaaggtcctctagccttaaggtaatagggtagttagtgcaggcatgcgtccgaaaagttatatataattccaaattggtaatttttttaaactgagaatgcatcattgaattgtacttctcaaagagtaattaaaaagaaagttggtcttcacaagggacaacaaagtagtagggcaaccaaacatctacatatgcactaaacctacctgattatttagccctatttgccaaaaatgattgacaaccatttcttatctctcaaaccttccgagacaaaaattaaaataaaataaagcagctgcatttcattttctaatgcaaagttcataacagtttaggcttgtttaattgaacttataaacgtcacacctatatatgtatttttggcggtgcaaatacgaccaaattaaagatgtcattgcttcaataatctcattgatatcaatattatcatccataccgtttacgttttagttgcatcagattccacttccacttggcaaaagaattctgtgacaaaaagaggaaaagcccgtgcaactgcttaattcttcagaatcaacggcggtaattaaaactaatgggcatgcaagccttggttttttctcatgtctatcagagaaaaaataaaaaacgccgggccggcaaatctatcagagaaaaattaccctgattagttgctatactatgtatgcaacgacaaacagtaaaagaactcttgtagaccattatgctgctagcattagcctttcttatcacttgcagtatcttagataattccaaattgatctgcctgaaaaccatgggcgtatttcatgctttgggtgctctttgcaggtgactagctagcatcctagctagctgctaattccatgagtagtctctctggttcaggaagataaatattcctcattttgtcatcatactgtcttttctgaaagagaaattatcattagttttgttgcaaaatactccgtccattccaaactacttgtcgtttagtttcgtccaaagtcaaacatttctacctttgatcatcaatttttaaaaatccgtatagtttaacaacatattggattatatatcatgaaagtatttctcatgatgaatctaaaaacataaattttatgatgttagactttataaatttctataaattaatagtcaaagatagaaatgtttgatttaggacacaagtaaaacgagggagtatatgacgatttctcgtgctaagaggatctgaaccgtccatcttgtcaatttgtgatgatatattctcattgtggtggtaggctggagattgcaatggagtttcctctgaagtgtttatttttctacacttgccatgatcttatagggtactcaaggaatacctttcggttttggctaaagccaggagcacactgaattcaaggattcttagtactaattaagcacttctatactaatttcttcctatccaaacaaagacatcaagacaagagttcatgaacaattggctgctttaattttgcctacattgtacatgagtgttcagtttctggttattctactagtccctttgagccctagagtctacagatatgctatgccttgatgaaaatttaaaatttaatctatctacaggtgtgatgacataaactattaggtgattctaattcttcttttgtagttgtgctcagagtatcaggctgttttctagtgttctgaagaagaattttgcagttacctgtcatattcaggcgtgccgaggcttggtacgatagtcacgcatttattccggtaaagggaaaagaacaataggacacatctgggctttgattaggatcagagaaagcggttaggaccttgcttcgctaggtacaaagcagtttaacatgttaaactaattaaaccagccagctagtcagtttgaaccaaaataaatccaaccatgcattaatttcaaattgcaaagatgcaaggacagtactgtgttttgcttgtgaattgtgatatgtgtttcctttctgcagaatttaactttgtgatgatgaacaagtacaacttactatgatatcaaaataacacttaaaaatgttttaagaggtgagctcaaatactattaagaggatcaatttattcaatgagtggatttaatctcattcatccatgccaatgcaatttatgccgcttctgcgctcaaactagcgaagaccagaggaatttttacgtgaactagagggtgaaaataggataaaataaataaataaaaccttgggttttttttaatacgacaaacgaattagacaaaacgaggataacagtttgtgtgcgtggtgaatcacagagaaggtacaaattcttccactgaataaaaaggaacagcactcggatttgtttgagtctagaaatgttaaaaggcgccttcttctgtgttcatccatccatattcccttgccatcagttcatctgcagttgtaggctcgagtttgttatgcaggctaatgcctgaattttttttacctgataatttttgccgggtcttttttacataataattacagtatcaacgttaccattgtcatcagcgttcttatcttgcatgcgctctctttctgcaatggttattcttgatattttaaaaaggaaaataaatgctaaatataatccatctcctttgtttagggttcttgctgtgcatcagattctggctttgactaacacacggaaccgttcatatttta

SEQ ID NO: 41158 - DNA, 1594 bp, Oryza sativa
tctgcaccattctagtctcacatgcatgagttttctgaaatttgaccagcatctcaaacttgtcccaccactagtactacaagtccattttttaaaacaaaaaaaattatcatgattttttttaaatttggacagcagctgagaactgtgcactaatgccgagccgaagtctagagcgtgagaaaatctattatacgccatcgagtttgcaccaatttggtatcaattgcatcgaagcacttgtttgtacactcaagcaaatggaattgaagtgcattctgcatttgttgcagctgtagtactccagacgttcagttctctgaaaatgcagtacactgttgcgtcgtgtttcttcagtgatgatctgatgagatgcacctgatgcatatgcaatctatttggggtgataggaatcgaattcagtggcttccactcgctggcaatggcatggaatcggttaaagacttagtactggctgctgctttggggcaatcagatcatggagcgaatcttatcagaaacttgggaaacgacctcttgattgaacatactgattgagatgtagaatgccatcaagaaatcaaatgtaccaagcttgcaaaacaaaaggcatatttttttcatgtaggcagtgaggggccaatgaaacacagatgttggcatttgcttggagaaatatacatgtatgcagagtggtgtcgtttctgctacagtgtatacagctcttgacaaaatatcgataggatgcttcctagggtaccaaggtagaaaggcatatctagtcgtcggatcaagggatatatgcacacggatggctcagattagtcaaacccactcaaaattatatggccttcatataatccctttatagaaattttgtttgaaactttttgtcccattttttctccaactaaccaaacctttcacgcaattattatcacgaggacattcctttcttctttgttgtccatgatttgcaaatccaaattagtagctacctcatctatcccgtcttatcaaatttgtcatgcttttaatgagtgtattttaacacctcaataagtaaataataaaatagcccccttctttttttacccttcgattatgtcgtggtgcgctttgagatatgcgcatagaccttttacatgctatatgtcgatatgtactttgttcatgaatttcaaaggtatttgggtggcaggtagtgtgtagggagatatccccttaaaacctcaaaatagtacttccccgcacttcaatttagggcttgtttgaatacaatgaatgatatatcgcaacgtcgaaaatgagataacatcatgcactaaacccgcgccgaacacggcaccaccaggctcagtgatctcctagcctttctctttgattccccattcagattccaacaacagtgaaacacattgcatccaaacgactaggagcagttagctactcgatctagcttagctggcattcaaattttactatggcaacctaacctaagcgatcaatttgataaactgatatacacatatataggatatatatatatatatatatatatatatatatatatatatatatatatatatatata

SEQ ID NO: 41159 - DNA, 1953 bp, Oryza sativa
aatatgttattagtaacttctacgcacggccacatgattcacaaaggttttttgtccaacataaacaagctaacaagatgtaaaagaaaaatactgaatacatgtgaattgatatagttctccaacatggtaaaatcgtatccagagaagaactaggtctgtcacagaaagagccgaaaccagtagtccttagagtgtgcatatatatattaaggcaacaaatattgcaacactaacctacaacacaataatgtatatacatgtaaaaggtgctacttgagctagttcctgccaataaatgctgtaggtgcacctcccaacctgcatctcaacaagcataagcagaatttttttgtactatgaaaaggaaagatctagggaaggtcaataactaaaatatcaagacatattatcgatgaaaatatggttagctttcattcccccactctatagttatatttcctttgtttagatctgattagctgccccatctgtcatctcctgattaacattttcaggttagctactataattccttaatatttacaaaaatctcatcctgagtactgatccaccagcctaagagaagtgcaacagataatagcaccacaaactcgttagcttgccatgccataatgcacagaaatgcttccctagcttagaaaaacagaagaacttaactaagagtaagcctaaaaacagaaattggtcacctatcaggaacaaacgctttgactaccaataatgattcatgaccttttcgtaaccagcaatatgcagcgacatcgacatacactgagaaatgtatctatcaaactaaactcacatccatcaatcttgacattggaggataaccccattcctaataggcttaacacatgctgctaaaaatcattctcatggatataccgcggaatgggccgcagaataatgatgtcgctatcatcaggtgttgcaactaagattcttagctaagtgctcacacacatcaagctatcttactagttggtgatagtgcttgtttcccagagagagaaaaaaaattaaagcatatgcaaatcgccgcgagaaacattccacacccagggatggcatccccaccgatcacaattcatagaacccaatccgaccaatgccatcgccctcgtacacgcgcattaggttaggtcaagaggcgcaatgaaccgcacgcgcgcgtagccatcgccgcaatccaatccaccccaaatcaaatcaaggagaaaaaaaaattaaaaaaaagcaacaataattcgatggagagggaggaagctgtacccacccggccaccagccgccggccatcctcgtaccgctgctgatgccgacccgttcgggccacaaggtcacacatgctacccacaccgcccgggttggccgccgccgccgctcccctcctcctctgcggccgccctcgccggcggtgagcccacggcggcaatgcgtgcggcgtgggggagcggaggaggagagagatttgtgcgtggagagagaagaggaggaggaggaggagagagataggaggtgggaattcctcgccgtgatgagggcgctctttttttttcgtgcggtttttttttctggattttttttgtgtgtgtgtgtattttggtgtcgttgggttgggcgctcgcttttatttggagggcgtggtgggcggtgactttcctttgctttcttttgttttttttttcatttctctttctgttttctgtttgttattttttggagttagttgccgtttttaaagatatcttttgttgtttgaaggatgtattatttgaagttagttgccgtttttttaagatatcctttgccattttaagatattctttgccgtttggaagctgctattgtttatacagtatcttagatttttcttttttagattatatacgccatattgaaatacttgtagtattgtatgagtgttgtt

SEQ ID NO: 41160 - DNA, 514 bp, Oryza sativa
gaagaggaggcgcgtcgtctccgacatgaacatgcaagctgcagcctagccggcggccatagctcaacatagctatcagtttgcttggtatactatactacgtattttgcttgccatgttttacttagtttttgtgtgctaattagttgccatctccatatatatatggctcttcatggtgataccaatattgccaattgatatgccatatatgattaagtaggatatatattaccattagggtttgcttgagctttcaccaaaagctgttccaaagccaatgcaaacccagccactgaataacaatgtcagcatccccaatatatgcaaggtttgcagacttacccaactaattaagcacaatataaatgtatcaaatattggtagtcaaatatatatatatatggcaatgatcacaggcttaaaaacaacataagttgcattccatttatgatatgatatatacatacatcaatcaggtcattgttgacatgcatgcatgacaagtacatga

SEQ ID NO: 41161 - DNA, 1517 bp, Oryza sativa
taggggtggctcatcatctctctcctcacttctctcctccacctcataactcaatccaatggggtactcttagagcatctccagcagagaacataaacacacagctctcaaacaacttttattaggaggtaagaggaaaaatataggtccagtagaacccctactcaagcccctacaataggaaggccccccagatctcatcccacagtccttatttctaggggctccgggcacagcccccatcgacgtttcttcagcatgagaggaatttttgcttcgcgcgcgtgcatctcctcccccctcaggctgccctgatatccaaactctgatttgctcgcacatatactctgtatgtacgcattgcagatagaaaagtgcagcacatttgaacattgtttacttccaaatttatatatagttttgaacattctgcaagcgtccgtttatctgaatgcaattagaaaagaacgtggttgattttctgaacattttgtaagtaaagattttctgaatgcatgtgctctgatggaagttgtttgcattgctagctgatatactccctccgtctcaaaaaaaaaaacaaaccctgttttccgtgtccaacgtttgaccgtgcgttttatttgaaaaaattatgaaaaaaaattaaaaagacaagtcatgcataaaatattaatcatgttttatcatctaacaacaatgaaaatacgaattataaaaaatttttatataagttgccttttttttttggacggagggagtatgtgctctgctctgtactttgcttttggttggtacttggtagtaccttgtgtcaggcaggaacaaaacaaagggcattgctattgctgaacattgttcgtggaatgaattttgcatcattgggctgcatttttttcctgtggattctgatgatgataatgataatataaatatgacatctctactcagaattattgtgtttctgcattttctcaatgcttccccgtgtttgaaaatatgaatttgaatatggtatttctatgtgttaaaaatattcatgtttgtattaatgtgatactaaactaggtgtaaatataaatttgtacgttgacataaaagagaaaaataaatagggtctaagaaataagaattgttgctggagttgaaggcatttttaaagtcctaaggaaacgaagacagaccctatttagcttttaagggctttaaaatggggatgctctcggaggcatcatatgggacattagggtcccatcggtttattatccaactgccaaattatccactatcttacgaaatttcttttcaaggttacactgtttccgctcaaaattcaagtccagcctcaagagatacggaggatatcatgcttgcgccatcaaaatttctcttcctcgatctcacctcacctgtgcgtagagactagagggaggagaggagacggatggacttgcgctgcacataaccaactggttcttgcttccacgcttgctacactccccactcaccggggagtc

SEQ ID NO: 41162 - DNA, 742 bp, Oryza sativa
acatcctcaaatacaaagcacttccctagttagatgtaggttagacttcccgttcgagaaactctaccttctacctgccctcaatttatgcacgattaatgaatgccacctgggtggaagcgagaggtggaaatggaaggtcttagttcggaggtggatctctacctgatagttgcattgccattcatgatgatcccctggcattcgtccattcagccattcaccattcacccattcaactggaattttggttgaatgccggaattgtgtccacaaattgtggatggatagttggttggctggctggatggctggctggatggctggctggatggatggtgaatggctggcggcggttcggttgctttgaagcatttgttgctatctaaattccatttaaggtcgtaccttatcgcccagcatcatcttattctctatttgtattccctccatctttcagatacggatgtagccttggatgtgcccgtgcccaatgaagaggaagagcgcaacatgaaacgtaagtacaaaagtaccggacacccacccagatcccaatagaatccgccaaatcctgcgggaaattgtaatcccattcaccagctcctacatttaattaacaagagaactattgtatttatctaacacctggattatctccacctttcatttgatccctatttatagattacgctgcgttgctaacgggccgcacctcctatttcctcaagggtgaggaaat

SEQ ID NO: 41163 - DNA, 1368 bp, Oryza sativa
agagggaccaaccaatcattgcttagcttgcttgtggggtgcagtgccacagagtggcatgcagtgagctctcatgacacatgagtgcatgcatgcatgcatggaggcagtgctatgctagtgtagtagtgtgtgctgctgatgctactgtggctgtctgaagaaaggaaggaaggtgatgagcttttgtttcttgctggtttttccttttgtaatcttgctcatctcttatctttttgagagggaggctgggggtgtggaggaagaaggagaggagatatctccatgtcagggtgggtactgtgtgctgtgctcttgcctctcactgtggcaaaagccaggattgcagttgctggggacaaaaggagactgtgtgactgtgcacctatgtaacttgtaacttcatgagagctagcattgctgtgctgtgatttttgcccacactagcttgttgctgtggcttgctatatggcatgcattgtgtattggtagcttggcttgacatatgcatgcaggtcacatgatatgcatatgttcatttaatttatggtttgttggtttactgataatacattgacttgcatgtctaaattaatcccaactgattgatgatggcctctgaaaattattggtgcacatttttcttgtgtggtggtgcatgtttttggtatgagtactatggatatcagtattgattatactccctccatctcagtctgatcatcatttttgaggtcttcccgaaatcattactagaaaaatcatttgttgccacgaaaaaaattgtggcatcaatactaaaattatggcaatagatacatgttgccacaattgtaaaatcgttgctagccgtggtaataaacagcgtggtaataggttattacaacgatttttattttgtggtaataaatttagatgttgccacggaatggatgtggcaaaaagtcatattgcaacacttcacatcgttgcaacaaaatttattgccaccactccatatgtggcattagttttacgtaccaaattaaaagttcaaatattaatctatcatcctatctatttatctacttattttttttgattttgtgtcttggctaggattcgaacccaagacctatccttcacgtgtgctctcctttaccaactcacctacgcatcaattctgttggaaaatgtatatcgttccatttgagcctagctaactgagatttgaatcatagatttgaatatctaaaagatttcaaataaaaaagttatcacctataaaattgtagatctcgtcgagagctataatttccatataaaatttgtctcaatctgtgtccatatgaaaaaattaagttaaattatgagacgacaatttttttg

SEQ ID NO: 41164 - DNA, 2597 bp, Oryza sativa
tgcatcagaatgtcagtataaattgtcctatatgcatgcaaaatcaacttgaccccaactgcaaagcctgatcttcaccatcatcagcagttcagtacatgtacggatatcgtggtttgcagtaaacaatatactagtacatttctgaattttgcaaactggtcagtatattaattaatcattatacaccatgattagaagtcctttgggaggacagaaactcacaagaattgcaagaaaggctgcccctgtggctatgcacagtactacgttgtttgttccaatcttttttcagacgagcaacaggaggcacatgttcctacgtcgaggtaacaggggaaaaaaatcgacggtgctcccttcgtcccaaaataagtgtagccatgattttccgtgtctaactttgactgttcgtcttatttgaaaaaattttaaaaaaaataaaaacataagtcatgagtaaaatattatttatgttttatcatcttataacaacaaaaatgttaattataaaaaaattcaaataagacggatgattaaagttggacgcggaaacttgtggctgcacttattttagaacggaggtagtaatatgtgtgccgatctgtcagtggggctccgcatggctgaagttttggtgatttgatccgacctcgtatgcaatgcttcaaagcttttatatatatatatatatataaacctgattaaatttaaagaaaattttgattcagttcagaacaaactaaaatatctttacattttaaaacagagtaagtattggcttattggaggcagtgaatgtaagtaggagtatcgtataaatgcttatgacgagaggcggaaccagaaaatggccaatccttcgctgaattatattagtcaattttaattagacgttatatatttttaaaattttatgcactttgtaaaggatttaaatggagcttttgagccacgtatagggctccaatcaagccctaaatatgccatatgcctagctagctccgcacgatctgcatatatgggcagattcaaacaacatgaaatcaaaaaaaaaatcatgctcccatgtttttttctaattaagaaatctgacagattttcaaaaatcagtggagctctatcaaacaaaccattatatatattgtacatgcatatggagtataacaaaagataacatatcgaacaacaacatatatatataaagaatcatttcgtttaaactactcgattgcatccatgttggcctggttgctgtccaattcgatcggcgttaacagatgttgatgaccattttagatacgcaaagaccgaaagagatcaagatacactagtgttacagtactgttcgtatatactccatatcttactgatattaattaagacgtgtgtgctactgttcaatgcactttgaaaatatccaatctgtattgatgtgacatgcatatatatgaagcaacctagaatcgaatcctgctattgtgctgatcattttcagcgtatcgtgttctaagttgtagtcaccgtaaaagtccagtcatgtatacgtctgcatgttctcttggattattaatttagatctcttcgcaatcaaatattgtgcaaacgtatttatatagaagagaaagaagcaaattaaattccttgtgatcatgcccacaccacgcataaaacgacagtgattgttatcaatcaaaactagttcacccaaattaaagcaaaggggttttgcaccgacttcagttcagcgcggctaattaatgagtactccgtactctacagtattgcatactgtatatatcctcttgtgaatgagcagaagttaaacaagttagcaggtaattaactacagagttaaattatgccccttaattaatttcagcttcgttatttaattaacagttgccaggtttttttcttaactatcagttagctgtgcacgtacttttacaagctgtagactaaggccatgtttagatcctatctaaattttttcaccctgtaatatcaaatgtttgaacatctgtatgaaggattaaatataggctaaaaaaataattaacggcacagattgcgactaatttatgagacgaatcttttaagcctaattgctctatgatttgacaatgtggtgctacagtaaacatttgctaatgacggattaattaggcttaataaattcgtctcgcgttttactgacggattctgttattagtttttttattagtgtccgaacatcctatgtaacaccctatataatacctgatgtgacacgccaaaactttactcccgtggatctaaacacccctaaggctgtgttcttttcccctctttcgcaattcactcttctcgttttccgcgcgcatgcatttcaaactactaaatggtgtattttttttgcaaaagttttataaatgaaagttgcttaaaaaactatattcatccatttttcacgttttgctcgctaatacttaattaatctcactataatcgtgtgctttgttttccgtgtcgggagggcctcccgaacgcagcctaaattgacttaaacgcaagctgtacactgatcttacgtaatactataaaaaagatgaact

SEQ ID NO: 41165 - DNA, 1076 bp, Oryza sativa
gtactggcgaagaaattgacaaatagacaacccaaaatacaattaattggggctggatggtagtaggtgcatgcgttggctacacttggggtgggtcggtgtattggaggtggggatagtactgtgtgtaggaaggacaaaagaagcgtgcatgcgtggggatcaatgtattgaaacaagtatctagaatacagcaagtacatactacggggtgggtgtatgtatcatccctgcataccatcaccaccacaccacgttctacccggagccctgcctatctatcaaccttagccataggtatcgccatcgtctcgtctcctccggggaccatgcatgcaagtttgcaacctccatcgatggaggtatcgcttctctctctctctctctatctatctatctatctatctctctaagctataagcttaggagtatagtgtgtactatggctaatatacggggtatatatcatcgcaaaacatagcatgtattattgcatgattaattaagtaataactaatatttttaaaaaaatagattaatatgtttttaaacaactttcgtatattttttttataaattaaaaacacattgtttagtagattgaaaaacatgcgcgtggaaaatgatcgagagaggtgagttggaaaaactaagagaagaacactagtagagcaagtttaatagtatagcccactaatagctctaattcatctatagccaatctaatagcactggtggagaaactgtctttactcccggtttataacccccctatagtcccggtttcctaaccgagactacgaatccgggaccaaagatcgctatctttagtcccgggcgaaataaccgggagtaaagatctatctttagtcccggttgataacaccaaccgggactaaagagagggatctttagtcccggttggtaacaccaacctagactaaagagaggatagggacaatcccagatagtccttttttttgttacttttttattttctcccgaatcggatggcatgcacatcccaaatcaaaccccaaatctcaaataaagtaacatctcaaatccacatcaca

SEQ ID NO: 41166 - DNA, 953 bp, Oryza sativa
ctaatttagatattgttgtatttataattaaaacattgatttaaagatccataaagcttatattttgagctggtataaaatataaaataaagcaagtaatagaaaatgtcaatagagactaaattaaactatttagagaaaacataataagttattaaaaaattggttctcacatttcactaaaattggaccaaccattgcatgttcctttttcgtaacaattttaaaatgcttagacattaatgtccttacatctatcctatatcatagcattatgagtttctccacatattattacacatacaaaccgcaataaggttcgcactatatagttcattgaaaagttatatttgttactattaaatttaaaattttggattcatgttaactaggtattttcttttgaaaaatataatacatatcacacaaatcacagtgaagcgaggtatatgacatgtctttattaatttatatataagtatgtaaaaacttgcatcaacttaaaccaactagaaggagaactacttgatgctacaaataaaccatatttattaacaatatagttctttagaatttgttaaaaaaaagcgagtaaagattctattaaaaagggacaaaacaccttacttctaatttacacttgatttattagacacactttccaaacaaattaaatcgaacttcattctatataataaagcgatcatagataattatttatatagatgtattaaatattatatattttaaaacctaacaaatatcttgaaaaaattatcaaagcaaaataccgatgaacagcggaggcctcacctgatgtgtcttattaaaaaatagtacttttaaacatgggaggtgtcagcctattgatattctgtttatatatattcaaacgcaatgtacaatatatgcccgcgcgaatacgcgggctaccttcctagttattctaatat

SEQ ID NO: 41167 - DNA, 1787 bp, Oryza sativa
ttgtgcaattaaaatttaaaattcatatataaatataatataatggttgcatgtgaggtttgagctgcgcactgcgattatcgcagaagttaagggagaaaggctaccgcttttccaagaaagagtgcaaagtgcaaagccatatgcaatacaaactctgcaggatataactagctagcttagatcatgagagaacacatatggatatatagctcatgaattggagaccagccggatcaaaaagagaagataaggcaaaaggaatggaagggccggccgggggccattagaaagaaagaaagaaagagagaaacaaaggttaagataggtgttggtgtagaaagtggttaattggatgggcatgcagtgattaccagcactgataattagagagagaatattagggatacagagagagacatgacggcatgagcgtcacgtgtgtgtggccgatggatgagagagagagagaggaagaagaaagggacatggagtgatgaagagagagcgttgcgttggctgggagagaagggaaagagaggcaaagggaatgatgattgcccatcgctctcctcgctgacacaactcgcagcacgcgtgccccggatcctctacgaccatccatccatacataccgccctgcgtcggcctacatctctgatctcttcctagtgtagtatcagtacttccagcgtttgtagaaccgtgtggttatcacgattatcacataaccatagcaattcttatggtaaccatacagttttcacggtaaccgtgctgcttctgcgttaacctcatccaaaacaggttaatgaacgctggtactatttactactacctgcttctgcagtagtagtatttttttttatagagacacgtatgacaaaattatatttagactaagtatgtacaggtccacatatcttgtatctttatgtgtgttttgagcagtagaagcagatcaattaatcgtacgtaagtccccgtggggagatcgaagaagaagaagcatgcacgcatgatagtacgtactagtagatgcatgcgcgtgcacattcatatacgtaccacgtacggttaattcaggcttagtcacaaagggacatccagaaatggacatgcctgtaccctatatatatatgtggatgatcaggtccgtgagagaattaatgcatgtgacggacctccgccgatcgatcactgtgcacgcgtgccgccaccattccatgcaccgtcgggcacacacatgaaatgaagtcgcgcgcgcgcgtgcgtcacgcacttatagggatcgccaaaccgcaaagacgacgatatgcagccatacgagagcaagtataatagcagactattagccagctgtaaacatattattgagataaaagatgagaggaaagagccacgggctacatatctgtagccagctgtagcgcgaactgcaaaacgcaatgtgtgtataggataggtggaccatatattaatatagtatggtaattaagcacctattgtatgaattagctacaccggtggagaaaccatctttggtcggtcgaccaaattccacaatagtcccagttttattaaaaacgatttttagtcccggttaaaaaaattttgatccaacggggactaaagatgatttttagtcccggttcatcctctgtcataagcatgtcagagggccgaggatctttaaactaccaaccgggactaaagattaccaaccaaccgggagtaaagatcatttagatctttagtcccggttggtaatatcaaccgggactaaa

SEQ ID NO: 41168 - DNA, 1410 bp, Oryza sativa
acaatagcttatatggcgtgatgcgctcgcctcacttgctacgagaatgattccatgtgaagagcttctatccttcaagctttgaactaatccctgaagagatgcaaaaacttggccacctccatgctgtgaaacacatcgtggagataatgattcaggtaatggctaacaacatatcagttataattcacataagtaaatcatcaatcacagactagtttattattgtgtctgttgttgcaagttgcgacataccttgataacgttggaaaatttggaacagaagctgatttttccaaggattaagaatcctaccccatcaaataacaatgtattctttcttaggtgcagtgactggtcaaacattgaaataccctgcattgaatgcacttgtcgaataaaatacctagaaaaatgatatgacaagaaaagaagtgagcatcaagaatgaaaagcattaacatatttcacataagcaatacaacaagattgtttgacgaattattagtttttccaaagaaatatagcacagatgttcacaaaaagtgtgttgactatgtttgacaatatagccgaacgtttggactttgatgaaagagtatcgtatggacatactgtagctgatttaaaataatagtcttggctatgcatgtgtgtataattagtctcttacaatttgcatatgcttaatcatgtcagcattataaagccctttcaaaagatgaccttttaggtagtctatctcctcaaataaaaagttagatatacttctgacggttggcacaacaattgaggacataaacaagaaaatattttcaaccttctacaatatcttagtgacaaatttataaattataatagactgaatcatgcagtttcttaataattctagaatccatagatacttcagagaatcactgatacaatggcacatcatacagaaataccataaccgacaacttttccttgattacttcataatatatatgcaacattgaactttatcaagaaagacataaatgccaattcaaattacattttcagaggataggcatcatgaaacgtgtgaatataagcatatgataatatgagtggatgctagatcaccatactttccaggtggcaacatgacaccagcttgaatagaatcaaaaagccaactgggattcaaaatccaggagttgatagcacagccatataagaacttagccgttgatacctgtcacaacaaatacttgagacgtaagtgcaaaatattgtcaaaatatgaaatggtaatttttggaatacatgagagcatattatcatttgtaaccaataaactgtaccaaacacaaagaaaaaatgaaatggattagcaaacctttttaggagaaagaacaatgggaggcttgcacctagcaagctctg

SEQ ID NO: 41169 - DNA, 1026 bp, Oryza sativa
tggcagttgagcactgtcgctgttgattttcgtatatgaaattttgagtatttttatgtctaaataaatttggcatggatacccgtgctttgctgcagaatatatgaatgaatatgtgttatatgttataggaataatatatgtatatctttaaataatgtgaaaatgatgtaaagataataatttgacattgtttgtatattgagttctaaaaatagaacaaaattgtaaatgatatgtcatatttgcgtgatacttaaaatactctagataataattgctagtgagtaatgatatggcttactcacatgttaagttttacaagttattaataagcatcaattttatagtaagatgggatacaggctccctctgttacataaagtcctaatcatatcttaatttttaccactcctatagtcctattctgtaacgctccgcttttcgtgagacgttaaaaactaattcggcaaaatcctaattgcgaaaatttcgttctttgagtgttgagtctaagctgtgccaaagatctcaatctaaatccctcccttgtctcgataccctgttgcaaagatcgtctcctcaaaatttccatcccaatatagtcccgaagctcgattccttctattcggaatcccctcctggaaccccatccgtgaactttgtcgaatgcccgaaacctaactccgtccaaggattcacccttcgcgtcataagctctctccttggttccttcaaaccgattctcaaattcgatttcaacctctcaggtgttgattcatctatcttctgcctgtataggtgcatcaatctacccttgtgatccttctcgaacttctgacccaagtctgaatatgcaaatcgagatcacttccacccttgaactcaaaatcccaagattcaatccctttcgccctgagtgctccccaaaatgagttccgttccgaattaatctcgaagtccgaacccttctatttgggcttctctccaaaatccttacccacatatctcgttgagtagtcaaac

SEQ ID NO: 41170 - DNA, 939 bp, Oryza sativa
atgttatattataccaatacacaacatagtagatgaacattaacatacacaacatttttttagctgagaactaatataatgtactacagattgtgtcctaaatacacagttacataaaacatgaaagaactatcatttacgatattccctcaggattaagggaaggtcgtaatagtagtccctttgctgaataaaattactgcgttaaagtacattctactatgaatgcaatgggtagtttgctctttattattggtatctcgataatattgtttaacaaaacaaaccacccaaatgacatatgcagacagccatgtatataattggatggtatttaaaggcgtacaaccataaacccccaaaatttcaactaggaaccactcagccacatcaacttggaaggattgcagcactcaattgggcaacgatgaaccgtgtcatggtgcaagcactggtggagaaaccatctttcgtcggtcggccgatttccacaatagtcccggatgcaataaaaaccggggctaaagatgatctttagtcccggttcaaaagggtaacgggcgtatttgatctttagtcccggtttgtgttaccaaccgggactaaagatcccggttcgaatgctgtcagggcctgttaggcccccccgggatatttagtcccggttggtacaccaaccgggactaaagatcgtaacttaataccaaccgggactaaagatcccggtgatctttagccccggttggtattaccaaccgggactaaagtcccacccctatatatatgtcttcttcctgctccagctgcccgagcaagcttcaaaatttcttcaaaaaagaggggaggtcatgccaaaatttctattgaatttattttggtgattacatacaatcggaggtgcctaaaaggtttgcaacttcatcctccaatgtttttttt

SEQ ID NO: 41171 - DNA, 2350 bp, Oryza sativa
cctacataagaaggtgtggtgaggtcctaattcagggaaaatacatgattatagtttgctgatcaattatgaatggatgcatggagccaaatctcacatggataagataagatgttaggtctaatgagaattggaggcaccttgcaaccaactgtcacattgaagatcagagtgatatcacagtgctgttgggcgagcagaggaacaaacttgcgtgcttgttccttgagattctttccctacacgactctctatgcgagatgttatttccacgcacatttctgaacaagctgcgcctatcttcttcacagcttctcacttctggatatcagctaccaatactgtccccctcctgttccacgtacatttggtttttcgcattagcttccagtttgttttaggcagaagattgaaacgcttgacctcgttaatcaatttgcaaatggaggaatcttgtgagaatttcatgggaattgaactaattcctatatgaactagctgcaaattttctgtgagccaaagagccttaaacaaagggcaagtgggtgtttgtatccaaatttattaatggcgtatagatttcagaaatttggtgtagtcaatcgatagatcaccaaatttgtatttgtatccaaattcattaatggttacacatgatataaggcaaaatttggttataccacaggtgaagaggccggttctggaaaataacactaaaggttctgtccacaggtgtccatcttctatgctaacagagttagctgagaaaaagaaaagaaaaaaaaccttcaggctacacctgctgctaccgttgacagagttctatataacgcggaatgcagaaaaaaggccttctgggtacttcggaatcggagaaatttttggagaattcaatccgaaatagtttaaaatgtaaacaaattttgaccaaatttgagttaattttagttaattcacagaaaatttaaaaaatctattgtggggattgaaattttaaaccgaaatatgaaaccttgcgattgacaacgataactatgacctcgagtcaacccgccgtttgaccgccacacatcttctgtgctagccagtagccactagctgccatcccttctacctccggatcagtcgaccccatcactgccgtgcccatgatattcgctcaaacagagccaattaatcaactgaactttgaagctgaaaattcagaattgtttgggagcacaaagggacataacaaacttatgagcaggcagaatgtgctcaatgggtgaaactcgacgttggagatcctctatgccggcttgcctgtgctcagctggccggtcctcttttgccaagctactaactacaagtaaaagtgcatgaaattggggtttcatatcctatactataatgactctaccattaatataagcactgacgtgtgggataataaaaaggtgaaaaccatataccagtgactataatggtgaggatcctcacccagagtgggttattgggatggagattggcagtgaggtttagcggtaggggcagcagatgcggtacaagcagcagaatggaaggagatgcatgtgcgggctatatatgcgacatgtgggtcccatagtgccacttgacctgacattcgtttttcgataatgtttatggatttaccattgatctatatatttaagatataaaggggcgcacttactagtgtggctgccatgtgagttcgtggtagtatgcgtacacgtcttttgtgtaatggaaaaagaaaatatggatcgcttgatgtggttgttggagtcatatatgactcaagccttcaaccagacatgttcagctataaataggatgcatcacttcgacacttactgtcgtatattgaggatcaatagtgtagaaaccaagcttagacaccatcaaaactctgagaaatgaaaaggaaatgtcatggtctgcataggagggtgaggttctactttaaaagaaaataaggcagtagtttgcccatcaattatatataaatgtatatactcggaaccatatctcaaacagatcacttaaaagactccaggccttgactgataagaattggaggcaccaggaactaaagttcagttcattgtgacattgggtgtcagaccacacaggtgttgggcaagcgaaggcataaaacaagagagtataagaacacaagttgggaatatatagtataaagcacaagttccagcactccgaattctcgaaccagtgtgttcagaaaagtgcataccaatgaccacaagggggtaggatgtagatcccattctaacgacatatcccatgaattgcatatactcccctacatgatgaagcattgaag

SEQ ID NO: 41172 - DNA, 3317 bp, Oryza sativa
taagggtaccatatgtagatagaatatctttaaggggctcgggttaaattcctaacttgtgtatcatggaaatactggggtcctagtcggttacgattgtattttatcttttacttgcctattccgttaggaatatgggctgtatgttgtaatacagactcctctcactatataaggagaggtccggatgactcttggggcataacttttcttccagattatacaatcaataacacactcggtggatcaatctctggacaggagtagggtattacttctcattgagagggcctgaacctgtataaaattcattgtcttcatacccatctattttttcatcttgatagccaccctttttcttattgccgaaatcttgtttcgacatgcatgtttaacatccggcccgtttagtgtcaatcaactgacagggagtactgaaggaagaaaaaaaacaagatgcagcgtggtatatattgtgttcaataggcgccgtatgccttgttaattgcccagcctgagattcattgcatagaaaagaaattgagagccatatatatatgggcctgttaggccagaatctgtctattgctgtatcaatatagctccattaattcaactgacaaggactaactgaggccgcataacggttaatcttgctatattcaaaatggcattcaatctgcaacacaacgagagttctccgtttcatattataagatcaaattcttctagtgtaaccatgttaatagaaaaatatagcaacattttcaacacaaaataaatatgttgtatataaaaatattcaacaatgtatttaataaaacaaatttggtgtcatagatgttattatatttttctataaggttgatcaaacttgatgaggcttgacttttaacaaatccaaaatgacttaatatgaaacataacaatgcacgagtttctttttttgaccaagagaatacacaagagctgacaacacttaattatatatgttttcaacaaacttgttagttttatttgtgagtgtccagattttagacccagagagcttttaaagtgctaggtacctctcaaactactcagtatccacccttgatttgctaaagggcaacttagggaaagcactacaatggtaatttagcaattgtttcagccgtaacagcctctgtactcattcctggttgtttgctgctacgtctaattaatttttagccagattgatgaactggccgctggatacaagccccaattcactaattctcatttccacttgttgctcgataccatcactatatgggggaaactctaatcactatgttttcacccactatatcactgccacctacgcaggcttcatccactaaaccaaatctaattaatttcttcttgcctctaatggttgatatctaaaatttgacttttagtcattcttgtaaacccatttgtgcgaaagcaagatatactttaattttaatcatgctttatttcacagttacatatggccttagctattgatcaattatcagtttattgtcatttacacagtttgtgattaatggattactgatcaattacatagctctttcagtatgtgcaatcggccttctcttccacctctaaacgcatgtttgttccctgtaatcgataacgggaacttcataatacatccgggcctccagggccattcaccatacagaactgctccatgatcccaaacaacagatttacgaagaacaactgaacttcttataccgatctaatatgatactatagacaaaattaccgatctaacctttcaaccaatctataagctaatatctggcctactttttaagtacctttttataggtaccttgtattgtaaaccattagattaggttggatcaacggtcatcttcatttccaagcaccggagaaactctcttttttcttttttttaataaaaaagtcacttttttcttaaaaagaagtcaccagccttctctgagccttggatgataattcaagcttagagaaaaataaaacaaaatcccacatataaaaataattaaaattattattctaaaactctttataaaccacttaagattatttgaagtcaagtccaatacttcgggagttaagtaaatgcatgtgttcccataaaatatgatgatatcgcgcatcgaatcgattcagtaggtggtaatacaaataaacaatccttcacctaaaacagacagatcatatataccctccaagctgaagctgtatataactacccagtttcgctatacgtatttgtcgcgttataacaatttgcgataatcaaatgcataatacgttattgttatttcccaacacatctggctggttccctgtttttctattagccacgagctgcgccccgtccacgctttgcataactgatagtcctgtagtagcctaaaatatactctctcctatttttgtttttaatggatgatattgttgactttagaatagatatatttgattattcatctactccctccgtttcacaatgtaagactttctagcattgcgcacattcatatagatgctaatgaatctagatattattatatatatagatttattagtatatatatgaatgtgaacaatgatagagagtcttacattgtgaaacagagaaagtataaattttaaaattctactagtatataaaaatataagttatgctaaaaagtacctccaatcataaaaatcacaagaagataaatcatctatctattatattatatacttaaaagtctattaaacttcctataagcgctcctaagccgccacgtgtcctccaacaaacgctccaaagatgccaagtggcagtctaaaaatctaaccgttgattttcctttaaattgctaggtccaatattttcaaccattagattaaataaaaaataaaatcctcctctccacaccggtccccacctcctctacattcccctcctcctccagttggtacgtaaggtacgtactccctctctcccctcatctccccttccctttcctaatcttcaatctatctattattatctactaaaagtccattaaacactgctaagtcaccacgtggcgttttaaaaaattttagaatacgaaagacgctcgtactttcttgatcttatgaagaaggggcttacggtgggcccatatttataaccattagatctattataaaaaatacaattaaattatctaaaaactcgcattgtacgtgcacatataggtataaaaaaacaagtatgtccatactttgatacgtaagtacgacgctgggctcacataattcttttt

SEQ ID NO: 41173 - DNA, 1278 bp, Oryza sativa
cactccggggaagacgaagcagcagtggatgtcgaaagaaaatgagaaaaacagagggccttgatgaaaaaaaacaagtgtggccagtgtcacacacggtgcgcgtgagaaaaggcatggtgcgggccagctcagctgtgcacgtggcatgccacatcggcgcgaccgcggtcaaacggcattttggaccggcgatggtacatttagcaagtttagtggcctaattacacgatttgcaagttaatggacctggatgacatccacccgcaagtttaagggccgctactgtattttactcttagagaaactatctaggagtgacaaaagcatcagcttccgaatttaattctgccctttaatgttagatgttttttttaactaagcttctgtctattatatcaattccctatgtacatggattgacaacagcgacatggtatggttgattttttacagtgagacttactccggtccatcaaaaagtaccggtttagaaccctttgtagtcccggttttccaaccgggactacgaatccgggactaaagatcgctatctttagtcccggttcaaataaccaggactaaagatcaatctttagtcccggttgtaaaagggagaatcttaccaaccggaactaaagaggggaagcgacagttcctcgagatcttttttttattttattgttgatttgctaatggctagtgttaatccctgtattttctcccgaatcaaatgggatgcacatccccaaatcaacatcccaaatattaagttacttatacacacagatcaaatacatcacaaatcctacacacagatcaaatacatcacaaatcctaaaaaactacacacaaataaaatacatcacagattatacaaattatacatcatatctcagatccatgcgatgcaatgaatcacaaaatctaaaaaattatacatccagtgaaacacaaattacaaaaaaaaaaagaaaagcaaacgagccggcgcccggccgccgccggccgcatgctcgccgccaccgcccgccgcccgcctgcccgcgtgcgcccgccgccacgcacgcggccgcgccgccaccacccgccgcccgcctgcccgccgccgccggcctcatgcccgccgcctcctccccccgcgaggccgtgccaccgccgctcgctgccggccggctgatggaagacggagtagaggggaggaggaagggccggctgatgggagggaggagaggggaggaggagaagatgaaggggaggaggggaggaagagagggg

SEQ ID NO: 41174 - DNA, 930 bp, Oryza sativa
ctgctcctgagttgcagtgcatggtggattgtgctatcgcctggtgattaatttgacgttcacgtccttctctctccttggttctctctccttcatattagaatataatgatataaaatgttttagaggaatgagcctattgtaactgccctaaggactgcactcgtttctggctatccattttgatgatgaacgttcagatttgtttctacagtaataacatggacagaaaagctgaccaacggccagtctgtgttgtttgctccaaaaccacaaggtactatacgtactgtggcaatacattatgatttactcggtaacaactaagtatctaatcacaatgtgcgtgtaaaatttctcagtactgtttccaatcatagcttgcataggctgtgcgtcttggtgacaaatatgtgcaaccgttgtaaatagcagtgttaatttctagatcactaacattgtttggccattttataagtttcattggtttagctgcatttctagtgccccaaatagaccacagaacagcaataaaattcttcatatcattaattcctatggttacacgaaacccctcgcgagtgaggaggaatactccacccatattgaaagtactatcaactacattccaaacaataaagcaaatgggcatttgggaaacaaggattgatgtacaagaagatgaatacgtattgcatgacacgaatattttctagcaagtatagggcatttgtagcagagccttgagatgtttgacaacattcaatctgcctatatttcgtctttcgtaaagttggatatgcccgtactgcttgactcgtttgattgaaagaacagagtattgcttgctgctcctctggatccgccagtgtcgagagagagagagagaggaggaggaaattaaagccccgaccctagtcatctactcgg

SEQ ID NO: 41175 - DNA, 1689 bp, Oryza sativa
gctcaggggcttactagctcaaatacaagtattatatcttcaatttggacttgctccggatacatgcaacatgaattcatgatcatgggtctattttatatgctcaaggactggactatttattattccccgtaagggttatcaactgaatacttgcgccagtcgggattcaattattatatttattttggagtatcccataagggataatcattcagatcagaagctattcatatgagctacacttggtctatattacccggaagatttattactcgggagcatgttacatgcgtcatcctttaaagggtatcgaaggcatattttttggcctaggcctaatatgtctgcagcccatattttcaggtgtggcctgtcacgttcttttagggacttaggcactttttgcttaggccaaagtgcgcgtgatcaagtgcccaataccttaaaatccttttataccgcagttactcaactttttaggagttggtacaatgcatcttaaaaggtgtcaaacagtaaagctttatatagctgccccgctgactttttaatatagtcatggtgctgtttgggtttttaagcaattgattgaatacaatatcattgctttttgccacgtaagtgtgcatttttattgaccaatattatggcttaggctgattatatattgtggtcatttttcaggcggttggtaaatcctttatgagtttatttactcggattttataccacatatgccatatatttccaggtgtggtggaaccatgtgtcttctagggacttaagcacatatgttaaaacagtgtgcgcatggcgtatgcccaatactttggaaatttctttattcacaacacacaagcttttttatagctgttttgctatgtgaattttcaataatgtagccaactttaggttacgctcatcatattttacaaagcagtcggtatatcactcggatcatgttatttggaggattcacaccgcatatgctatatattgatatcaagtcacttggttgattacgattatcaaaatcactcggttggttggattatttattccttgactatatgcttggtttgttcaattaaccacattgtcgggggctacacctattaggtgcatctagtcggtgcacctgactatatttttcagccctccacagtcttcagatttggtaaaagtactcgggagaccatggcgaagatgattggagcactcggctttggagtaatctagttcgagagaaggttatctttccgactgtgaaggtctcaggggctactgtggagattatgggtaccccatacccacacggcatggttatccgactagttataggggataacttatatctatgtaatatgtaacagatcatgacttgggtgttacgtttccttgtatattacggaacggcctaaagtcctgatttgggaaaccgataccgtattggttaaggtttctatcttgtaatcctgctccccatcctatataaggtgggcaggaggccctctagggggcagatatgagacaacctgatcatcagatcaatacacacccggcggattcaaatccccaaacaggagtagggtattacctctcattgagagggcctgaacctgtctaaatcctttgtctccacatccatccacttttaggtctcgtgcgcaaaccgggggatccact

SEQ ID NO: 41176 - DNA, 2508 bp, Oryza sativa
attttcctaggagatagagaagggtaaaattatcttcagttctaggtacgtaggtaccacatcggtaccatatctcagtacattatttacgtgttcttttttaagatttacattttcttcttaagaacgtattcgctttgtaagcctccatgacgtgatttacatgctttgtagaattcattcactaacaacaaattatatgttttaggaattaaataactaattctataataccatacacctagatttcaatattgacccgaactcaaccatcttccaaatttacctcacgtttggctgatgtgcttcgccttgccattgtcgagttgatctcatctcctattcaattctcaaccataccaacacttctcccatttttttccctggtgaaccaatgcaaacactagaacaagaacgaagtgatgtgtaaagaagattcaacctgattttttgtcatgtgtagatctaatcgatgcctaaatcaatgcctccgaatatttacattttaagtattcgattcaacgtaatgccaatatttcactagttaattactctactgccattggttacaataatttttcttacatacctttctcctctcttgatcaatggtccacattaccccacctctcgataactctaaatagctcgtaaacactgtaaaacctctcatatcttacgtacaaaatgatccgtaactgtttgatgatcagcaatggcacacaaagatacacgaggcaagaataaagaaggaatataatcaaagaggtaaattttgatacccaggctcctaacattttcgctaaatggtgcattcttatttacaaattttcagcgctgtcacacagtcacacactaacacgcaggaccttgcagtagactgcagtctgccagctaagacgacgttggtcaaacatccaagacaaatcagtcttctacatggtacatggatagcaaggccagcaaaagaacaaaacacaaatcgtaaggtaaaaacatggtggaattccggacacctcccactcttagagcaggttgtcagattctcagagattgcaggtaagatcagtatcatatcattcccaggctacaaccctacaactgtgaatggccttgctcaagattaccatttggcagctgctgctatgtactcagcgatcccagcagcaaatatgaccgactatttatgcatcctttaattccttttcaagtacttctcgcattgtctttgcggcaattttcaggtagcaatatggacacgcagatactgtccttggttttgcacaggatatcagttattattatttctcattgtagaaacatcttgtaaccattgtgtgaattgtcggtacacacaccagtccaatagctaagaagatgccaaagagccaagtaacatctcaacaaaagtgtcatggtctcatggatcacagtaaaagaatgtaaattgtcatagaaggtaaaaccaccttgtcctactgagtccaactgagagatcattgctcaagcattatagctccacatggccgttttttagctagaaaacgagttttggggccaccattttctattgccattacttttaaattatttacctgtaaaaacttttagcgattaacattgccattattttcaatttccactactctccgtttcgaatgataatatacggcactcgaaggagaaatatagctgtaattgaacggtgacaaatgtctatgtttggcagctagttagaaccgccaagaatatatttaaatttagcggctgttttttgaccgccaaagaaatcatttggcctctaagaaaatttacggattcttcattcttatagtgaactggtactcacaacaactttaatctatccacagttgtatgaaaataacttgcttgacagatggcacaatacgcgaacaagaattaaacaacaataactatgcgatggcttaaagcaactgtaatagaggtggccagtacacttctactttatccgtatcatcatactttattttattggtttactcacagtttatcttacctttttctctgtacttttattagaaattacagagagcctactgcacgagggaaagttcatccagttattacatctcctccaacttttcacctctatctcaatggtgttccaagctgccaccccaagttttactgcatatgttcattgcgggctattgacatcttgcatggagctatgctaggattccagattccatggatggatatactactatgtaagaatatgtgtatgaaatttattagcgaggagcagagtttcgaactcagatcaagtgcaactagcttttctaataatggaatagaatatcctggcatttgctcaacaaattacagccaattattacaacgtaacactcaaaacgagtgtagttcacataaataaaacaagacaccaacaggtagcttggtcaatagtacaactaactaacggcatagaaatgaccacgtcggattattgcagctaatacaaag

SEQ ID NO: 41177 - DNA, 838 bp, Oryza sativa
tgtgttattttacttgtagcaaatgttacaatgttgaaagcctcctcctgacttacgttgcagctcaccaaaaaaaaaaaggagagaatttatattcatccttttatcatgaagattcaaaaccaacatagatactgaaaacatataaagtaattttatattccttatggctagctctaagcttaaggttagcaataaccatattctcttgtgagctcatttcccattacacaaggttgtactataaatattagcttattcctcaaggttacctttacatgcacattggtgttgtccttatcgattggagaacttgctcatttgcgtgttgatcggtctttattctccaactttcaatatgcaatagagaagtccttttctatgacactgcagttacaacctccattcttcatatgccacagtatcgcctaatgcatatcgatcttacaatctcatctgctcgcgcccataattctatttcctaaccacacatatatggatcgctagatgcatgaaggtccagaattttaattttctccatgtccattatagttcatcaattacgaaggcacagtcattttgcacgtaataatagatgacagatgatcatttgaatttctagccattttgtatatatgaaactgaacatattataagcagcactatttaggctgagttttttccaactcatctccctcattttccatgtgtatgctttctaaacaactaaatggtgtgcttttttaaaaaaaaagttatataggaaagttgttttaaaaaaaatcatactaatccatttttttaaaaaaaatagcagataattaatcatgtgttataa

SEQ ID NO: 41178 - DNA, 915 bp, Oryza sativa
ggacgaatcccatagaagttgacctctttttggtaccaagggtgtatgcttgagagtggaatcattgttcatagcccccgcaaaaaaaaaaaagaatcattgttcatagcaatagcaagtagcagtaacaagtgattataaagtagaacaagggacctataaagtgtatttcctgctgccaacttctttaaaaaacggcttcagcacatgacgcatcccaaggctcgtgcgacacagctccacaaatcgaccaaaatctcgtgccgaccacgacgaggcaggtgaacatgcccgcgagttacgccgcgcgcgaatattcgctaattaggacccacacaccgcgactcgatccacacctcgccgccgccgccgccgctttccccgtccatatccgctccttgccggctcagtccccgccattcgctaccttccacatctccgctcagcaccgagccgctgcttctctccacaggtaaagcatttggggctcttctttcttcttctaccttggccgcactgcttctaacccaacgacagccaccaaagctacacgccaccggagattcctacagcctggattactactagtgcttgttgctatcttctttggttgattgggaaagaaagaaagaaagaaagattcgtacggtttagattattggggtaggaagaaattttgttccatgctgtctgagaaggggggaattcgattcatggagatagccgaacagtaagattggcatttgaacccgacaatttctaccggccataattatctctgttcgttcgtgtcaaccccgtcgacaagacgtcaagacaccgtaccactaccaaaccattgtactactagtactgctgcggttgatgaatgatgatagagagaggaaaacgaaagaaagacgcatgcgtgcattg

SEQ ID NO: 41179 - DNA, 887 bp, Oryza sativa
tttttgcgggggctatgaacaatgattccactctcaagcatacacccttggtaccaaaaagaggtcaacttctatgggattcgtccctacaagttgtttttttctattttttttaggacagagtagtatgtgatatgcctacgaaactttcagcagtatttgtagtataaatgagaaatgttcttaggaagacaactttcttacaaagagtacattacttttttctccctaaaacaacttttaaactacttaatgaaacttttttcattaagagcaaaaaactttgtaatagagactacaaatttctactcgaaaaaacttactctttagcaataaaagattatattaggaaactttcacataaagactgaaaagcatccaactagttagcgatatttaactttgaaatcattttagagcatactttatttatttaagtataagataggaaaaataaaacacatgtgcatggtagacaattaggaacaagtttatattacacccctaactacgaaatcagtcattttacactcatcaactagcaaaatggatcaaaataccaccctaagagcagtacaaccagatattaatagtcactttcatgattttgacatcaaaataatatataattttttttacttacatttaactcttttttacatatcacaatacctagatgccataggagtaaaataaaattttattcgggcatcaaaataatgaaaatcattattaaaccagattgtattgtccataggcggtatttttggggtgtaaaatgtctaatttcatagtaaagggctgtctttttagacagacctaattgtagagaggtgtaatatggacttgtccaattgaaaacgaggttacagataaagattaatact

SEQ ID NO: 41180 - DNA, 862 bp, Oryza sativa
gatccgcccctggtagatctgaactgatgcttgcatgtactgttcatgttttttttaatgtttttgccaaagaaactattgtaacataagccaacggtggttttcaagtgttagcaaagaatacaattttgattcttaaaaactatgacttgcaatgcctcgttggtggtctatttataactctataggattaattttcacacatgcttttacatgtttatcccttgataaggacaactacaaaggtactaaagtatttttaagacttgtttggtttttagcgggccttatcagtacttgcgctgccatatacacggtccatggtccgaaggccaattgatgggctggccaccaggtggttctcacccttcctggtgacctcttgttttcttcatgacctttgtcatcttaacgagtttcgccacccaagtgggtcttcatcacatctattaggctttgcaatgtgatcatggcttcacctctccctcaagccttcattgttaccagcctgcctccaatagaaacgctttaccaagtcggtgtcttagataccagtacgaatgttaacatgcagttgtggaacctgcctacaatacgtaattcaagtgaataatagttttgtcattgttgaattgatgtccaaataacctttaaggtctgtttcagtgtggatgttgtgatgcatccggtgcttactttttaagttgagatggaaattataacttatgatcgttgtactttgttttactgatcaaattacagtttaagtaaaacaagatccaactttaatgattccccaactttaatatatgtttgcaacatacattaaaacaatcaatttgccaccatgaaaatatgtaca

SEQ ID NO: 41181 - DNA, 2237 bp, Oryza sativa
gatcaggctttggctggtactaaaccagacaagccagtgttccctttttttttccaattaaccggtttgcctggttgagttatttacgctatcgtaaaatctacgcaggggcaagtagcagatgcacatttgttgaacttgatgacacctagaaatcaagcaaccaacaatacttgcaggttcagcacgacatgggctatttcaggcatattgcatcgaacaccttgtatgtgcagctgatcaaaccaagacaagaaggcaagcttacagtttgataatatggcagatggtgttgtcgttggaagagcagtcacacttgatggcagggtcttttgggtagttatcccagtcggaattgtcagaggctacaccgctgcagggctcaccactgatgttccattccgatggtgccgtcaggccccatctccccattattgtgtttagtgctgacactgggccaataaactggtattagtatttatataatatgaatgcataactatgcaatctagtaaatcactttaagctgcatttggatcaatgatatgggcgtggggtcgcagaattggaaccaaaatcctggcagaaaggtatttgggatctcatggaaattgaattattgattccaacaaaattccaaacagtcagatgagagcttatgggattttttgccagaaaataggaaaatgattattttcccatacagcgtttactactacttaaaagctcataggtgccagttttagagggcttataggtccggtaccggcaccaattagaaccagtctaatttagaaccaagtttgtggcactataggcctataggggtgcacctgtttttttatttttgcaggtgctaaaaaaattaaaaaaaatgatatttttattaggcacctatacaataactctctcatcccacaagtcacatgattttttcaacccataatcacatacatgtctcatggaagattcaaactcaagaccactcacttcacacaaagtcacattaccatctcacctacaaccacttcttgtcttggaaataaatgctattcctttgagaccactatcatccaaatttataatccatatctaacaccatagataagctcaaatgaaaagtttgtcagttacaaaaatgtagatctcatccatatctacaatttttatataggttttgtctccacccgatatcgtttagaaattttaaatatccactcatgcaactagatttgagaccttgtaacacattttcggacatccaaacatccttcaataaaaaagtcataaactacaaagttgtagatctcgtcgagctctacaaatttgatataaagcttatcttcatacgactttatatgaaaaagttagataaaacacacacatatatgagttgtgtcatcataggtgcagttttaattgtaagcaggcacctatgggctcataggtaccggtttttattaagaaccagtacatatgtgatgcccatatgttccggatcataataaaaaccagtacctatgataccgtagttataggtgccggtttatgataagaacgggcacctatgtgttgtctaggtaacggtttgttatgagaaccggcacctatgactttggaggactattgatgccggtttttgttacaaactggtaccaataagtgtttgtaggtaccggctcttaattttacacaaaaaaaaaaaggaaaaagctttataggtgtcagttttaagtaaaccagcacctataaggttggtctctatggggtgttttgtagtaatggttaaaccaaactgaaaatcctatggttaaggaatttaatgaggctttcacgaatttatcattggcttccatatcatgatggtgagttaaaggggcgcacttgcgggtgtatacatgtgttgtgcgtcaggagtggtgatgtatgtctgcatgtgattgcaaaaaaacctatagttcatgcaacacaaacaaattctcacaccatttacatgaatcatttgctctttctctttaccgcactattaatgggcctactatctactcttctttttttcacttgtaccaacactactttaactgggccatccctgtgtttgaggtgatgtgttttacaacaggccacgcacatatgcttgttttgctatacatctttaaactttaatatctcttttttgaataaataaattcctaaatacttaaaaatatatatgacataatatcggggctgcagga

SEQ ID NO: 41182 - DNA, 4753 bp, Oryza sativa
gggggggggggggcgcttctcaaactgcgtgcacaacgtggtttctggtttctgctttgtgctgccgagatgtccgagacactcgtggtaaataggagtatatataggctgaggccctatttaaatgggactaaaacaacttttaagtccctatcatatcggatgtttgaaaattaattataaatattaaacgtagactattaataaaacccatccataatcttggactaatttgcgagacgaatctaatgagcctaattaatccatgattagcctatgtgatgctacagtaaacattctctaattatagattaattaggcttaaaaaatttgtctcgtgaattagcttttatttatgtaattagttttgtaagtagtttatatttaatactctaaattagtgtctaaagacagggactaaagttaagtacctgcatcaccacctgagttgtacactgcgtttctagttactctttcgttattcgtgttaaacacggtttctaagctgttatgtaaaaagaagaattttagttaaagtacaatttatgttaaatttgtagttcttttactagtgtaccgtggccaatccaacttcgctgggtttcttgctcagaataaagagaactgcctatcagagaaaacctgctaaagacactactaggtaaacgattttcctttgtagggacccatttaaattgcgaacggaccttacctggtcacggtggcgaaaatcattctctatttttatgtgcgataccttaagaaaaccacacgcaaaaatcaatttttataggcgagcctcttaacaggcccacacagaaaaatactcaattttcacaggcgggcctcctaatcgacccgcacagaaaaaatacccattccctcccaacgtgttaaaaaaattcaagtttcccttctctctcccccttctcttctcctctctctctcccccccccttatcttctcctcactttcctctcatcctctcaatgttctcctcacttcaattgagctaccaccgcgcggccgcatcgagctcgcgccccgcgggccaggcagccggtgctggcgccgcctccttctccttctcctccagctcaagcctctttgcctccttcggctccggcggcggcggcgggcgggagcggcgggcgaccgggagtggtgtgcgcgtgacagcgaacgaccaccccccgcccggatccggcggaggcggctgccccccgcccagatctggtggcggcgggcgggcgggctcggacggtggggaggcggcggatccgggtaccgctacggcgacgacgagggcgaccgcgaggagggcggcggcggcaactttagagttagggttttgttttattttattttattttatttttggttttttatttttgcgtgcgggcgacataaccacccacacgtgaaaatcagaattttccatgagagtgtgccacccgcacgaaaaatagtgatttttgtatacaatttttagataaagtttatcatgatcggagttaatataaaagaatttaccttttatacattttagttgtgctcatattttcaaaccatccgtaaaaattaaatattcaaacccttaaataatctcaattgtaaaaactttgaacaacggagttttagatctcgtggagagctaaataaatataaagtttatcttcattctacctcatataaaatctcttggagagctaaatctctactattataaaaattaaagatgtttttgctgataatttgataggtcatttgtgtttaagtcggtttttaagtttgttcgcttttgaaaatacagatctgtgtttgagtcggtttttaagttcgtttgcttttgaaaatacaaaaatgtcttataagaaatgttttaaaaaatttgcatgctaacttgggacgcttttgaaaatacaaaaggagtcatataaaaaagtatttaaaaaattgcatgctaacttaagataagagtcggactcctattatcactcgtgattttctaaaaaagatattcaagcgaatttccacaatgatttttaccctacctaaaccgtataacatcaataataaaactaaaataatattcacccattgcaacacacggacatttttacttatcttcgtcctacttcacataaggagtaacgattttttttttaattttagtagtgattctatttttaagggcatccacaatgtatgccataagggggtcttaagcctatagggtggtattgtacactatgggagtagtccttataggtaaccttatgatgagctaccctagacataaagaccacccgtaaggaataaaaaaatcatgtgttctctctcctactactgtatcctctctcctgccttttacttgtagccttgtaggacccaccttatttcctatgatatccatatatattgtgtgtggtttgcaataactaataccacatgctgtgggacccttctatatagaccacttcatctttatcattgctggtgcccttatagcaaggctaatgttggctataaggttttttttagcctttttttagcttacccatataatagttagctctttacaattaatacaggacccacttatctttctcatagagtttcttggttcttatgtccaaaccagctgtaagtttaaaacccgcttctcctctctctcctctcttctctccttcaccttagcatttaaccagcttatagcctagtaatacttgctgtaagggtgcaagggtgcgttttctaccgtgcgtggaactcaattttttatatgctgtcgtagcccttcgctggcaagactactccgcagcccgcagctccatacaagatgcgggactttggtcccaccgattcaagaccgaagactgatttgctgtttcttgttagaaatcgttttttttttctcgtcgtttcaatcgttttttttttctcttcccctctgcatgacttctttggagttggagtcatccccttcgttgttacaaaagtttgtatgggttgtttgattcctttatttttcgatgcaattaggtggcgagcatttccacccctaaaaatccaaaagaaatactttgagcactaaaggctaaagacataatgttgtttcctaataaggaagacatgcaataatatcgtaggtaatttagttcttagcggtgatgtcaatggtacatctcataacagagttcatttttttttcttttttttatgtggttttttggattgatatatgtgatcttgttcgaatatggagtaaggtggtgatcttgttcgaatatggagtaaggtggtatttagacattaatttagagtattaaatatagactacttacaaaactaattacataaatgaaagctaatttgcgagacaaattttttaagcctaattaatccataattagagaatatttactgtagcatcgtatacactaatcatggattaattaagctcaatatattcgtctcgcgaattagtcaaagattatggatgggttttattaatagtctacgtttaatatttataattagtatccaaacatccgatgtgatagtgacttaaaagttttagccccatcatgatctaagaccaacaatttttaagcttttgtaagaagcttcttgaaatatatatcatcaccttctggtttgttttacattaataaatagcgtcgtagcattagcacggatatattattagtgtttcgttaaatcgatgtctaacagtagcatgcaactaaacattaacttttttgcttataagtaatagaagaaaaaaacattaagctttgttatatgaaaatacactactataaaactggcttgaccgcatcatactgtaactagaagtgttatacgtacgctcttgtcgctgtcagttttaaagaggactagctttcagctccaaaagctattttggtagtggtgatggtattaagcgttagtacgggtatataaatagtgtttaacaatgttcgttaaatcgatgtctaacagtagcatgcaactaattaaacattaattttttgcttacaagtaatagaagaaaaaacattaagctttattatatgaaaatacaacactactacctccgtcccaatataagtgcagttacaggtttccgtatacaacttttgaccattcatcttatgaaaaaattaaaaaaatagtcacacataaagtaatattcatgttttatcatctaataacaataaaaatactaatcatatttctttcaaataggacggatagtcgaacgttggatacggaagcccacaactatacttatattgagaaggaggtagtacaaaactagcttcaccgcatcatattgtaactagaagtgttacgtacatgtagcctagtgattatagtgacctgagtagcaccctaaggtcctgagtttaaatctcccataggagtgaatttcaaactgagttattggagggctaagttccctatttgacaggctaattttctaatttaaaaagactacgtatatcaggttggatgtagaggccaggtaaaaaaaatacccttctcttaaaaaaaaaagaaaaacatacactcttgtcgctgtcaggtttaaggaggaccggctttcagctctcaaatctattttggtagtgatgatgatactacctcccacgtccttacaagaccccgttctataatggggcggcttatggctttataacctgtgaatggttattaaaagggggatccactaggctagaaaaaa

SEQ ID NO: 41183 - DNA, 735 bp, Oryza sativa
tcctgcacccaattgccccactattcctctctcattttcgctactctgaaactctgcttttctctgttctgaatcccgctctgaatttattcgtttccctgtctgttgccgtgccggacgcgcacagtttgcatgtgtggtgttcgatccagtgcattgtcgctaacatcgatgttctcaagagtgagcttccctgagagagggatctcgttggtcatgttgtttcttgtgtcaactaacatactgatgttctacgcaaccaaccatgccatgttcgagagaaatgattatgcgtaagcttatgtactctacatgtttttatatatatatatatatatatatatatatatatatatatatatatatcagaatcaatcgagcagaaaagtttgattgagagagagggaaagagagaaccagaacttgaacagaactgattaccgatacccccatcgttggcttgttcatcctgctgagccatttgttcgagtgcatgcatttggtgcgttttatttgacggaatagcgtggttcggtattgcgccataattttattatttccgctagctcctctcagatatttgtagtgaaggattttctcaaccgcaaaaccagatatgcggggtcccctatctgtacaaaaccggtcatccgaggtctttcggcggtattgaccccggttttggtctacgtggcggctgagacagcgtgggacccatgtgggccccacatgtcc

SEQ ID NO: 41184 - DNA, 1324 bp, Oryza sativa
gagcgaatagcaacttagcaagcaaccaacaagcaaggcactaggctgatcatgcaaaacaagagttaaaaaaatgtactattcttgatatatcgcatttgctctgcagtatatacattattttagggggcaatttcgtttttgcccccactttcatctctaaattgagtttgcccctactttttagagttttcatttttgcccccacttttttgaactgaaagatgcttttgcccctgttttggatggaggagttaacggtgttaaatatgacatttatgccctctcccaaatctattcattaattgtgtttttgcccctattatgcaatggctttgaatttttttttgtgaatatgtttaaaactaaatgacatatttggacattacaatttggacaaaatttgaatttgaagaaattttggcaaaatttcggcatcattttaacaaaaattgaacaaaatttcaacaacattttacacaatcatatgaagtcaaattgtacctcacaagtatcacaaagcatgacaacataataaccaacaccaatatagcaaagtttagttcataacaagcaccaacatagccaagttcacatcataaccaacataatatcacacattacaggttcaaatcatagccaacatagtaagaagtaattgtccagatcatgcattcaaacaaaagcaccaataaagctattacatatgaggtccaaaccatttagctagcctccctcctcttcctccccttcccctcccaccaccaccaccaccaccaccaccactagcagcaccaccacctccaccaggggcagcagcagcacctgctcttcccctcccaccaccaccagcagcaccacctccacctccacctccatctccattaggggcatcagcagcacctacacctgcacctccccttccccttcccctcccaccaccaccagcaccaccacctccacctccacctccaggggcagcagcagcacctacacctgcacctccccttccccttcccctcccaccaccaccagcaccatgtcacgccctgaagttcccctcccttgctctaaattcataaaataaatcgtccgaagaaattgtttaatttaacctagagagaaaccctaaagtaataaatgcaaataataatcggaatcggcatgtggaatttttcttggattctacatgtcaaaatatgctaacaggatttttagtggaattttcagagccttggaaataattttaaccaattaaaaatcactaaagtgcaaattttaattccagggaaaatccttttcctttttctttttcttttccctc

SEQ ID NO: 41185 - DNA, 533 bp, Oryza sativa
tcaatgctacatatttttgccaatggtcaaaagctttttttttgtgtgttttctcaatagtttttctttatttcctatgaaaacataagggtgtaaaggacatttaaatattaaatttgcatgcagagatgatgtggcatgtacacatggcatgtttagagggtctaaggactatattgaatcacacaatgaacttaaggtacttgtttggacaatacgaaatatcagggactaaattgatccttaagcgaaagttcaaggatcatgttgggtattcacccaaaaataaatggaggattttgttccacttaccaagctatccacagcaaaaacagagtaagataatatgcgcttgcctagcattgcataatttcattagagatagtaaactagccgactgtgaattcgacatgtgtgaccaagatgaaagctatgttccattgtctgagcaaagtctttaatcaaatgatccaaccagctctttggatagtcaagtgatgaatcaatttcgggacacggttgccaatggactg

SEQ ID NO: 41186 - DNA, 686 bp, Oryza sativa
ctgcagcccttttaagcatcgccgtcctcctctctcgctttttccccatgtcgccgatctctcccgagctccccatcgcctccgcgccgtgcaaccacccgccgccgccgcttttgctactccggccgccgctagccgccgctaggctcgtcgccgtctcgcgccgtcgccgccgttagcttcgcggggtcgagatctacctcggccgccccttccccgtcgaggttcgccgccggagacccatccccgtcgtgtgccggcaagtggcaccatggccgccgccttcggccggcgctctcgccctcccacgctctttcctctctctctaatccctctcctgttgttcgttaggaggttccggagctcgtcccgccgtcgtcgtcgtcctccgtcggccgccgtcgtcgaccgttgtcggtgaggcttccccctcctctttctccttttccccgtaccgtgtaaccgcgtgcgcgccgcttagccgcgtagccgccgctcctcctctagccgccgctccccgccgccggtcggtcgccttcggtcgccgccttgcgccgctgccgcatgcgcgccgccgccgtgtgagcgccgcgccgccggcgccatggtcgccgccgtctcgcgccgcgcccgcgtgccccggccgcgaggtcccgccgccgtccgatctacccttgggtagatcg

SEQ ID NO: 41187 - DNA, 1098 bp, Oryza sativa
attcctgcagccccccagactgaagctgctgttgatataccataatatttggattgtactgcattgaacagggacaagatggatttcaagagcatattatgaggaaaaccatcaatacgttccaaaaaaaaaaaaccttcgagagacaaagttgtaaaaccaatattatatagaaagctaaagtgttatctgtctgaataaccctaaacttagaaacaataaaatgagccatactaaagaatcctcttaatattttatcctctgatcgcatgaacaaaattagggtgctatatggcataagtatgaaaaaagggttaactcaagtactaacactttcagttatttgacatatggtcgggaagcaagaaacgcataaatgtaatttgacatgctaatactacatacaccacaatttagtaaagcaatgcccttttaaaatttgacagcatcgttttagactaaacgcgacaaaagtgcataaatagatcatgtgtgaaacagatatgtatatgattgagtaactggagtatgttaagagtaactaaaatgcaatcttaaaaataaaatcatgttcaccttcaagccagggcagatggattcaaattcaatctttaagcttcataaaaatattgcccttcaaataattcctagggtgtggaacaatggccatgaatccggtaactgacatatcaaggcctcctagaataattgacaatgatgaagaacacattgcatttaccaaggaaacttatcacaaatgcatgtactccaattatacatgtgtccaaataaacatgtcactgcattgagacttcgaatcagtaacacgtttccattgtgaatttagaggatgtcacaggaaacatatttagaggatatcactgaaagagatgctcatatttatataacaagcatcagaaaatggtgacgaataaatgtattatgatagttccggtaaccgaacagaagaacatatgcaaattatactgcattagtttttttgtctaaacatgtatataataccaccaccaccaaacatagaagaacagagacaaatcattcaagggtaaactaccattgattcagatgcgatcgtca

SEQ ID NO: 41188 - DNA, 1408 bp, Oryza sativa
aatcatgcacaaaaaaaatcaggtccagagatggatagcaccagtagctataccgtgttactctaaaatacagaataaaataattttatctcctggatgtaaatctatatttttgtttcataacaccacatttttcacaattacaaagagggtcgcctcaagcaatcgaaacatcaatggtcactacatgcatcgctagaaagaacatcatcttgatgtaaactgctggacctgaatagattggcctctctaacagcaccaggatcagctccaacatcatcttaagctagaaataacttcgatttctgaaagctcaggaagacattagcatgaggcatgtttgcatggttccaactcctaaactcctgagaaaccaaatgccttaaaaaaatttctcctttagccacatcaaaaatctttcaagcaaattacgtccaaataaaaagaagtaacagaaccggccatagaatttatgcattgcatcattattagtaattacaaagtcatcagcacacttcaatattcaaaatgccagagaaaacacatctttactggattcatccaatagcactttttcatggatattatgaagctatcgtttcattgtctggagctccaaaattggttggtgcatacaaaggagatactccacttaatatcaagcaattgacaaaattaacatattttcaaaattatggcacctcacaaaagggaaaattgaccttctgctgcagcctacataacacatatcagcagcacaacaattgcagttcaaagagtctacactgatgaataaaaattgatttggttgatagaaagaaccacccaagtactcaatacaaatagaaaattgcaataattgttcagtatttacagcgaaacctaaatctacaggaaataacagcctcaatctgccatggagaaacttttccaatatatttccactaagttaggcactcaggctagcaaaatgaatacaagattccaactaatcaatttctgaaataacatggtgtctagaaatgctaatcctaattttagtgctgttctacttaccctggagagatcttggtcgatgtcaacgattatcatgaccatgttggtggatggggacaaggctctttgaggcggcttcctcctttcattggcaatgcaaaaacagttctgcaccctccaaatcctactctgagtgggcctcacaccgccggcggaattccattagtatataatataattcaatctgcattcaacaaagaccaagagggattgagccctcccaagtatttgcaataaaaatggaagataactgcatgaataattgtcactctaatatcaatttacaagttcacattatacctctttgtcgacaaggccgaggaactcttgatgctccttgctaacagactgc

SEQ ID NO: 41189 - DNA, 2565 bp, Oryza sativa
atataatacttaatgtcataattattttaaaataatttagccaacatataataattaatgttatgataattttttaaataatttcacgtgataaaaaggatcaacttggtgtcaaatattgctcgataaatatataacactaattcatatctacatgcagggagagtgaaacaacattgtggtttttcagtttagatctgatttaattttaatatatgtgaggcttttctcatttttttataatttttcagaactatttggttggaatgtccagggaatgatcttgctataatacaatcccttaacccatcacgtgaattatggtcatatatgttttttctttgccaaatagttttggtaacaaatcaacaatcctatgcattaaactatttatcatatattttcttatagtttagaaattctaatacgtcggacataattgatgatgtatgccatatacccccactgaagtgattataaatgcactccaatgaattagttactttaaataattttggaaaaaaataaatatattcttaggagtagtaaagatgtatcatgcaattatgaacaatacatgaaaaaaacaaagtaggcgctaaactatagatctttatcaaattataaacaatgatatagtcctctgaagattgtcatggtcggatatccatttagccatttttgaatgatcaaactcgctcatttcaaaaaatagatagttgtatatataccataaaaaaataagcagtactgattaacacacaaaacttaaaaaaaactatttgttattggaaaaatactttcatcatgtacattctctctctgtttttccttgaagggcaccaagcatgctatgttgccatgagtatagcaagggtcacatatggctgagttgaggctacccgagcagagggccaccatttacaataatgcttaactttctatttactgatgcgatcatcgatatatgaaggtgtttatagtgaactagggattaacatcatactccatgttgaccttgaggggcacgactacgttgactcgagacctatgtttaaaggcagtggagaaataaagtctcggcgactatagtcggctttattacccgttaaagggggcattcatatttgattttaacagtgttatcttatcaaccattaggtacaataattatagaatatttattcatagatttagaaacaagagttgacataaacagttatgtttgtagtagatataaatgttttatgtattaataatatattgggcttattttagtggtatagatgcagatccatttattaaaaatgcatcccgttttaaggataattaaaacaagtaaggttgataatagctgagtttacatgtaacatggacaaaataaaccctacctatggactaactattattagtttctcaagacatatttatgaccattagatccatcgttttcttttaaaaaatagaacccatatcccaacctccaccacggccctgtacgtgggcgcttactcattcgtccaccccactgcccacaccctcaaacacaccgtacctctattttcctcctattctcatgctacattacttagaaatcataatttattattaaaaaatagagaacaatatcatccaaagcatatagtgaatttttgattgacttatttttgttatattatttataactaaagttaaagacacatattcacaatattcaaacttttgaaataaatatgtttgattttggtttatattcttgcacttttgcgtacattcaaacaaatataaaaaaaattatgaaaaacatttaaatgttcatcttttaaattatttatgaaatatatatctaacttataactaattgtattcctttttttaaataaaatattaatcacatataaaagttatattgtagtgctaaatacatggtgccgacatatgatacttaatgtcataattatttttaaataatttagccaacctataataattgatggcatgaaaattttttaaataatttcatgataaaaaggatcaacttggtgtcaaatatctggaacagtgaaagagcaatgatcaaagctggattcgatcaagggggagtgttatgaaacaacagggtgatctcatccatataaaaggatggatcgcaaccgaaggcaaccgcgccttccctaggcgctccttggcaacagacgcgatgattcccaaccatcgcgtctctaattgccaccccttccccatctatatattgtaccgcattgatcaataaagattccgctcattcattctctacattcttgtgtgcaattctctctctcactcaatcactctcgctcaatcaattctatacactttcaacacgttatcagcactttcgctctcgcaaaggagatcgcgaagtgaaagaaggaagaaacatcgcttttgatctaacagaaaagcgtacagaagaatcatcagaaaaggtacgatgcctacctttcattggattatggatgccgttctcggcctccctcgcaatcagcgcgctcatcgccttcaccatcttctccgtagatcaga

SEQ ID NO: 41190 - DNA, 1053 bp, Oryza sativa
atagatatcaaattaatctattttttaagtttataataattaaataaaaactgataactagatgttttgcttttttctctgaatttatagaaatttctctaatttattagagcgccatatggtatgttagaagcgtctgtaggaagttaatttaatggacttttttttatatatagagaaatttagttgacaaaaagtcattagatgtctaattatagagctcaaattgttaatttaattaaaatgaatacaatggtttaagcttatcataaattggatgttaggtttaaaaggtcatggtatataatgaccgtttattaaagcatccacctaagaccactgatgaatctcatatgcatcacggtacatgggacatgcatcagaatttattcctcaaccggttttgcctctccgtgagagaaatcaaggagttaagttgaccattagatatattaatctgcaataaatcatggattaaattttaacaaccatgaagaggggtgcgcacgccgtaagatagaaagaggatgggtgcgtacgtttctgccgatagaccgatttggataaatctaaacccttaaaataatggatccactaaatttaatgaaatcaacggtttgatttttttctttttcataaaatttttcttatttataagagtgtcacgtagcagtttagaagcgtttataggatgccacatggtagcttgagagcatttgtagaaagtttaatgaatatatatataatagaagatttgctcttgcttgcaaaaacaatacgatgcatccgtgtgggctggttggttccacacttcaataacaacaactatcactagctaattaattaattaaggaccaaatgtacggcgtagatcaagttgcggccaaggaagaactgctgcacgtttgcacttgcatcaaacccggggaagccttaatttgtactttacttaccggaaatacggtactaattaagatgctatttgatttgtcgtgttggattatacattggaggaagatacagacaacacatgccacctgccatattaatgcg

SEQ ID NO: 41191 - DNA, 814 bp, Oryza sativa
tatatattaaaataataaaactgggtacactaaaaatactttgttaattcgatagttgcattctgtgtgtaaatttgtgtgtggactagctttgagaaagtatatatgtttttcgtattggtatcgtctaagaaagaaaacgggttccaccaaaactaatgtgatgcattatattggcagaaaaaaccaacacccaaaagagaaatatatattataggaatatataaattaagttgagcagaaaaagtgggtcgtgtaacatgtaaaccatagactacatataaccttatgaaattatgatccgagaaatttcctgtgtccacatgtgcctagttggacaattgataaatgcacaaacctgtggtccccaagccacattcatatgccaagtaatggttgtgactaggttcattaaaaattttatgtaaaaaagtgcaaagtagcaagggggaaaaaggtgaaagaaacagtgaggtcagcaatagttaattagcccttactgcaagatctcaccaacaattctgcccttgaataatttagcagcaaaaagggaaaaaagaagaagatgtgtaaacaagaaaataaaataagaatgcagagaaagaaagaaaataaattgctcttgaagccacatgagattggctaactaccatccatttgttgacaagaaagaaagctcttttcacaaacaatatgataatgggtttgtgagaggggcatcaccagctttgcataaacaatgcattaagtcactgttagtggaggtaacgagttacatcagctcactagccatgtaattctggaccaaatcttt

SEQ ID NO: 41192 - DNA, 4516 bp, Oryza sativa
agtagccgaaggcgtcgacgaagaagttggagacgacggcgccgactgtagtaggggccttcatggcgcgtgagctctccgtggccaagcgacttgttctcttgagcgggagcaacaagtcgtcctctggtgactcccgctctgccgtctttgcatcctcgagctcctccgtaaacgccccaccggtgacagcgtgggtcatgccccatcctgccgaggattaccacagcgatgaggagctagaagatgattcccaagaggtgcctgggattcagaggaggacgtggctctaccgctacatatttgagatctaacaagtgacgcagccaatggagaagtagtcagggtaacaagagatctcactaggagatctatctagtcatgaccttgagcagggtgtgaatgtgtgcttttgctcacatattctatctcgctaggagatttagctagtcgtggtcttgagccagatcaacggaaataatttttctttgcaaaaatagtacttggggatattttgctttgctcgttgttaatcttgtttgctggtttaatttctgacctatcttggtaaattgtcaaattctctgcatggattgtagtgtgaaaaaggattggatggactaaatattagcttattatttaactttggtgccaatttcctagtatgctaactagccttgcctttttttttctccccaattttcttttcctcgtatgattgatcaatgagatcagtcaggcatgcatgagttttgggcagtcattgccatgctattgctagttagctaccttaatactccctccatctacttttgatagtcatatttccaaatctgaaaattttatttttgataggcatatttcaatccaacaacttatcatcttaatgactttcttggatttaatgcatgactctttattcttctacacatgattggctacatgggcattgagaaatgtaaatattaatgtatcgcttgtttacgaggaatgactagtagcatatttaaatggatgataagtagaattacttatccttggtctgtgtgccaagatgaaatataactatcaaaagtagatggagggagtatagcgcaattaactaatcggtattccaagtggtacattatataacatcatcttgttttccttatattgtttctgttatctagtaacatggaaaaaagttcaaatacatatatacatgagattaggaaagtaaagggatggctttggaaaatccgttaaggtacatagccttttttggtgctaatacttaacagtcaagcaattactatgtagtttagtttgctttgtgctatggaaacaaagctgtattccagcaggatgaagaaatggagtagctagctagctttctatgtgtttggacaggttgagacaatctaccaaacaactcagaatctgtaggctatctggctatggcaaaacatattttttgctggctagcattcggctgagcacctaagcaggttttattgcttagatgagagttttcttaatgcatttttagatcgcggtgagcttttcaaatgctgaaactatggattggtttagattggtttttttaagtaatagtaagccagagggctgctgatatttatcaataactgaaggagttaaaaaaatgaaagggcaagaagataaacaaaaagatagaggtgttgtaggactcacaactatctattaggttttcaagcaatgaacacttgcttattaaattttatactttgaccatttcttcttgcattagttgtgcgtcataaatataaccatataacttttattcacagaaatctaattaatctttcaaaggtaacttacggtcatataagatgacaataataattaacaatgttatttattcgagaatagagaatagagggagtaggaatcggatgattttactacgtttaaatgtactccctctatcccaaaataaaccaaaattgtactaggagtaccacgagattggtttattttgagacggagggagtagatggtaaagtaagagctcggctccctgtcggctcaacgtgagctgactaaaggccaggccccagttgagcattattgggccagtacaactgttgtacaaaggcatatcagatgccaatctgtcccccagggctagggtggacaggaagcttgtgactcgttagctcgctcggcttggcttggctcggctcgtttaaatttcgtaatgagccgagctggcttttaagcttgttagagataacgagctagctcgcgagccttaacgagtcaggagtcctagagactagagtgaaggcccagcccaacagacaacagcccaaggcccaagcccaactcctccggtggctgagagaaaacactaacctcaccgcatccgcatctctctctgcctcgatcccttttttgcccccacaactcagccacatcctcagtgctgtgccgctagggctgccgccagccgccactgcgagcactggtgtcaacactcctctcccctcccgttgccagcgccaatcgctctcctctcgtcatgcgttgccagcgccgacgtcacctctcgccgcccacatcgggccgtcctcatccaccggcccggcagccgccgccccgtgccacacaccatcacgtgtatgccatatggaaaccttcacctccacaacaattgttctctagcttcataagcacaaaatagtatcacatacgaaaagaaaccatctagaaattccacgaaaataacccaaaaccgactcccttccgcagattgtcggtctgatcgtcagctacccggtcagaccgccccaacaccaccggtctgaccaagcagcacccgcccggtcgaatcggctacccagtgccaacatgcactatgcaacgaatgaaaacactacttacctttgaaaaatattgttcatacacatagattaaatcaacattttgattttaacgcacatactagtggtgtgtacatatgtgtatttcacgtaattctaaaatcatagtgtagttttgtgatacatttgttacatgtgatttactcggacatatgccaccacttatcaataatgtacatggtatccaagttgttacatcaaatatgatagttaaacacatggacatcgtgtccttgaagggatgaaggtattgaatttcttcatagttctcatgaaaaaaaattaggtcttgcgatggcagtaacacgattgccaatgactatataacaaaaaagtagatttttagttatcttcataaactagttgggcatacgatggcttggtatataccaagagcacactagttggtatatatgcattttgtgtgtgtgtgtgtgtttgtttgtttgtttgtttgtgtgtgtgtattgtgtaggtacttctttatcgacacacctatagttgacgtaacgtattagcgttgaaaactagtaaacatctatgattatgatgactggaccacaacaaccattctatgtcgtctaatttgttttagaaacatttcaaagctttcggttacaatatctctagccattactagcaaactttcacaaacatttttcttcactaggatatccctaagcaaagcaagtacgagcatatatagtggccggtgtaaaagaatgccattgcagttgcacatagaaaaatacaaactattgggaagtggatttgaagtttatatgggaaaattaatggttaaattagcatgaaaatttgttatttagtcccggttccttggttcggtagaagtggtgtgaattcatagaaagttaagatagagattagatttggatggttgatatttgtttacgcgcagggggagggagtgggtggggttggggtttgtgttgggggggtggaagcggaggagggcagccaatagcctcatcctttcgatctctaaatcgcccttgaaggctcagaccaaccaaacacacccaaaagaaatagagaagaggggaaaactaaatcacccatcgtcacatcgacatcaacctagggaaaccctacggcgcatgggttgtggacgatggcaaagaggaagatgaaggcaatgggaaagaagaagccaaaggtgccaatgaagaagaagacaaaggcgcaaatgaagaagcagctgaaggcgtcgacgaagaagttggagacgccggcgtcggctgtggtaggagccttcacggcgcgtgagctctgcgcggccaagcaactgttctcttgagcgggagcaacaagtcgtcctctggtggctcccattctgccgtctttgcatcctcgggctccttcgtaaacgccccaccggtgacagtgcagatcctgccccatcctgccgaggattacctcagcgatgaggagctagaagatgattcccaagaggtgcctgggattcagaggaggacacggctctaccgctacatatttgagatctaacaagtgacgcagccaatggagaagtagccagggtaacaagagatctcactaggagatctatctagtcatgatcttgagcaggg

SEQ ID NO: 41193 - DNA, 1912 bp, Oryza sativa
  unsure (1)..(1912): unsure at all n locations
cacgcatacgcatatgtatgtatatagagttatgaatattttttaatgtgtaaaaatatatacacatatacaaagtttatataggacatatatgaactttgtatatgatgtatatgaactttgtatacaacatacatacgtatttaaaaaataaaaaaaaattgcatcacatatataaagtttgcatacgcgtatacaaactttgcatatgtacgaatacaaactttgtattcatatatctaaaaaaacgaaaaaaaacagaagagaaaccgaaaaaaaaggaaaaccaatcttaacataaacaaaaaaaaaggaaaaaaacagccaaccgaacagaaacagaaaacacggaaaagcaaaaaaaaaaaagaagggaaaagtcggtctcccgcgcgacgcgtccgccgccccctctccgcgccatagtataaaaactcggaccggagcttgacccggcggacctttcggttcaccggtccgccggtctgaccaatgaaccggcggttcaaccgcgattttttacatataggtatagtgcatgtttgctagtagtcacaagtgatatacaacctcaacccacagacctgaggtcgattcccaagtatgcacccatttttgccaaaaaattcgaggtaccaatatgatgtggaccatactgggcctctcattggcccattacaaaccttcactggtccaaccgtaggcggtttaatctccggttcaacacaaaaccgcccggttcagccggttcacagcggttcgaatgcatgtcggttccggttttttccggttcaaccgccggggccgggccagtttttttcccngatgggcnggcgcatgnncgggtgtccggtgggggggggagggncnnnggggnngggggggggggggaggggctgggctgatacgcgatcagccgcacgcggtcagtcgcccccctctagtctcttccctgtatctactatacttatgtatagactacatatacacacgcatatacatatgtatgtatatatagttatgaatattttttaatgtgtaaaaatatatacacatatacaaagtttatatacgatgtatacaaagtttatataggacatatatgaactttgtatatgatgtatatgaactttgtatacgatgtatacaaagttcatatacatgcatatttaaaaaataagaaaaaagaaattgcatcacagatacaaagtttgcatacgcgtatacaaactttgcatatgtacgaatacaaactttgtattcatatatctaaaaaaacgaaaaaaaacagaagagaaacccaaaaaaaatggaaaaccaatcttaacagaaacaaaaaaaaaaaggaaaaaacagcaaccgaacagaaacagaaaacatggaaaagcaaaaaaaaataaaagaagggaaaagtcggtctcccgcgcggcgcgtccgccgccccctctccgcgccatagaataaaaactcggaccggagcttgacccggcagacctttcggttcaccggtctgaccgatgaaccggcggttcaaccgtgattttttacgtataggtatagtgcatgtttgctagtagtcacaagtgatatacaacctcaacccacagacctgaggtcgattcccaagtatgcacctattttttgccaaaaaattcgaggcaccaatatgatatggaccatactcggcctctcattggcccattacaaaccttcactggtccaaccgtaggcggtttaatctacggttcaacacaaaaccgcccagttcagccggttcacagcggttcgaatgcatgtcggttctggttttttccggttcaaccgccggaccggtccggttttttccactatgctccacgcgcgacatgtgtccagtcgcgcggggagggacgtgcgcggtgggggggggggc

SEQ ID NO: 41194 - DNA, 3214 bp, Oryza sativa
cagtggagtacagtaaatttcttcctccctcgcccgcccacactattcggtcaatcgctcgactcgattgccgatttccatccattgcatgcattggccgcgcgcgtatcgtcttatccactcgatcgtcgcgcgcggcgcgggagacccggcattttgcaggccggccggcagttcatttacaactatggaagcttttatttgtggccatcgttctgtcggttcatttacaactcacttcttctccacctccaaacgagaacaactcgttagcagcagatcaacacaagtgcatacaactgctgctgcactgtacgcaccacagttgtagaaaagaaagaatgaccttgcctgggagaaaacggacgagacacttgacaatatgtactcctatgtgccagtagttggctgctacctccgtttcatattaagtttatttttatcacctcccatttagcttaaataagttcttttaagtaatcattgcgtcagattttataaaaatagagaataattatattgggagtagataaagtgagtagtaattgcattagagcaagtttaacattatagcccactatcagctccaaatcatttatagccaatgtaatagctaatttatacaatagttgtttactatattattaatatatggtcccacatgtcatacacacattacgtcttggagttcgtgctgcagctggctacagatctatagcccgctgctcttctccctcttcctttatctctttaaaatatgtttatagctggcttatagcctgctattgtacctactcttaggattggataaagtagagatattctagtcttttagtgtttgtattggtatgtgtaggagtattttggaatggaggtagtagctaattgttgaggttttattacatctgcagtggtgaatgcagcgcagtagtagacgagctctactcctatctaaaaaaaattgattgtatagccaactttttttataatgtcgaagataccattatagaacatacaagattgataaagtatatccagttaagatccaaaagattatgaaaaaatgtgtttaggtcttctttatttagacttataagccgaaaagtttaagcttaaacaaacaagcggttttttgtttggcttttttaagccataaaccactcttacactattaagctattaagccaaaagctaggttagagaaactattttggcttatttaagatagatatatgactttacctttaaatttagggctttaaatccactagcttataaatcatataagtcaaaaatctgacttaaaaggcaaagcctaatcaaagaggcccttagcctcctaactttgcgtgccagttttaagatttgttttttatgcttttagggtgtatttgagagggaaggttggaacttctctcacgcgcacgcaaaataggtgactcgttagtgcatgctataaaaaaatttaaaaatagattgatatgctttttaaaatcaacttttttatagattttttttttcaaaaaacacattgtttaacagttcagaagaagctcgcacgcacgaaaaatgagggagtggaagtatttcctgaggtatttttgtgtagttcatgagagaggaatcacttaaaaaagataaaggggaaatattcaatgaaaacccatgaaaatcatacctaaaagttctctaaattcatgaaaagttactggatagaagtataggcatgaaatacatttataccaaatctcaaatccaaactcaactttatctgagagaaacaaaaaggacaaatttgaggtaatagtatcatgttactattcacatgaagctttcattttttacttcaaaataaagttgagtttgaacttgaatatattttaagtccacatctatctctggtaatttgttttcataaatttaaaaactttttggcccgattttcacgagttttcactgaatatctccctaaagataatagcacaaaaatatttggtgtatcatatgaaagattacttacataaataaaaacaataacacaatttatgtaccatataatatgtaagttttattttcaaaagttagttaataatgcagaaatatagaaacttacacaatctactatgatgtgctaggaggatagacaaaatttttcataattctcttaatcttctgacaagataaatcaattgtcagccttatatttccttaggcattttgggaattctttacaaagtatatggcccaatggcatattgtatagacaattgataaaaatagtggtatatttgttaacaacgaaaatttgcatcagattcggagaaggaagaaaatcgaagcggatttggtgttgaatcgagttggattcagaatcagactacggatcggctggataccgcatcggctggaaacagaggttgaagactgaacaagttgagaagattgatggccgatacagctgatatggcatgacttaggctcagcatgggcttagattgggataaccgtcattgccaattagagatggagctcaattaaggcaattatatctattaattaggatattgagtcggtttttattagatttggtaagagaccgccgtatatggtcttatttttatcttaactttagaaaggtttgagtcgtgtccacaacggactaatatgtacttggggtataaatatgaaccccatagcattgtaatacgggagccaatccaatacaacttcggtgcatcgccacccttttacttttctcgtttccggcgagttcttcacaagaggtaacccgtctcaatggccagcgctatcggggctaacatgtcgctttagacatgttaggctcgatattgcgagtcattgctatcatatgtctttgctaatctattcttagcttttcaatttagttttatcggttgctgctcgctttagggtttatgctggtttcggttaaattgtcttgctagattagattagctaaggcatctatcatcttgaagtgtctaattgcttgattgtctagattgcatgtttcttttcatactttgagatgcatcatccctagtcgtgcttagaaccatgcaaactagcttgcaatcgaacataataaggataatatcagggtttcaaccgatcttacctaatatgcatgtttcaatacatgtttcatgtatattcgacacttatatagatagatcgttttatgtaagcatat

SEQ ID NO: 41195 - DNA, 909 bp, Oryza sativa
gcccgcgccgtccgatcggcctcgggccgatccggaccgtcggtcccgtggaccggcggtggaccacccgcgtggtcccggtccacggtagactggccaccttgtgctgctgccagtggggcccacttgcccgagccccctctccctccccttgtgcgctgacaagcggggcccacctgtcggcgcagccgcccccccttggatgacgtctgccctgggatttattgcgcaataaattgattaaggactttttctttattagtaaaaacactatttatcttctaaaattcataagtaattcatccgagcttcgtttaagtccattcaagtctcaataaattcataaaaatgtaaagaatccattaaaaatagttttgtttcctgttgcagtagtcttatagcatgttttgcttgtgtgctttgtttgtcgcgtagatttcggccgtttcgtcgatccgcggtttctcgaagacgttgctgaggtctcatcagtgtgagagcaaggcaagtcatgctttacatttaatcatattgtacccaatttacaaacactctgcatttctattaaatgttgcactcttttacaatgtcatgtgggatgggtcctattactcagccatatatcgttttccatatgccattgataactggggtatcaaaatgattagatgttggtttaggaaatgcttagccatgcttagttcaactagtacacaaaaggggatcacattattacatagactctgactatgagcatagttctggattcgtgccaccgcaatggtgttagttaattaaaatacaccgaatggtgggttgtgggtgcatggttttgctggtcgcactcatggcaattaaggaccggttcacgggaaacccttggagacttaccgtgcttaccacaagcag

SEQ ID NO: 41196 - DNA, 531 bp, Oryza sativa
taacaatgtttgttgaatatatacagaaaataagttcacaacctaaggtacgggccggcgagtcgccctcaagttggggcgaaaaaggcgcatgggccctaatgctagcaaagaatggagaagagaccgggcccacattgttagactaggagagtggcgtcaaccctggccactaggggaaggttttggtcagggctaacactgggggctactgtcggcgatatgggcccagggatatcacgtctagagggaggaggctgcccccaaactcacgtggctccccccgagtggggttgagcccggggtggcgcggcagctaccccctcccagctagaggttggaggccgcctcaaacccacgtggctctcctcgaggggggtcgagcccagggtgttgcggcggctgccccctcccagcttggggtcgggccgcccccaaacccacgtggctccccccgagaggggactagcccggggtgttgcggcggctgccccctccctgcttggggtcgagccgcccccaaacccacgt

SEQ ID NO: 41197 - DNA, 782 bp, Oryza sativa
caaagaggctctatttttatgtcatcattttatcaacttatgcttcttttttaatttttcatgagcatgtttctcaagctgttaaatgttgtgtttcatgcaaatattttcaactatgttagcaaaatgttaacatttataaatgaatctggacaaccatttatctagattcatacaagagtacctatccatattcatgtactacctctatatgaaaatataacaacttttatatatgaatctagacgggcagatgttcagattcatagctataaatgcttatattttggaacgggaaaaatataaaaatgatttttattgaagaaggtagtagacagaagtttatttgtttaaaaaaaacaaataaatatattcttcatacttataacactatctctgtctaaaatattttatttttcctatctcacgcatattaatataaagtcaaaaggctaaaatgttcttcactttttcaaactccgatgtatttaactcctactttattaaacctcaacacatttgaccccttcttttaagaaaactccattgcatccgttctcaaatttctcaaactcaaatacattgattggctcaaattatcggataaatgaagaaggcaaaaaatgaaggctttgtgtgatggagggactggttaattttaattatcacgtgctaatggtccattacgttttccgtgccacaactcaacccaacctcacattcaaacggtgccttaaagcaagttttatatagaattccatccgtcccaaaaggggtgcagg

SEQ ID NO: 41198 - DNA, 2508 bp, Oryza sativa
attcctgcagcccaatttggctcggagaaaatgtaatagtagtatgagatgttatttctatatgaaaaataagactatccatcatttattcttgaagtgtcattatgcaaaaatttttttgaagagcaatacatatttctctggtttgtattcttcacatagtatatctcatatattagaaattgacttgtgggtattgataaaaaaaaccagcaaacttattctcgtaggagcatccgttgggctttatgattgagcagaaattatatagtttttgacaaatcatcatttatatcttatatgcatgttcttctcagggcaatgtactgactccggttctggtctcaattataaaagtgtgacgatgataccaggcaaacaaaaattgcatgtcacgaacttgagtaaaaggtaatgcagtttttcgccaacttcaaatgaagattcatatacaggattcaacaattaagaggtttatttaggtgttggcgatcattaatttgtgtttgcttcagtttatctaggtgtgttttataagacttgttgatgtgccattattattgagtgaatttgtgtaatatttagatataactcgttgagcaaaataccagaattttatttcattatcttaaaaaaacagtcaaagttggtataacttgttcaacgctgtcagttttaaaaacggggataaggtatctcagatcttgtgctctactgctctctcattggagcaaagaggttaaagaaaagcttcgagatcccccaaaaaggatcatgctcatgtcctcgtataactttataatgacatcgtgacagaaaccaaatgctactactacccaaaaaaaaaaaaaagagcatagaggtggggctcaacatgcttcatgcgagtttatggtgtttgtgcagtggtgtacagctacctgggcacctagcaaagggcagaaatccgttgacggccacaagttttgcgatggcaaagctcattggttgaaggtgcactaatgcacaaaatccaggattcgtagctaaaagacagcgattgaccagcagcgagtccactgccagggggatactatacgaagttgtttgggacatgattgtcttaattgggcggtgctttgtttaagttaatctatcttttgtcgcttcacgtagtatttttaatgcaataaaaggctcccttcacatttcgtctttgatctttaatcatcatcgatgacccaagatcacacctaatggaggcggtggatgctctttggttggaatctgatggagagttggagagtggagacgaccctgttcaatttaatatctccaatgtttgcacatatcatgtacggaatgcataccctaccaaatgctgctatttacacaaaaccccggatactatgatttatgtttaatttgtaaaaacccacatgaactttaacatgtactcccttcttctcaaattaattatcatataagattatgcaccaaaaataaggacaatttaagtcacattaatcaagacaccatgcacattcttccgcaatgcatgcatcaattaaaaccccataccaattacaccctagcatgtgcatattctcccatactgcattaattgtattccgatggaatccgtatccatatagttatatggtgatcaatttgagaaattttgaattatattacatgatgatcaatttgggaaggaggtagtatcacataaccacgagtatttaggtgttaagctcttattaaaccgtaatgttaatcaatccatcttattactgtagcaaaataaaaattaatccacgtagaatactacaacatttatacgacaaacttaaaaaaaagctatatatttcagatataattttggaacttataagtattatatatttaaaaaataatagtggtagtgtggttttataaaattaaaaagtcatagtacccatgggtatgtataacacatcgctatgattgtctttattatagagcatatatattatattatctgaggttttctgaaatttattttttaaaaagaattttctgaaatgtactcccgtgggaaacgaaaattgcggatgaaattcttgtcaccatcggattaaatccgctatccttacccaacaaaaatgacctctcaggtcagacaaatcggtttttctgcgccgatatccgcattgacgtgataccagtttactaccgtgatcctaacccgtcctgcgctgcgcggcgcggctcgctgttgcgtacgttgcgacttgcgagtcaaatacgttgctcctccctccgcaccgggcggggggtccccgcggcataagtaaaaaagcgaccggcacggtgggttcccgggctgacggcgcgccatcggcaagggccaaaggaggggctccacgccgcgctgccgcgctgtgcctgctgctgcttgtgcgcagcgcgcgtcgggggcggcggccgcgcgacgcggtggtgcagctgcctgtcgctcgcggcctcggcggcgtcccaccacgcccg

SEQ ID NO: 41199 - DNA, 1534 bp, Oryza sativa
gggccttgggcgtggcagcgccactttcgtaggctccttcctcgggccgtggcaggggtgcgggggggcgtgggcgacgacgtcttctcttgctagttgctactgatccgtgctcgtaatcgtacgtactgcccgtttggtcgggtacatgtacatgtactagtacgtgacatcttgcaatccctaaaagacttttttttttggaagaaccaaaagatagtgaactgcatgagtggaatcctataggatagttaacttgaatctgcaaacatcttaccaccaatcgggagattcagagtttcattatatgcagatgttgttgccctttctgtcacccctacatacttaaatcttttcgcttctgtaagtgggatgcacatttatttgcaacactcaaaagtttctgtaatttgctgatggatataatatcactattataggacatcctttaaaattaataatttgcctgagaacattttcggttcgattggagagaaaaattctttaaaaagacaagaatgcccctatgaccaaaatcttttaacctatagtgctggagtgaagatgaaatatgatgcatattctaatctatttgaaaattttatctctctaacagatcgaaagtgtcctataacatattactatttgtttatgtcttttagccatcacacgtttttacaatattcactagtaaattacataatctttgagtgacctatagcaaaaattgtctttaaaaaaaagagagatatacccaatctcctgcaatgaactaaatgtagaggcacgctttacaaattttcctggaaaggtatcaacattgtcatgcaaatatctagtacattatcaaccactgactataaaggtatcaacattgtcattgcctctgactataaaaagctgaaaaaacgattatcaaccactttttgacaagtttggcttcaaattagctggatggttaggtcgcttcttcacatcgtctagcagaaagacgctagtaaaatcagttcttaatgtcccgcctctctgataccgggtccacttacatctggcagcttttataggttataaactgctctcacaaactaacacaaatcttttctgcacactttgtcctcactcgtgcgcacttgggaagaatttcctgatcggtcgcccatcccaaatctgctccaagctaagcatgcttaaccttagagttctttcgagatcggcttccggaaaagaagttgcaacttgttgatatgagtattctattaatcctattaatccctgggccgggatgtcacagcaagagaataggctggattagaggatcctttctttggagaagtgatgacccacaaaatgtcagtggaggccacttcttgattaattggttccaatggaaagatcccgaaaaaccatgagtttatgaatattccctgtgataaaatagacaaaactttttaatgcctgcaccttgatcaccgcaagagatggagagaaaattaaattatggaatgattactaactgcagaacggggtgcaggaa

SEQ ID NO: 41200 - DNA, 1585 bp, Oryza sativa
agtgctattcattattttgcttgctcatgatttttcattgaagtatgcatctgtttttcattactatcataaggtcattatcattacagctgttatattacatgccgactgtaccatgtaatgaatagtgctcccgtagaccctctgtcctgtaagatgtacactcccctgaatttgttagctgtagcatgtgacaatccaattattgtggactgtgtaaagaagaagcattacaagtttttactaaataattactttaggaaaaaaagagcaactttttctgtgttgtttcagtgtactattgtgaactgtggtttctaggagctaactgggaggcttctgatttttaattgtttaggtttggatatcatgaaaggtcccatattggagatcacttgtatatagcatacagtaaacttccaaatgaactgaggtatttaagctgctcctttgcagtttatttttatacgggtgtgcaatctgtgactttaaccaccaggcaatgcttgctcatagcaaagaagttaaaatttactaaataaggctacaaatctgatcaggactatcagaatgttgagttaattcattcttagtactttcaattaaccatgtattatttatcaatatttaaagatcgtataaaacttctcctgttcttgccatttttcagtatctttatcaatattgtgtttttctatgcgtgatataaaatttgaagtatcctgtacatttatcccctcaccagtgctaggaaattttgggttctacattctttagtttcatactaaactatatatgcatatcagctatcactctttgtttcttatgtcttggacaataaataagctcagggccttatcatttgtatggcaatttttttgtggtatggcaggttgatatgagaagctcataagaaaggcacaagctttgtcctcattaaggtgcgtttatatgataaatattgttcccgttgctggatcactaaatttcaacaaaccatgtttattttggtcatagattcagaaaagaaaatgagtttgaatgaatattgtgtacttaaattgctcctaagttggttcaaccttctcaaaaaagatgtgaggcaatgactccagttttttagttctgtatacagtatgtatttgtcaccctaggaattatttgaggggcaatatttttatgaatcttaaagattgaatttcaatccatctgccctggcttgaaggtaaacatgattttattttaagattgcattttagtttacactagatgtacactgtactactgtagctaggtctgttgttttcatttgtgaaactcaattggtgtaactgctgtaatttaactgcagatctcaaaaccatgtataccacaattggtgctattaagtacttctgcatcaatattgattattgtttgttttttatacaatacaactctgttaattagtgtggaatcacttcacccatatccttttgggatttattgggatcaattgtttccagagtgtgcaagggctatgtatggtgcttcagggtgctggtatattgcacaccccatgataatttgcctatacttccatgaa

SEQ ID NO: 41201 - DNA, 2872 bp, Oryza sativa
  unsure (1)..(2872): unsure at all n locations
ctgcaccccgcagattctgaacagtgctcgtctctataccatcatgtattacatacttggttgtggaggacacctcggctaatggattgttgaggatatctcggctaatggggaaaatatgcgatggaaacaacatatgcagtggaaacctgaaaactaccgtcggatcgaaaaatggacgtctgagattcttccacgttatcccgactaaaaattttactcgcagatatactcatgtagtaattttttttatcatgcgtctattttttatctaacaatcgttttcaggtttccactgtatattttcccaagctaatgagtaatgaaagttagggtttgattaaaaaaataaacaaataaatctcattaaccgaaaattgcaacatactccctccgtcttaaaatataaacatttttggttataaatctggagaactatgtgtctatatttatatatagataaaaattgatatattttgggacaaatgtagtatgtaaataccgcgatgggtctatgtgcgtgctacgtgtgcaacttgtctctctagaactgaaaactgctaaatcgaaacaagctggggctactgggctttacacctcaggaatgaatcgaactgtcgtggccccataggcccatagcacccatgggccggggccttcacttcattttctctaccatagtatcgccgcaagagaaaatcacgcgacggcgacagagaaacagcaaaatcacgcattacgcaccaggagaagaacgaattctcatcgagctcgattgctcgtagtagtactaataacagccctaaatcgcgacgtgcgcggcgcgggggcgcaagacaaagcatacacaaggacgtgcagggagtaggggaacccgtcacctgagcctgtccagagtatacgcgcgcgcggccgggtacaccaccctgcacgcccccgcggaacacggcgaaaccccccgtgttccctcgctgcctctcccggccggccggcgatggatagggcagcngncacccccccccccccccgccccccggcgcagccccggaggatgcagcactgcacgttgggtgtccaagtactctctccattctaaaatacgattactttaatctaaaatggattaagactctgttgagtttgtgattcaaattcaatcgcacacgtaagctgtcattcggtgttgtaatctcacctgatataatgaagatatttgctggctgatgcccgtggttttttctctcttacttaagaaaaatattccatattaaatctcgtgtcttctattattaatctattattttttatcatttatttacctatcgttttctatcagactcatcgtataattatgaagctggacattgacggcttctggccgatcgacgtgcgagcggtcgccgcatttacgcgcgcggtacgacaaattctctcgcattcaaagcaccgcggcggcgcggcgcttgcgatctgagtttatcaaactacggcgtgtggtggtggccgtcgacttgatccgtcggtccgcgtcagactacggatgcagcagtgggtgcctaccgcctttagcttcctgcgtaacctcgcatgggatggcaccccacccacccatgctgcagcgccccaaagcccacatgggccaccatgatcgcttgtagggaatgatactgccggccggtgtgatgcgtttacctgcgtatgcatggcatgccccagtcgcacatgagatagcaatagacttcttctcccagaaaaaagaatatcagagagaagattgcggtactagatatgtgtattcatgtttagaaatgtacactttatttggacgaacacacacatacacactttatctttatgagcatatgaaaaatccgaccaacataactttaaggaaatcactatggtgtcgatgactacattacttattattgaaaattaacggtattaaatgtgtacactctcagttccaaaataaaagaattaagtattagatgaaatattttatgatacaatgaattcagacatcctctatcacgattcattatactagaacacatcacatctaatattagattgattttttttgggacggagtgagtacattcatgtcttcaatgctccatacatttgaaaaaaatttagaaatatacgtattttctgtagaatttgcaagaaaataccgaacgcgtgaagatttgcaaaaatataccgccgtcgcggtttcgttgagcgagaccgcggtcttacacgattgaggcgcgagaacgagagcagtatcgctcgttcagtcagcgaggacggagcgcacgcggtggcctaggcggtgctatgatatcgctttgccgaatagcgagagcgcacggtgtcgcactctaaaagtgcgagagcgagccggtgggcccccgcaaatgttgcgactgcgacccacgtggtctcacgctacaggaacacgagagcggtgggccccctgactgcgatggcgcggtctcgcgctagaggaacgcgagagcggtcaggtgagccccactgcgcgcctaagggcaagtgctatggtagatgtgactaccaccttcaaatttatctattttatttactcatgaactaagaggcaactcatacaatgtatcacctctaatacacaaataccaatttctctaatactctcacatatttcttgaaatttgtgtggatgttgcctcttaatttagaggtagcttatcttctctctcctcacttctctcctccacctcatcactcaatctaatgtggcactcttaggggtaacatatgggagactatagtacttgccttaatggtgttaaggttaagttaattacatagaaaacttcgtataaaaataaattaatcacgc

SEQ ID NO: 41202 - DNA, 2142 bp, Oryza sativa
cgatggtatatttatgctaatcgaacaacatccagtatatttctgaaagaaagatcaatgaacagtatattttcaaattttattcccatacatttaacgaacattcaaaacgcaagaggtaggcataatccatctctctcccggtctcaactggactcgatcgacgacgcaggttttgactcggcatccctgtgttgtgaggggccatgttggcaactaggcattcatgggccacaatgtcttcggtcggttttgcaagttaacgatgcctttaaatgggtcaacgagaggggggccatgtctcggtcgcgaaactgattccgcgagatgaaggttcagtacccgtcccggacgagagcgagtgagcgacgacgcccaagaaccaacaccggtggctcgtacaaattattacaactggtaaggtggcacgtataattgcctcagctaattatccctccatttacttttgatagtcatattttatattggcacatagatcaaagataagtaattccatttatcatccatttaaacatgctaatagtcattcctcgtaaacaaacgattcattaatatttacatttctcgataccatgtagccaatcttgtgtggagaaatagagagtcacgcattaaatttaagaaaatcattaaaatgatagattgttggattgaaatatgcctatcaaaaataatttttttagatttaaaaatatgactatcaaaagtagatggagggagtaccaatacgaaattatctaaattattttacacgtaaatttatttgaattttattaaatagtaatctcgttgtcttagtattttttgaaaaaaaatatcgaatttgatcatgatcaggttttcaattttatactttctccatccaaaagtcttttactattttactatttgcttttttttccaagatgagttgagtgtatttgtattgtgcatgcgttaaagcttttgaatccacgtgactgtttgttaaacatgcatgaaagtagccttcttttgcatgaggtaatccatctgttgcactgttttttcatgaacgcgcataagacaaagtttaatagtatagcccattattagctctaatttatctatagccaatctaatagccaattcatataatagttgcttactatactattaatatatggtcccacctgtcatacacacattgcgtcttggagtccgtgttgcagctggctacagatttatagcctgctgctcttctctcttatcttttatctcattaaaatatgtttacagctagctaatagcctactattatacctgctctaagatcgtgcataagggtttttagcacatactccctccattccaaattgatctacatatttcatagctacaccaagaccaagaaaagctaataactctctcatactatatttactctagcaacaaactcaatgcatgcaccatccccaatattttctagccaatagcaaatcaagatattgcatgtgggttataaatacttgtgtgcatggatgcatgcatcaatgtccatttactccaatgcacaaataacgaatagactctaataaatgaacacaaatatgtagatcatttaagaataacctcaaaaaaaaactagatgtagatcaatttggaatggagggagtaccatgtttaaagagagaagactttaatgctccttaataaatatgaaatggatggagatgggagggtgggtaggggtaacatggaaaaagaattaaatgcaaaatggttgatgagacaagtagtaatatgaatagtgctaaaattccttatattgtgaatcatgatttaaatcctataaatttttatattttaaaatggaagaaggatagataaatagatagatggagaaaaaaaatctttactagagatatgtataagcttgaaatatattttcatcaaatcttaaaatcttaaattcaaagtcaactttatttaagagcaacaaaatgataaatttatagtgaatagtaagagggaactattcatatgaaattgatttttttctcttaaatgaaattatgttggacttcagatttggtatcgacaaatttatagaacttttaaatatgcgtgttttttccttatttaatacttggggtgcaggaa

SEQ ID NO: 41203 - DNA, 890 bp, Oryza sativa
gtgtaggagataataaaaacaccttgacttggtaactagccgcgtaacatcagtgttctagtatcattcgtttacatgtacatgtatttattgtgtgatagagggggttgacttcgtcttgttaagcatacatgtcgatactcgattgttctcctgaaatttgggagggacaagataaagattgcaacagcatcaatgcttgaagctcgaaccacgcaggtcccttttgaggtaggtgatgacagagctcccttcatctctcgatggcgagcaatgagttaaaagaagcatatatgtacaaacgcattttaaaatattcaaaaagggatgacctcaaagagcgggggtatttaactttttgctacttttaagacattaacgaaaaaaagcggatgatcgcacaccgtcccccgcgtggcgcgtcacgtagcgcgcggagagagagagggggggacctccctgtggcgacgcgtgaccggttttttagtttgtatttttctatcggtttttttgtttttcagtttttttctggattttttatttttaatatatacatatacaaactttgtatacatatgtatgcaaagttttgaatatattatacaaattttacatacatatgtatacaaaatttgtatacgttattcttttgtatttttttaatatgtacatatataaagttgtatatgtatgtatacaaagtttatatatttaaactttttatacataaaaaaatgtatacatacttaaaaaaatatacatacatacatacacacacgtatgtatactttatatacatacatacaaactctacaaactctgtatatatgtatagaaaattatacgtatatacataaagtatatactacctccgttttttaaaagatgac

SEQ ID NO: 41204 - DNA, 735 bp, Oryza sativa
aaaaaagcaactcagtgaagcgtgtatagccgcaaattaaaaatctccaatccgaattgaagttgtactgtgacgggaaaactgttgcacatcaaggaaaaggttaaattactattttcacaagaagtgagctgattcgtgttaaatattttttttgaggtgaaaagtaggaattttgccgttttataggtagaaggggaaaataagtttaatagttttacataactgttacatgtagtgccctccgggttggttgtgttcttgtcatgtttcgcttccttgtttttccttgtgtattttctcttatcttccagggctcctgtgtttgcatagctaaaagctttgccatatgtaagaccgtttgacgtaatatattcaagtgagcaattctccccctggtgtcccgtaaaaagaagccataaacaaaagttgtgctagaattagttgtttctatgtgcttgactgtgagcgtttaattcatgcatgattgtaaaagcaatctgctcttcactttggctagtgtcctcgaaagttattatgttcctctctagctagatgaaccaccaagttgtaatttggacccccaaccactcctttctcatgttctatggcttgagtttggttagagcaaaccattgctcattgaggcttatgtgttgtgtcaaaccattgctcattggcatttccccccatacatttaccatgaattcacattctttgagcaagtgatccgtc

SEQ ID NO: 41205 - DNA, 1243 bp, Oryza sativa
aatcacttcatttaatttgttggttaaaataaatttgtattttctctgtttgcaccgctatactaatttctctcttttttaaatttgccgcgattattaattttcattctctcctctgccatggatgtactgaaccggacggatagatttgattggctacgagggacaattggcaacattaaataaggaaaaaaattgctgagatgcaacttgacattaattgaattatgcactatcgactaaagaaaagtcttacctaataaaacagccaatgcccgattgcagaataattgagtgagcaagtatctacttgtatgtgggaatctaattttacttctgtcatatgtgcagacaaactatgatgccctattgccctcttgcttcaaactaaacttagtatgaaaaagaaaaatccctacagttagatcctactcatgccaataaagcatgaagtgacattgtaaatttgcatggttgatttgaatagatcttgcaatgatttgaatataatccagttgcatacctgtaacccttttgttcctcattggcaatgtgcctatggctcttatcccaatttttgctacctttgggcctcataccagggagaaaatggatagtgatatgcactccatttctaatagagattttcttttgggtgtcaagtggcatggtggtacttatttatctcacgtctactaataattggtcagaccaattaaactgtcagttaattaagtacttcgtccatttcaaaaatattctggtgatccaacacatgaggatgggataaacattctgaagacgagtgcaaatagtcaaaaacacagcccgagttgagcaaccaacaagagtccacacctgaatggacctgcccatcatcataacacagccacgaggcctgtgctgattggccggatcttttctttttcatttctgaaaaactagaatggttgaaactaaaagaaaaggcaaaggaacaaacgctacgggctaaggaaggaagcatctggtaaggtataagagagcactcggtagcaggctgccattttcgtatcgtcccctcctctgatacggactccgttttctgaatagtcggcgctacttgtctacatccacctgctctcatcaggaataaaaggggctttgcccacaacttatcctcaggatctaatactgcgccaccatacgtggagtttacagataattcagccttgatgcaaagtactatccaacagagttgtca

SEQ ID NO: 41206 - DNA, 1735 bp, Oryza sativa
cctgcagcccatagttttgcaggaaaatctataggaagctggaaacaacagtgcaagcttggctttctgtcgattgttgctctacgtggtaagcaacgttcatggtgtaatttatgaatgattagtactttctctgctacatattttgtcaaaatatatgtcattagattggtgtctggtgaatctattaggttgtgtgatcagtgtagataaatttgaagtgtcgactcttttctgaagtgaacagtccatgttgcagccttcagtgatccaaacttctgaatctgtgagtttcagctctcttttacttctgagcatgatgaagggtagtttggatgcttaacaagtgattgtcttgtaccaaatcatgtaatttttatgtctttggttttcaaccacctctccaacatcttaaaaaatgttggttagaaatcagatgatcttcaaaatcaacctttctaaagtaacttgggagtttagaaaaagagtaaagtgcacaggcggtccttaaacttgtagaggtgtgtcatctaagtccctaaactctcaaaatgtagatccaactcccagaacttgtcaaagtgtgccatataggtcccaaatcgcaacaactcctccaaaatcctacgtggcgctgatgtggcgtgccacacgaacgtgacgtggcatttaaaaattttccttttccttttttttcttttcttcttctctttttttttcttttattctcttctcttttctctgtgacctgagcaacccgtgtagcggtggcctatatctgcagtgagagcaagaaaaggagaagaaaggaaaaaaaagagaataaaaaagggaaatgaaaattttttaagtgggtctcatttgtcattcaatattatgccatgtcatgtctgtgtgtcattgccacatcagtgccatgtaagatcctggaggagctgtgacgatttgggacctacatgacacactttgacaagttctaggacctggatttgtattttgaggacctagataacacatccctacaagtttaaggaccggccgtgtattttactcttttaaaaacaattgaatcaatgttcctatctttggaggctagaaaaggagaaaacatgattattgaccctgtaaactatggtctcccactactgttgtatgtggttgattttatttttcaaagaatccttacgctttgattgctcaagtgaaactgatcatgcaatgggttttaaatcaatatactttgagcaacaagtataattagttgtttgattctcaacatgattctatttttctgtctatcaccattgttttatgaaatatcaccgtagcgttagcacgttcatattactagtatagtaagtcaattagtaattagtaggcatatactctctgtttcatattataagttgttttgactaatcaaactttatttaatcaagttagcatagcattttaaatacaaaacaaatatgttatcaaaaaacttggttaagtttggctacggaaaaagtcaaaacgaattaacaaaatatacccagatcattcctaaccgttggatcctctcatctaacgacctacattgtgagttggattagcagatggattagtagtaggattagtgaaaccaatggacaacctccttgctttgagcaccccacgcctccacttcgtcgccgccttgaaccacccctcttccttcccatgtggctcatcgccactgccatccctcatccaa

SEQ ID NO: 41207 - DNA, 1601 bp, Oryza sativa
gcaatagtggcggtttcctgcggacaaagggggagagatggtagcaacaacggttggcagcacacgcttgagtcgcctgccagttgttgtaagtaactgatttaccagcgcttcgaaattttttcaggtcttcacatcccttgccagctcctgcgcggttgctcccaccgtcggctaaaaaaaatgagttcaatgctcttgctttgcttggtaggcacgatttgctgctccgctgcagcaccaaaaaccactaatgcgttcctcctcttccttgttctctttgtatccttgttgttgttgttgctgctgctattatgttactgcctccgcattgctctttttgatttgttgttgatttgcttctgctctgtgctgacctcatgatgtatgtgatgccgtgtactgctgccatggctagagaatagaaggatacaaagagaacaaggaagaggaggaacgcattagaggtttttggtgctcaagaactgctcgatgaaatgtttcttgaggtactactaaagtttgaatacatattgaattatctttttagtacttttacatgcggaaaccttcttccttgtttttgttattatattttaatggaaagtaatttatatttaacaaatatttcaatggctcatccatgtcaatcaactaaatcaataagaacatgcttagtttattcccattagggggttgtataaaaaatacaaaacaaaatagatgtttggtgattgtatttacttgatctggcttttggtgtgctcctaagcaagtctgtcaactttttttgcctgtggacatattgtaggggctcatccaagtatttgtctcttctatcgattggcatgtagtgatttagtgccttcctctggattgtgcacacaagaactgttggccaggttagtcaaggttgtttagtgttgttaagattatcatgaatgcatactcatccttattataaacacccctctccccattatctctctctccgcatgagggatgagctgctatatagttacaattgctttttatcacaatctcacatgtttgtttatggttttttttattacaccatgtttcatttattagcttgatcactatttctccttcttatatactttagttcagtgaaagtattttcagggaatacggcaaagaattatgcatcattgtattaagagaaattaagttcaagaaagaaaataaaaggtgttggcctaattctcgttggttcaggtgtgaccaaatcgactaccaaaaaaactacaaataagctagggcagaaaacctgcatccatcggcatcaggccaaaaagaggagcacacaaaaacttcagtccctccactccaaacttctcttggctcatctctatccgaatcttgatatgaatacttcatttgccacctttttttccatttgtattcaccatctcagttcatgttctatccttttagcctttttcctatcatttgcattctccaacgcatttgtcaatactagaacccttttcattataagaattccaaatttattcaactacatgttgtaaatcctctcaagaactagttgatttcaaagttaaacgggctgcaggaat

SEQ ID NO: 41208 - DNA, 965 bp, Oryza sativa
ttcctgcagccttgctggagttgctcttacggagatgtctcggtggatatgtggtttgaggtgctttgggttcctgcagttgctcctccaatcagcacaccagttcttttgtgtcgtgagacacatatccactaccctgcacatcatgatggttatgatcaatatgatatgttcactggctcaaataatctccttatactttataatctcatgattaatatgcatagagcatgacgataatcaataaattctactctctcagtttcaaagtacaagtattaatagtttgtttagaaaaaattgagaataaaatgaaatactttcaatgtcttttcctcagatccctccccaatcaatgatggaccaaaataagccgtgcaatgaaagatccctccccaatgatggaccaaaataagctgggcaatgaatggagtagtaaagcactactaacattttttctactttcctcgttatgtagtacgagcaaatatatttttaaacaaacagtggatgatggtacttggctttggaatagtgtcatggaaattatttataaaactgactatattttggaaatggatagagttaattaatgttttgtttatatgggcctcaatgctggccatgcaaatgaggtcttacaactcacttcccctcaaacgccccctaatttgattaagttatatagagtaaaagttatatctatgttcatgtaggtgctcatgtgttacacgtgaggtagggtgaattgcagcttgagcgctaccctgcttggtagacagcatgatctttgcatcagcgtggttgagtgcacacggttcctagttggatctgtgctagcggtgtttgttggagttcttagcgttgtcaaggcactagcacgttatggatcctcggatcctgatttcctcgtgccaagaagtatgatctataaaactatacgcagtattatatatacacatatt

SEQ ID NO: 41209 - DNA, 655 bp, Oryza sativa
ccatgccctgcgccatagtaccaataaggtatggcgcatggccttgcaggcgaagaggttacgtccacccacgcccttcgacatagtgccaataaggcacggcgtcaagggctgcggacgaacaggtttcgccaacccacgcccttcgccatagtgccaatatggcacggcgtcaggggcagcgggcgaagaggtttcgccacatgccatacccttcgccatagtgccaatatggcacggcgtcaagggctgcgagcgaagaggtttcgccacacgccatacccttcgccatagtaccaatgaggtacggcatcaagggttgcgggcgaacaggtttcacccacccacgcccttcgccatcgaaccaatgaggtacggcgtcaagggttgcgggcgaagaggtttcgtccacccacgcccttcgccatagcgccaataaggcacggcgtcaagggctgcgggcgaacaagtttcaccaacccacgccctgcgccatagtaccaataaggtacggcgtcatgggcttgcgagcgaagaggtttcgtccacccacgcccttcgccatagtgccaataaggcacggcgtcaagggctgcgggcgaataggtttcgctaacccacgcccttcgccatagtgccgatgtggcacggcgtc

SEQ ID NO: 41210 - DNA, 4206 bp, Oryza sativa
cgcgctaaagaaaagggtcattttttatataagttttggccacggttcatttgtaaaattagtttttgcaaagagtcaaattgtcaaaatttgtggtttttgcttaatatataagtccaaccaatctcatctacagctatgccgggacctagcttgcttcgttgtgcaaggtaaatccgtcgatgtcactgcacatacgggtttggtttgtattgacaattaatttcattttcatggattctattgaacttgtaataaatatttagatcgataaacatcccaaattaaaggacatggccctcttttttttttagataatggcgctctacatcatggatatagatatgttccctataacatattctttcacgagcaatagataactatatatattttttttaagataatgggtagcgcccggcctctgcatcataggtgaatgcacacggccaatagataactagataactagtaaaaatacaataatgtttgagttctgtggataatatgtgatggggttgagaggtctctggaaagaaaaaggcactgggatttggaggtttcgactccaaagaatgccggtgtagacgtgtagtagtctcggtgggaatttcccacaacatccaagtcgactgtgaatgcatgcgtgcgtccgtgtgcagtatactcagatgtccggggcttgcgggcgtgtggtgagtggcctttagaccaggcgtaggtgccatgtgggacatcgctactcagtgacatgttagtgtgaagtcctcatatcagtgccgatttgtgtttacgattagaacaacgaggtctagctcggagcaatcatcacatatgggttgaaagaatgtacctgtcagaagcaaaatccagtactcactccctcccaaaataagtgtagttttgcactatttatgttcaacgtttgaccgttcatcttatttaattttttttatgattactatttttattgttattacatgataaaatatgaatagtacttaatgtgtgactaaatattttcaaatttttcataaattttttaaataagacggatggtcaaatgttaggcacggatatccacggctgcacttattttgggatggagatagtagtattcatgtttggaattatataactggacgtcaatttaattatttgttgtatgaagaaagagcaacggtttgaggcgtccggccaagggcatgcagaatcatcttttgttcgacagcaaatcaacaagagagtgattctgacctttgccacacatcttagccagcagtagaccttacttttcctttggcttttgtggtagatgcggtgcccttaagaataacagctgttttttgggaaaaaaatctatttagaaagttttgaacatatctacaggaattataggtagagattttcaacataaagttaacgagtccctttagcaaaattttctacacagtgtcttatcagtggcactttccataagagttgataaaacggttggtgatacgccctataggcaattataaagatgattgtatcacatactatgtttacatatttattatattttgttcctcgtaatagatacctcgaaatagatagctcattactggttaatagatatatgattctttcatgagattatttatgttgtatgttactacttgtaaatgatccctggtcaaatatcatgtacggaacaaatatggttcaatgataagtatatgtattgatacatgatgatgtctcatggattatggtatggagataccaaattaataatgtggacatatgttgttggatagatccaacaagagacactacaagagctatatgtgtgatgtgctatcagtggtatcatttagtgttagtgtagaattcatagagttgagattatcttgagtcccgacatgtgtagtaactaggcagttattaaagtagtattcatgcattctatgaaacatgtagtggaatatgaataattaagacgggatttgccctcctccagggagatatttttggggccctcggtgttatacattatggaggtgcatgaccatgtcgaaagtgattgagtcaatccaagtcaaatgatctatcacatgatcgagtaaatgattgagctattaaaggatggtatatatctagccttgagcttaatcaatatcgtgaagcaaagtagttcaaacaagtataaactagaggttcagtcgatatgatctttatgtatttttggtaagtaaatatgttctgctaagggactctgttgacatgtggactggaaaagaagttttaatgttgcagccgagtatacatgaacctgtggggtcacacacttaatgggctagaataaaaaggattggatggagatcctgttgagttgtgacccaaattcatttgtacttactaaaggccagcttctgccggagcgaagcggatgcccgtcgccggaggcttgggccggagcgaagcaaaacccgggttccaccatatatatacctcttgtaagccgccgtacagcgttgtaacctcacatcgatatagtgaagatattttgctggctggcacccgtcgttttttctcttcttctttgggagggtttttcacgttaaatctcgtgttttttgtgattgatctattgttctttatcgttcatttgcctatcatttcctaacagatccaatatgtgctccagctgagagtccgcccgcgcgtggcgttccatccctgaacgtgtggatgtcggtcgagccacctctggtttgtggtgttgatcggcgtgggagcatggtgagacgaatgcacaaggaggagaaggtcgggctactgcgatcaaccacttcctctacatcgacgaacactacattgtcaattttcctttggcttcatagcacctacttccgttgcacagcgcatcgagtggtaatgattcacgatctacttgcatggttcctggttcacgcggtagataatttttatttattctaccgtagtctttgcgggatcatacttctattgaaagtgacttatttgaaatgcaagatcatacttttgaataacattctacaaaaaatcctgctagtcatttataaatctcaatttacattttagatcttaattaatagtcctattcaacacaaattcagaacaagaaatttctaaggacaatcgctagcccactcatgcaagcccatgctggctcagtatatagtatgttgagggaggcacaggaagtccaaccatagcaaattaaaaggctactgtaaggttgcactcgctgtggcctcatggcagtcaattatgatttctgtactaatctgatgtttgttcccttcatcaaatttgttggaactaatcttgttgtaaatgattatatggtgtcgtcttagtttagtttgatcaagtcatatgttgaaatagttgcatgagagctcatgcatgcatgtgtacttcctctgttcacaatgtaagtcattctaatgtttcctatattcatattgatattaatgaatttagatagatatatatatctagattcattagcatcaatatgaatgtgagaaatattagaatgacttacattgtaaaacggagggagtagctgggaacatgataggttcacgttgttcctggtttgcaaggttaggtagctactaggttaggcaatgcaagcatgtgttgcacgtaaagcgagtccgtacattgagccgataagcctcttgcgtcactactgcagaggtgattttccttgatgccaacccattttggttccaggcgggccaaaagtggcttcgtctggaaccaggcgaatgccggcccgggctgtaggtcgtacgggataatcgattatcctgtgcggcccacgtaaggcgaccgcttgcgatggtcggggggcatataagcccccagcccaaccgttaacagtatttctggcgttttctctctcttaaacatccgcaaattatggggggaaggttttcgacctcaaatctttgattgggttccatataaaaggtgtagagcttgttctcctccttcatttgcttctatttttgtcagttttcatcggtggaatacgaagaaacttgcacttttataaatggaatagtgtagacacctttttgttttttattttttttagcaaacacataatgattccattacatgtttataaaagtattcagtacctacattgaaaagttgggtttg

SEQ ID NO: 41211 - DNA, 824 bp, Oryza sativa
cccgtgaggtcaaattataccgaccgcatgggataataggttatcccagacggctagcatgtgctagcgcgacggcacgaattatcccgtgcggtcggtataatttgaccgcacgggataatagagtcagccttattgcaccacacgggataatagattatcccatgcggtccgtataacccgaccgcacgtattccgtgcggtcgggccgcccgcaggcgaaaataaagattttcccagatgaggagctgcaggcgggccgggcgaccgcacgggataatctatccaaccgcccgaaaaaataggtattgtagtagtgcgtgtaaataggaagtggagcctgggttgtggagatcatgcctacgcagttagagtaaaggctaataatacaactagcagttagagtaaaggctaataatacaattagctgcttactgtatatagtggttacagtttacctctcagacaacttatatagtggttagctcttaactgtaaatatatggtcggcatgtctctctcacatattttattgatttttgtgcctaagctggttgtaagcttaccacccgcttcccctctctctcctcacctctcctctcctctctcatctacctcacaatttagtctcttacagccttctattatactttgctcttcggcggccagtgtgtcagctgggcttcaaaacagtataccactcatttaattgtgggtgtgtgtcataatataaaaagccagacgtgcgtcgtcggtgacgttcgtcgccaaaatgtcgtgtgcgtgtgactccaaattttgctattgtgtgttgtgttcatacc

SEQ ID NO: 41212 - DNA, 3992 bp, Oryza sativa
  unsure (1)..(3992): unsure at all n locations
tcattgcgaatcatcccgcagtttttatactaccttttaactgcatctcatggtgctgctcaaactaattgatgtcatgcattcgctgcaatgaattttttttgtcccaagtaactttcaatacaatggtctaatttcctccaacgccatcaaggacattggggagaaaaggcatgcctgccaaaggcacacaactacgaaacctacagaagaacgaaagatcacagcgtgcaaaattatacaatcattctactgatggtagtagttgtcacttgtcagcatggaaactcactcaatcagcgtagaacctgatgtggttctcagcattcaggaccacaaaatcagtatcaattgcaattatacatttgtttttttttcccacaaccatatcagcatataactgtccaccggcagcgatttagtttggatcgttagcttaagcatcacatggctccaattcccctgaataaaatcaaaagcctgcaccacaaacaggagtgcgcacgcaatcgagtggcaatcggcaagccgcaagcgcagccgtaccaaaaaccctaaaccctagccaaatatcaccaaacaaatcctagctcaccaaatccctcgcggattatgcgcgacactaactggtaaatcacacgcaaaccgaccaaaaatagcgcacaaaaccctaccgagaagttcaaactcgagctcacgcccaaaaaaaaatagaagtacaaagggggatctcacagcgctgtggcccgtggccggggttgccggcatcggcgagggagtcgaagcggtcgcggttggaggcgagcacggaggtgctgcggccgaggaggcggccgcgcgagcgcatcacgccctgggagacgatgtggggtacgggtagcgcgcgcccgccgcggccaccgccccgatcgtcctcgtccatggcgtcctcctcctcctcctcgtcgcggtcgtagtcgacgaactccacgtcctccgccgccgccgccattgggatgggagtgggagacagcgaggaggaggaggagagcgtgtactgtttgcgccgcggaggtggcgacgtccgacgtggtggttttataggcggtaacgacggattagcgcgtgattacgagggcggagagtcggtaattaaggagggagatttgcgtaatgatcccttgagatttcgttaattaactcgaagcgaactagtgctaggctgctggcttagatgtgggcccactggtcggatcagcccatccgtctgatctctgatcggtaacggacggtccagatcgcatctagttcgcacccggggggcttctccggacagagatggcggcggcggcgacctctccctccgccgcatcctcctccggtggtagcggcggcaacacggcggagggggagatggcggcggcgagcgctgcttgtgcttgccccatctgcctcgattccttctagacgaggcgtacctcgacacctgcttccgttagtctctcctctcagaatctctctaattatcctttatttcggatcttaagattgctccgcatagggtctttaataattaattatgtgtaagctcttcaattctgtaagaattcttatcttggatagaatctttgaacgactcttaagtagagggcaaaagatgtgaagtttctgcgaaattgcttgatggcctctaactaatttgcttcagttttgttcatcaagagaaacattgctggaatcaggacagaaatctactgtattttgaaatcaccacttgcctttcatctgttcaagttcattttcttagagtcataatgtttgtgcagattctttttgttacaagtgcatatgccagtgggtaaagattgtatcgaccaagcatgccgaacctttatcatcagtgcaatgtcccctttgcaaggtgaactcattttctctggttccaatagttattccaaaaaggaacaggacattctgtttgtctgataccattctcaccacatttctcttagcttgatagattatcatcttcaagtgaattctgacagaaaccatatgaacctatgccccattcatatgttgattgaaaaaaacgcttttgaacgtgatgaaacgccactattgaatattgtttaatttgctagctttgggtgtttttctaggaaagcttaaatgtggagaacacaccataccagccattactttttggtgctgctacatttatctattgatgatgcagtcaactatatctataaatttgaccccttttttgttcaccgcccggcaaattttttgttcacctgagactgtgccctgaggtcctgaatcctgattatatgtcccttgtgacatttgcagaccgtgaatgtgtctattatacatggttttaatggtgaatcatttgagcggcactacataaatcaggaccccagaaaaaggtccagttatctccttccctccatctggttgtgcagtgctgcgctttttgtagttaatgttaacgagcagacatttttcttttatttctgcgatggagaccatttgcatgccactcttctcattgtacattaaatattgttgttacatgtttcaataagtatattaagctcattttcctcctcgtgcagacatctttcagatgcacacgacttgattacccaattctatagtatacgaggtatagtgttggttnttagttatgtccgtgctcacacttttagaacctgttccagatatctatctatgaatctagtgttatatgactgacgtgtgctcaactgaacagatattataggcaatacttccagcgttcagcaattctggaagcaacgcaagtatcttcgcaagaacatttggcttcaaacctggctaagacaggaaatacaggctcttacacgggtacatacatacagtactgcatattgtcacacggttattccatagcttaaaagggtcgcacttgcattatcttcttatctgtgtgtaattagggcttctcttcttatctgcattatctgacaatctcattttacccattactcatggatcatagctgaaacacacacttgggaataatacctactcttatagtttagtacaaattggatttgatttacgcactcaagtgcacatgacttgggagcatgatgatggtttctattattctttcaagtgtcgtagagagttgagaatttgtgattattctacgatgttatataatcgtcgtgctgctatcgtgttgcttgctgcaatgtattgtaatactgggttttgcaggatgaaaatgttgacgctattatctaccacatccatggtgtgatcgagtctttcatgaaaaggcaagagaaggggcatgcctcgaagatggctccaccagagaagaggagggaagaattcaagagcttgctcatggaagctgccaggccgttcctccttggccaaacggagcggtttgtcgctgaggtagagctcttcttggtctcacatctgaacattgacgcatatagcaggctgcgtgttcagagacttaaggagtccacttcgcatgtgtcaagagagcaagatgtgctgccacaggatcggtctctggaggaccactacttgtactttctaggtgatgaaacagattgcaatgacgagatatggtgaattgtcaagcaatatcagtgatctcctgtaggtgatggcacagattgtaatgctgagctctgtatctcgagtaccaattgttgtatgtgtaggtgatgaggacagattgcagatttgcaacggatatatatcatagtgatgtacaagttttgccaaaacagtgtccatgttccctgtaaattttgccactcattcggaacctgtaaactgagcacaatctacaatggtatatatagataggagatgcagtcttgctattctggttttggctgcatgcgatttggtatttctgcatattacacaggataagctcaaaagagattcttttcctgaccaaccatgtgatggaactccagaatttaaag

SEQ ID NO: 41213 - DNA, 1877 bp, Oryza sativa
actttgtagctccttcatacacagatctcccaaaacacaggagtagggtattacgcttctcagcggcccgaacctgtatacatcgcccgtgtcttgtgtgatttcactctcgcgaactttccacagaccaagagcttagaacctcacccagggcccccggccaaaccggcaaaggggggcctgcgcggtctcccggtgaggagccccacgctccgtcacatgtggacaataataaaatgatttacattatgaaacggtggaagtattttttttttcaaaaatgaattaatttgatttttttaagcaacttttgtatagaaacttttttaaaaaaaacacaccgtttagcagttttaaaagcgtgcgcgtggaaaacgagggagatgggattgggaagggggggtgccgaacacacccttagtagcatcagagccacaaggtggacagtggtcccgtgctagtggtaggggcaaacgacccaactatatcgactagttaggatgacggtgaatccgaaagcgggcagccgcagagataggaaaatcagcggggcaagggcaccataccgccgcctgcttaaggaggagatgcgggaaagggtggaggtcggctaggagtagagatggcaatagagacccataacccgagacccgacaggtttttactctattagaagctaattgttctaactcttatacacatgggtctactaacgggcgaaaactcttatctattgggtacatggctatgggtccgttctttacccacccgtacccaccaacctgtgggtgaaaaaaaaccgttgattgagtcaaactatgagcaatataagtatcgatgactactaaatcatagcataaaactcatttcacatcttaagtattgttctagtctagttatatgaaattgttatttgatttcttgattatgtaatgtggttgtataattttttttcctcacctttgaacgctaatgttaattaatagtattgttgctaaagaaaatattgatggtttacaactctaatatggctaattatagtacaaaattataaatgctgcaagtcaattatatgggtatgggtatctatacccgttacccacacgggtgtgggtatagggacgattttgtatccacgatggatatggatatttaagtgagaatatttaaacatcacgggtgtgagtatggggcaagctaagagaacccgatggtatgcacccattgccatctctagttaggaggcctcgttgacatcattcgcgccttccggctagctggcggggccagattgacggtattggtggggcagattatggctagacgaggggagttagggtgtgtttagttgggaaaagaaaatttttgggtgtcacatcgaacgtttgaccggatgtcgaaaggggttttcggacacgaatgaaaaaactaatttcagaacttgcctggaaaccgcgagacgaatcttttaagactaattaaaccgtcattagcatatgtgagttactgtagcacttatagctaatcacggactaattaggcttaaaagattcgtctcgtgatttccttcataactgtgtaattagtttttctttttatctatatttaatacttcatgcatgtgtctaaagattcgatgtggtgtttttgagaaaaaattttgaagaactaaacgggcccttattacatggaacaaagaaatttgatggccaggcactggtgtcggcatcagagccacgaggtttggagtgggcaggagcagacgacctgactagttaggatgcagcagtagatctggaggcgaggagccgcaccgagacggggaagctggcctgaggaggagggcgggggttggggggggagggggggcgggagga

SEQ ID NO: 41214 - DNA, 7255 bp, Oryza sativa
gttttctcactgactagcggaccgatgcaaatctatgttgaatttttaggtcaatgttttcgttttcggaggatcgatgttgggtgaattataagattttttataaagaattatgtcggtaaagctgttgatgcatgcttggagtagaacttgttaatcagctgtctgattgtaatttgcattcctcagctccttttcttagttttgtcttctcaacactcaattcaccatctagaacaatcatgcgcacgcatggttgcggtacattaatataagttgaaaattaatactagttcaattttgttcagaaaaaaaggatagaagaaatgttgcttcaattactatgacgatatcaatctgccacagaagacagaatctacacgtcgttttcagatatggttaaactattccacagcacaaaactttgaaatattcagatacaagtacaattaaaacaactgaatatatatatatcttgagtgtctcattttcaatgaacaaatcgtcagatattcattattagatacagatacaggtcttcagaagatatcaaaagcgaaatattatattatggtcgatcgaccagtctggggtattgtttaatttactttcgttagtgtgcatgcattaacataatttgtgctcaatttaattagcttgccatcacgatatatatatggactcgatcgatcgagctgtgacgtggcattcagtttgtgtgtgaatataattaattgtttctcctatccgtcatgatagatatactcctaatcaataggtacttgatgaagtatataccatgattaatcaattttgacttcgtgtgtgaatacaattatttccagacgtttgccgtgatggttctgtgttagtagtaccttgtgatggtaaggtgcaattaaacgtaaggctgattatgtcaaaactgggggtggctattgcctaatgcatgataaaaatatggtgctttgttactggaccaaaccaaaactagagcagagccaaattaaagttggaccagctgttttgatcaccttgatttcaccataaaattggcttaaatattggcataccatgtctcatattttcagtttggtatgaccaagtattttgctgaattctgaacgactatgtggaatggctatttccttgtttcatgtgagcacgttcccgaattgctaactaatgtattttatgtaaaaaaattttataggtaagtttcttaaaaatatcaaataaatatatattactcaattaattatgcactaataacttgttttgttttacgtactataaaaatcacagatgaacctctgttttgaactcagccttaagctaaaaccaaaatgaagaacacatttaatatatagacataacctagttagttagttttggttctgaccacatgagagcatcaagcaaatcaacctaaaaaatgttcatgttgttttcctcatccaaataccacaggctgcccaatgcttgggctttttctcaacaccaaatggacaaaagaggcttcccaaaactcctattagccattcatcagtttcaaaaaagtctccacagtagcaaagagctaatataaaaacacaaataagtcacgatatcttgtagtaaaattattattttttaccaggctagcgttcattttggcatgaacaaaattttaacttcaaacattgatcatgtgcacatttcctataaacatgacctagctagttaatttgaatttggctcaacacatggcccacatgagagcatcaagcaaagcaaaccccaaatgttcgtgttgtttacctcatccaaatttccacatgttgcctctatgcttggatctcttaacaccaaatggacaaaagggattccccaaattaagtttctagtagccaattgatgattaatcatcggtttcgaaagagcgcccatggtagccacaatcctcgtatgattgtaacaattaataccacgacaatttcatcacctcggtctcattttcttcaaccacatgaatatatacattccgtagttatattacgtgtaataacaaatatcttctagcgtataagaagccgattcgcacttgtcaaactttattttaaacggaaagtctaaatttcaggtgactgaaataaagtctctttcttaaggctgagttcaggctgagttcgggatgcaaggttcccaaccttacctcttaaaaaataaatcaatataattttttaaagtgatttttctatagaaaacttttgcaaaagacacacagtttaacaatttgaaaagtaagcacgcgaaaaacgagagaggtgagttgagaaagaagggacaatgatcctcgatactcatttctctttctaatagaaaaggtttaaaaatgtagtaatacaatatataccaacaaatttacaatctaaaattgcacattatataccactgtaaatttattttagaaacatagtgcaaatgcaaacgaacagaacgcgcgcacactcatccgtatggacacacatgtacacactaccccatataagcacctccgagacagaagattggaccaacatatattaaaatttattaaatcaccacatataccttagaaatatactccctctatttcgaaatgtttgacaccgttgactttttgccacatgtttgaccgttcgtcttattcaaaaatttttgtaaaatatgtaaaattatatgcctacataaaaatatatttaataatgaatcaaatgataggaaaagaattaataattacttaaattttttgaataagacgaacggtcaaatatgtgctaaaaagtcaacggcgtcaaacattttgaaacggagggagtactattttaggtgactgaaaattttatgtgcctgaaatctagccattcccttctttgtggcaaaaccatatatatgtgttgcaacggcggtgggtgtcagatccatcggaatagtcaaattaacatgtcacaatattcatacgtgtgatactacgcacgaaagtttgaaacagacgagcactcgatcgatcgatcgatgaaatcctgaccgttgatgcttgatcgtgtggatgtacgcccgatcagcctacgtacgtgtgatcggcggtgtgcaaattagtcctcggaatggctcgcgcattcacaaccagcactgggatgcacgcacgtactgcgttacacgtctgcattcagttgtggaatctttcatctaggaccttacttttgagatatattacattcagattcagttctttctctcctcctttctcaatttcttctccatggttttttgcgcgcgcattttttaaattgcgaatcaatgtaattttttataaattatagaaaatttgttttaaaaatcatattaatccacttttaaaattttttaaattaatacttaattaattatgtgttaatttatgcttcgtttacatgcttgaaggattatttcccaaactggtaattcttacttaccttagtagttaaatacatgactttattcgtatttaaatatattactttattcggttgagtttgactactatgtttttattagaaataacgtcattgtataaaaaatatagtattgtaaatgtacatataaagaaaaacttatgcccaaatatttttttataatttcaaataaatattttaagaattattggtggtcgaaattttaaaagtttcaccatcaattaatcatacactttaagtaggagggagtaatattttttcattgcttagttttctttgccgagttggctgaaaataatcgactagtttttgctatatataaaggagaggagagcaacttgcgagccttttttttctcttctgaatagcagaatgattttacaatcactattcaacgtacgtacgttatagacaaacaaattaactgttataaagttaaaggaaatatgttttaaatacattcatatataatttaatttaaaaaaaaactagataaaggccggtgcgttgcaaagaatattaaaagagataaaataaaaaataattagaagtttttagcatagttagttcattaagcatatcatatgatgccatatccaaagaaaaacatttacgtgtaaggaccatatgatttcgcatgttattttgtggcgttagagacggcatcatttaaaatttaaagtagtatagaaaatcgccccatgaatttatggagtatatataggagcttgaaagtgtgtcggaagtcggatctatcaattcttccttccaaattagaacagacccgtacgtataaaacaacattgttgttagttggcaccccccgttagaacacaaaacaccaaataagttcgttcgtcaatttacatgcctgaatttcagaggttgttgacacgagcgaacgtaagtaacacgcacaaaagactttaattagcgcatgacttcgaacacgcacgtgcggtctcgatcacaactcgcacggccccacgtgcatgcacacatatagggtgtatttagttggggaaaaagaaatttttgggtgtcacatcgaacgttaatttcagaactaattttagaatgaaaaaactaatttcagaactcgcttggaaaccgcgagacgaatcttttgagactaattaagccgtcattagcacatgtgggttactgtagcacttatggctaatcatggactaattaggcttgaaagattcatcttgcgatttcctccataactatgcaattagtttttctttttatctatatttaatgctttatacatgtgtccaaatattcaatgtgatgtttttggaaaaaaaatttggaactaaacgggcccatagtctcgcgcgcgcgcacacacgaacacacttagtacacgaagtagtagcttgtatgcttacgccgactaagctgctgatgtcataattaggtttgcaaatggcaatgacgtcaggatgacatgtcacatgtcgcttgtgggcatatgcatgcgagtgtgggcggaatataatgcttgtccaactagagcccttccagaaggctacaatttcaggactaattctataaaaaatgatgaaagaaattactaatatatttagggtttgtttagattgatgccattttaaactataccattttaatagagttgttaaatatatgcatccatttagtttcttgccaaactttggtaaatacataagaaatcttatcaaacttttgacaatgccaaaatttgataaggttattttggctacaatctgaacagcctcttggtgtgaaatttatgtgaaatttcggtgtgctgttaagggtgtagtagtggttgttaagttagtagaggagctttctacctggataagtactgctccctccgtttcgaaatgtttgacgccgttgactttttagcacatgtttgaccattcgtcttattaaaaaaatttaagttattattaattcttttcctatcattttattcagtgttaaatatatttttatgtaggcatataattttacatgtttcacgaaagtttttgaataagacgaacggttaaatatatgctaaaaagtcaacggtgtcaaacatttcgaaacggagggagtatgtcgggtcctaatcgtgtgggatatgtatgatagaaggccgttgaaaaatgatcgataaaaaattaagaactaatttataggtaaaacttttgtatttactcatgatttaaaatccaatagtagtagcttttaaattttaaattttggttgtgcaggctgataaaatatcaagaaaacgacgagggacgtttttttgcacatgatgggtgtagacaaaaaattgtgaagcggagataataactacagaaaattcgagattttagcattattattgatttattgtgtggctcaaatgggagattagaccggagaaacaatgcatgccatggtcaagattgagcagagtccatggtctatatgcatttgttttttgaactgtggtctatgcatatatacatccaaagactactaaacttgtgttacacggttttgaacttgcacaagtatatacaagcatgctaatagccagctagtgcttctagtgtccaagacacagagtttcgtcaccgtggagtttaattaggtctaaatttaggtcttcatggaacattccgttaaaggtgccttctttagaccaccttggttaaactaattttacaaattattacaatggctaaactgattaatctaatgttatatattttatctctttgagaaaactaaaattggaccgcattgcaagctaactagacgttttttttttgcaagctttctctattaattcaaaatatgtaggtcagtggcggatcgagaaaatcgatttattgatgtcataatatgtctattggtgttatagtatgctaattatatttagatcatgatgttatattatatggataagcagtttcgctataggttttaccgaaatttgtcggtgtcgcctgacactagatccgtccctaatgtaggtctcaaagcattctccgcttttcgtttttttccctaaaaagaacttattttgtactgtacgtggtttctttgcacttaattttaattcttttgttcatgttctattttccaataatcgcacccctaaatgtccatttttctctttgatttgatgatgactaaaatgtcttcacgtacgacttctactctcgtctttgatccatagctagtacacaaaggggacaagaagaagttgaataatccctttttgataagatgggtgaaaagttaagctgacgttgttgggttaggcgtgacagataaatgccaaacagagccgctcatttcgtaaagatatactacttgacttgaaatcacaagtacacaccaaggacaaagctagatggttagtgagatcagcagtcgagagaaaagacaacttcataagtgatattggaagataagtagtttgaaatctgaacctctgaacatggcatgaaacttcagaacagtttcgtgttgtcttcaagcttgcaaagactattcaaagttttcttaaatgagaaaaatatattctggccttctggggttcatgagatcgaacggtaggcacggcacaggtgtgtatcatcatgcgaagatgatttgattatttgattgttaatcacgcttaccaagtgttcctgccattcagattctgttggaaaaagcagaactacttctcacaactttctgttctgaacatcagaacatggacaactcatgctagagaacatttgatggagttg

SEQ ID NO: 41215 - DNA, 1822 bp, Oryza sativa
attttttctgcggctaactagctatcctaaccgctatatagagcgcacccttacttggctagacatcgcatccaaaatctttggcagaacgagaaaagatttggttctctgtagtatctcatgttcacttgccaaacaaggatagtgcagagcagtgatttttaacttctgttcttctaactttctctgaagaaccttgcttggaagctgaatgtgtaagtaggatgggaccaaatcttcagcagttaataagtttcagttaagcaattgattactagttgtgaaatcttgaggacactcttgccaataggtagaatgttagcttggaattggatggagcaacgcttcactgatgaaacctggttctcctcatgcaattctcagcattcagtagtaatcatcaatcaagctgctaaacagaatagccatggcagttactacctcagtcctaaaatatataaaaatctataatcaaatgagacattttctagtatcagattcgtattactaaaaaaaatattccatccgatactaagttcttatatattttggaacggagagagtaagtcggaatgcatcaaacggatcccaatgaaattgatccgaatctacgagagcgcaagcgaatattactacagaatatcaggggttacatgcaaaaagttcttcttcccattcccctgaaactgaaaaagatttggcacgaatcgaaccctccaatccattgcttgcccttttttgtgtcctccagcttctagaaacttctagaacccaagtaagtccaagccgccgccgccgccgcctacagttgcttgcaagccgcattggcccaggtaacacgcccgcgatgtgctggtcattctggtgttgataggaattcacagttttgatctctctgctccattctgtagcctccaggtttggcgctcaccacctgttcgacgaaatgcggcaagagggagcagatgtgcgcggcagccacaagatcaagaagacgactgctgatgtggaaggcgggggtgaatggatcaacgccctcccggaagaggtcctgcagcacgtgatgtcgttcctgccggcgaagcaggccgtccggacctgcgtcctcgcccggcgctggcgccacctgtggaaatccatgcctgctctgcgttccatccatggtatctgaacaagcacgatgtcaggaacctgaacaggtttatgaattgtttgattcgctaccgggaccgcagaatgccactagatatgtgcgagatcaaaatcggtgcttttggggagggctgtggtgaaccacaggttgactcacttatcagatatgcctctgttgcgcaaagctcggataatgaaggtcgaattgcatgagcacaacgataactttttctctagccaagctgcctcttatctcccagcgcttgacgaggttagagcttagtaatgtgccattattatgtggttttgttgattctttgagcttcccagcatggaggccctatggatgaagttctgctatatagacggtgagaagatatcgtctcagtcacttaaagagctgaccatgattgactgtatattttttcgccaatttcggatttctgctccaagtttggtgaggttggaaataactgattgtgtgggtaaagctcctgtgctggaaataatgccatctctagtaaaggcatttatcaggttccgagactctagagatatttgtggtaaagaagaatttgggggtagttgtactaatgctagctgtgataattgtggtgctaatggtgttgacagtggagattgtgtgcttctgaagggtatttcaatggca

SEQ ID NO: 41216 - DNA, 640 bp, Oryza sativa
agtgcaacccacaatattgattactaatgtgatgctaaaaacaaaaaattacaaacaacaagttgaacatatatactccttaaacaagcgcaaccattgacaaacaacggccatatatagaattttctgaaactgagaaaccaaacattgtctgaaactcatcacaaattcagaagccaaactaggagtgaacaaaagactatgtcaagtcatgccccatttgccaagaagactttataggtagaatagattgactgctaattaagttagattgtgatgaaacaagatggacttgaagctatgactctcactagccgtgttgaccaatctgcctccaaacttgatggcttcacactaacttactcaacggggcagtgtaaattgttgggttgtttttagcagcctaagctgaacaattttttcacacttgacgtatttgctgacagagctatactttgatccagtctattaccatctccagactttgaattttgtatgtggttatgtgtgagctcttgacctcagatttttggaatttttcaaaaagttatcttctagaactacttatttgtctcattcatctgttggaaaaatgggttcttgggatggaactgctagctggcaggaaaacgtttaatgg

SEQ ID NO: 41217 - DNA, 588 bp, Oryza sativa
tctgggaatcttttgtcatctgctctagacatttccactgatgtagatataagaaaaatcagcactatgttcaattctatgctctgttttcgtactgatttcatgttcattttcgtgctccttttgaaagctttatttggatatttacatgagttagattgaatgcccatttaaaagtttagaccctgggacctgtagggtagttaatagatgaggtagatatggtgcccttaaaactttagggcctggaccctgaactacactttaatatacaaccttaccttctgacaaggctaagtgaaacacccacaaaaagattgggaacagttgttctgttgggttggataaacttaatactatcacccactgtgccattcataggacccgtctattaaaggataggaacaaaggctgaccattcactcactgcgccaagtggggagaatgctattcactcaaggccacagaagctcacatggtcatgagctcgtgagggcaaggaatctcctctcccctggatattagttatcatcagtagtagcagcagcagcagcagtagtagtagacagccgtagtaatcatctttgc

SEQ ID NO: 41218 - DNA, 548 bp, Oryza sativa
aagtagctagctgatgaaaatctagaaaataagttttctaattttttgtttctagtttattttctcctttagatagtgaaaattatttacatttcggcctccacttttagacacacaaccaaatttaattcattttctaaattcaataactacagttctcaaaatttaaatgaaaatctgaattgtttaagtaagctagagattcttgaagctgcaactatcggcatctcccatataatgttagtacttgatacattgcccgcatttgcatgtgatttttggtaaatgtggtacgagaggtgcccactaccttttttgcctagccaactgctgcaacagaattaagtggatctgaatcattagcaggaacacacaggagagctgtgtgcatagtgaaatgaatttggtctactgtaacgacttggtgattctgtaccgaagtcgtacatacaacacgtgcaagagtacgaactcattttataattgatttcgtgcaccatgcttttgtgtgcgcgtgtgtgcgtgtgggggggggggggggccttgat

SEQ ID NO: 41219 - DNA, 599 bp, Oryza sativa
accttggagaggtcgaggagggcgttctcccgcagcgcggggtcgcagaggtcgagcacgagctgctccgcggacgccatcttccggtccttggcggcccccggagccgccgccgccgccgccgacgacgacgaggaggcgccaggcgagggcggcgggggcgagggcgcggcgaaggaggcggcgccgatggagagcgacggcggcagattcgccatttcgcggaggcggcggcggcggtggagtggagaggggagacaggacaggaggaaccgagcaaggccgagagagtgtatatacgaggagacaaagccggcttttttactaactacaccctccactaaagtagttttgttgtttttagaggtacgttttagacaaaataatatggagtattttgtagtaaggattgtaaaaatattgttacactaagtgtttggcttagggtgtcaacaatggcatgatgttagggtatacgagtaggtgacacaagtaagaacttttacgtaaagggaagttttgttgtttagagggtacattttagacaaaataatatggagtattttgtagtaaggattgtaaaatattattactaagtg

SEQ ID NO: 41220 - DNA, 535 bp, Oryza sativa
tcgtgctcatccctcttttaaattcaccatgaaaatttggaagtttgtggcaacagatagtcatactggcttatgagttgtgacgcaaaataataatttagagtttatattgatgcatgtctatgccatatttggttggccctgaaatttactgacgaaactcatcatctgtgtaccgcaggatgatcatgtaactcctaaccacaagctcgccagaagggcatcagtgagcagaagccatgggaaatgctgatttgaggcccttccacgcatgctagcctttactaatcacccaagtttgcagcaatactataccagtaatttcacagcttatccgaatcaaaaagaaaaaaaaataaagacacagcttctcaatcataagtaacattcgccagagatccaatttggcacatcgaggagcgtatttacatgtaattctttctgaattatgttgggttggacatcatccccagtatgttgcgctgcccatgatcagacaggataaaccggctaattaataatccatgttagttac

SEQ ID NO: 41221 - DNA, 540 bp, Oryza sativa
tttaccatgctttctagttttgcgtaacactgttcttttagtttttttacggctcctttggaatgcaagaatttaacaggttttggatcaatttccgtgaaatctctgtaaattccattcacttgaaaagagaccttagtgctgtatagcgtcagatttcagatcttgttgggattgtgctgaggcacgttaacgtttgtggtggcgttaggtgattaaacagaaaaacagctcatgtaatctactagatacaagacaaagcatgtgggtgtcataaaatcgcaagggtagttcagagtttgtatattttgtatcaggaggatttagatttgcttcagcttgatctgaataacgtcattcaccaaacacaacgtggctggctgctgctggtgaattttgatcaccaatggtcggaaactctgaatgggccaaagcatagctcagcaacaaatgcaggtatttcatgactctcagacatttttctctgaagatttagtgagatcagataagagtgccatttccttcattctaaaatatagc

SEQ ID NO: 41222 - DNA, 593 bp, Oryza sativa
caggcgtgacgagaaaccaacaatgatttatgaatttctttgctgaacagcaaaacggaaaaactaatcaactaccaaataggagaatcttcaagaagctatatgccataaagcactgaattggtaagattccactccatagatagaaacagtccccaatacacttgcacacaaaagcacaatcacacatttaactcttgtatcagaccattcagggtgtgtaaccacaggatgccaaacagtacatttaggagtactatgaaagcatcaaaataaggaaagttacgcctaaattcataaacgaaaaatgagttgtgagttactgttttcattgtctcgtctagggtggagcagattgcaaatttcattcaccgctcctatgcccaagcaaatcttcgtactcataggctgcatggattcaattcagcaaagtgtacctacagtcctagacaaggataagtttgtcggggtctgactcagatttgggtgttcacacttgtgaggtacttactagtcagaatcagacaggtgttgccatgtcggaatccgactcagacacgatgtccgatttggcaaaatagttttgggcctgg

SEQ ID NO: 41223 - DNA, 602 bp, Oryza sativa
caatcacaatgtgacacctcatatgtgtaaaaagtttataaaaatagtttagtacgcatatcgtttcccttctcctgttagaaagcggggatggttaaaattgatcttcataggaaataaatactccttattagtactaattattccatacatggatggtaattatgtagaaaagatgttgcgatggagctctggtggccacacaacttatgtggagttggctccgcgctgcgcttgcgcatccatcacattgttcacatggtttcgctctacctgtgcccgatccggcctattgccatcaaaaaaacaaaggaagaaaactatatgatctgcggtaggagtatgtcaaaaaaccataattacaccttgtttagatcctacctcaaaattttacaccatatcacatcgaatgtttgaacacatatataaagtatttaatatagattaaaataataactaattgcacatattgcgactaatttgcgagatgaatcttttaagcctaattgctccatgatttgacaatgtggtgctacagtaaacatttgctaatgatggattaattaggcttaataaatttgtctcacggtttactgacagat

SEQ ID NO: 41224 - DNA, 520 bp, Oryza sativa
gccaaattgttttacttgcagctttctacaaagggtaactagcagatgttatgcgaccaggaaggacaggtcacatttggcatcttgcgagggatagttttgtgggtctgctttggggacccatctaggtatcccctgttaatgaccagcttagagaatcccttttggtgctgaattagttagctacttgttgtagatgctcctgttggaatatgtgtccagatctttatatgatgcatactccacgactagactaaagataaccagtaaaggcttttgtttggattgatgcccaaaagaaccttttataacaaaattaagaatactacaagcgttcaagtaaacccaatcatgcaaaatacgctagctatcctgctagtgttggtaatgattgtagaatttatccttagctaccagaaacttggtatggaaacaactttaatgtaaaaaaaaaaaatcagccctagcaactttcaaaattctgactttaatttgtcagcaaaattgttcaactttatta

SEQ ID NO: 41225 - DNA, 694 bp, Oryza sativa
gactagtatgacatatttgtagggtcttgaatagatttggccacagttggatgccacatggactccaatcattcatacatccaatttatgatcagacaaattatttgaggatctttcttcatgttggctactttccttttatttctttttttcttctcccaagtggttttgtttccttttccaaaagcttaattaaggccggcttcttgtcacctgaatcctaatcattgcacaaatgctttatgtccttttgatgacctattgtgctattaattcagcaatagcaattctaatcatcatcttcccactagggactactagaacatatctaattcagaaaatgatctaacaaacccattcttttgttttgtgcagaaagagaattgggtgctatggtttcttcaagaaaaacaaaagcaaaaatggaggtgctgaagattagaacatgatgcaaatgaagaagtgggctacatccaggaagaggatataaagcttctgtagtgatctgcttatacaacaagcatcagcatgcaaaaggagctcatgcaatgatgcaaaaacaccaactttgcatacataaaatcagtgcaagatgcatgaaacgatatgacaccagtgaaaagtgcaatgtgcaccactatgactggctcacacacacagagattatttagagagggaaaggaatgcataaaaa

SEQ ID NO: 41226 - DNA, 2927 bp, Oryza sativa
cccagtgacattctaaagtaatgcataagttgaaataaaacaatagctttaaatggggtcaacatgctcaagggattgtttgggatctgtgtgacttgccttgcaaacaagcgtcttcaattcgtcttcaggaatttctccaacgaacgaacgatcctccgaaacaacggaaaactaaacctagaacgcaaaacaaggaaagaaactaataaaaaccaaataaacagtacaattaaagttcataaataggtagagcttgaatttagatgaattatgagacttgaacgacctcattccgagttcgtatgaattagatatgaattttacaagatttaattccaattaaacctattaaagaaaagactattccaaattgattaaacaatttacaaatgacttatagctgagacaaaagattaaaacatcctccggaaatagattagatcatatttggtagatgacatatattaaaaaggaataatatgccattgaaaagaaagaacggatttatatcgattttggacggctgagattaatctcgaccgagtcgaccaagatcggatggcttggattgacacacggcagcggcacaacagcggttgcggtggcacacatacagcagcagcgcgacggcgacgtacagcggctaaacagcgacacggcggaacaaggcagctagcgcagcggcgacgctagggcagcagctagtgacacagcaacggctacgctagggttagagcaacagcggcggtgacacgaccgagggattgaaacctaacccgaggggacacggatagaagtctcaccgaaccaaagcgaccggagagggagggtcgacgatgacgatccggcgacacacacggaaacgatgacgacgctagggccaaacaacagattagattagattagattagattaaatccctagggataaactacaccggtaaatgacatgggagagaggagagctcaccggagaagacgacggcgacgaccaagacgacgacggcgacgaccaagatgacgacggcgacgggtgacggctagcggcagcggcgagctagggcagcggcggctagggtattggagaaggcggctaaacaggaggaggaggaggctaggggcggctgaaaaaaacaggaaaaagatggggaggggttggtttaaataggggaagattgaataggattaggtggggccaaaggaggcacggcagagggggagagggagggactcggaggggagagggcaggggaggcgtgcgcggctgggagagaggagaggcgcacggctgggaggaggccgagagggggaggggaaaaagatacgggaggaggggttgcctagaaaggaaaggagggggaaacagatgcggtgccgttttgggaaaagaagaggaaacggaaccagaaagagaataggactcggctcgtcatacaaaatgaaaccgcggtggcaaaagaggtcggtggatacaacgaaccgcagacagggagagtgaaccgggaatgattcacaaccaaaggaggaaaaagaaagaattattaattacttttctaattaaattaatcactgaatgatctttcatttattaaaaatacttcctatcctgaaataattctgggaaaaatccagaaaatacttggacattaaaaatatttaatacaattttatctatatcaacttaatgttcaaaattttcatagattttattcacacacttactttaattattaagtaatttctaaaaattcctttttcacaacgatttataatttagcgattttcagggtgtgacatgtgatatctcgcagcacctatcataaacagttgagcaaatcggtcgatctgcattatcctttagtttgtgccacagccaacagggaaagcggtggtaaaccatttgcatgacaagtggaactgtggaccagtctatttttttcttacccaaaatttttacttcaaaaataaaaagtttgacccaagcccgtacacttgtgaaaaatggacatgtgaagtgacagatcgcttcgcttatcctaacactactggagaaaccctcaaaccgggagagaatccgagactaaatatgtgtgtgtatgtatgtacgtacatacgtacgtacgtatgcatgcatgtatgtgtgtgtttaaatacatattatatggatgtatctacacagctagtggtagctggtttgtctaaaacagctaccactctatctataatagggaccatccacctatacttcaaatacaattttctcttaaactactcatccgattttcgatccgattacaccgttgtgttcacaacaattaaatctttacaacaagatctcacatgattatattttgatgaaaaatcacaaattacttttatgatatgtctaaattacttttagatttcactaagttacttcttaaatataaaaaagtaatttacatatattatagaagtaacttagaacaaaacgaaggtaactttagcatgtcatttgaagtaaatccgttttagagataaaaacatgactctatctagaaattaaattaatcagcacaaattatggaattaactaaaaaaataataaaagtaatcacctcagagcattatgaatgtataggaagtattttaataaaatctgaaagtaaattatatatatatatatatatatatatatatatattgaatctattctacaccctctcccatgggtcaaacccaccaccccaccctcccttgggcccaaaacccctctcccacctcggtcaaagcgtcctcccgccggtcaaacccgctcaccactccttcccccacccaccactttgctgctctcgtcttgcaggaattgtgcaataacagaacggtcatcgtgcagtaacaagacaatattatcgcagtaacaacgtcaaaaagtagtcatgatgg

SEQ ID NO: 41227 - DNA, 993 bp, Oryza sativa
acaaatacatttatatgtatacgtatacatttatacatgtatatatatatatacgtatatatgtatatatatatatatatatatatatatatatatatatatgagttggataatatgaaccaaggttcatatgcacctcaatccccggagtgacacgtgtacacaaccccccatgcatccgcagtccccatgcttgctgatcagcatggaagttgtacctgccttgtttgagctgctatataggccatgcattcagctgttggctaggtacatgttactatgttaggttgtccgttttacccctctcatgtacgtgtgattcagtaagaaaaaaatgaatgcacatactagtagcaatctttgtccgcgcatggtggccaactagccatagctcagttggttcaacaggccttcataccaaaaatatattcctaatctccactttgcaagtgtactttctcattattcaatctcgtttttatttaccaataatccccaataagattggactttgggtgcagctagcagattgaatttagaacataaaattattgttattttacaaaataaaattattatttttatcccaaaatataagagattttacctatatagttacatatgaaaaaaaatataaaacatatttccgtgtagtaatatggatcaaatccttatatttggatatggaggtagctcatatagttacatgagtaaaattctttacattttggtggtatgtacttttaatttataatttactctcgccattctaaaacataagacacaataactgcttaaagagaaaaataaaattattatcacattctagtttagatcatcgtaataaatacaatgtatatacccaataagattatggattttgagagtggaggatttaagaaaacaaattttaaaaaaaaatgtacgaaaagccaaattgtggtccttattgtttgactaggcatgacactaaaaatattatttccaaaatat

SEQ ID NO: 41228 - DNA, 1169 bp, Oryza sativa
cggattcgagggaggaacgaagctagggttcacgggagagggagagaggaggccgggcgggaggaaggagacgaccggcctggcgcgtgggccccacgcggtcggacgcgcggtcagcgcatgcgcggcgcgcgtgtgcacggccggctcggctcggcctggcttgggcgcagcttgggccgggcggccggcccaggagaagaggagggggaggcggcctgggagaaagagggaggaggagggagtgggccgggagggggagaggaggcccgggagaggagggaaagagagggaggagagggagactttggccgtgggccgggagagagagagggaggactttgagccaaatttggcccaaaagaaaaaggaggattatttttagatttttctttttaataaactttgataattgtttttgttgcttaataaatattcccggcgctctgaaaattcaagtaaaatttgagggctccttttagaccaaggagaatttaacaaaaattctccggaccacattcgaatttttcttgtacgtattttagtgtttgccaatttcttttcaaattttaattaattctattattccttttagaaaatgatttttaatttcgggatgaatttatcaggacgtgacatagagtacccactagttggggttttgtttatcctatggtgaacaaggtaatagtaaacaatagcaatgataaggctataacaaggattaataggaagtgctaaataaaacagtgattacgcgggaatttaaataaagcggtaatgcaataatttaaatcaaaataattttataaactgggattcaatatgctcaagggtgatgtgacttgccttgctcagagagaacggccttccgaacctttggcgacgaccacaaaccacgcttcgagaaccttcggaacgacagaagctacgcgaagcacacaagcaaagctacaagcctataaagaagcaataacaatacataaaaagaaagcacacggttctttaggttatgacaaacattaggagacttgaacaggtcgattcggggttcgtatgaccaagatatgatcatccgaagtttaatgctgttacatggagatttacggattattgtgattaggttttgcaattataaaacatgtgtaagcgctagcctggaaaagaca

SEQ ID NO: 41229 - DNA, 1214 bp, Oryza sativa
ggcaagttcttagtttcaagttgagatgcattggtttcaatctccaacaaggaagtaagttctatcaacttcacttgtatcggcatgactagaacattctcgattaagtcatattttttttttgggttgacgcaagcattacctatctaatacattgattttatctttaactgcatagctatttatagttgaatcgacttagttaggactttctcggttaggtccgatattctgattaagttgatatttctctaatcataccgttgttttagataaatttgttatatccatcatgtttgtgcatatttatcggctaaatagtttttttgattattttcttcaatcttatactgtctcggttaggtttaatctaatagatggctgctaataagtaattctactaagccaataggttttatgctgtgtttttatcagagttctagccgatgtgttatcttgttactaattctcagtgttgtattgtcttatactcaaacttgtataatcaatagttaaatttctctttatcatcttcgatcttatattgtctcgattaggtctaatctatcaagattgttttaataaggagtggtttattgatgattatgcatatgtttagttctagccgatgatagcatatatctcattgtttatccgattatctgaatctacatcgagcatatagccgattgatcaaaaccctattgacatcggcaagcctcgctacatcacattggcctattggttagatgtatcttgttagttgtaggatcaaatgaactaaaatgccctttgatcttgttagttgtaggatcacattggccctatgatcttatacaatccatttatctattttgttggttgtaggatcaaactaactaaaacgccacgtacacgaatgataggacgagctatgcagatctctcatgacttcatgtacgacgaattccatgtcaacatgttgtcatgtggttccatctaaaccctggattgaatcggtctgggccgtcggattttggtcaactcttggttatgatttaatctaggttttccatctcagtgaacccgtggactacctctgtggacctagtctacggtggactgattgccgatgacatcataatttatctttgtcttctttaaagtagttataatttatgtaataaatctatttaatccttttaaataggctttaattggattaaatcttgtaa

SEQ ID NO: 41230 - DNA, 674 bp, Oryza sativa
tttgaaacaatgacgtagctcgggtcatcatcaacgggggtgttctggcagtagatggtgatggaggaccgctagacgaaatgcacctcctccttgcatactcggcagaggtgacaacgggcaaaggcgacaaatagagcagcgacgtgccccgactggaaggtagcggcggtgttgatttgcacaggcgagggtggcggtggaaagaagatagggggtggatcctatttgtagccacgagagaccatatccttgcccaagacggctatggcagtgctgggaaaaaactagagttctaccggatagagagagtccgagttcgagcccgattccacacaatttacttaggtatttttggggatttcttggggaaagggtagaggaggagataaggaacaaacgccctcaactaattttggaaaagatcaatagaggcggttggatttcaaggcgacatagactctggccagatgtaggggacaacactaacatgtgggatctcgtcccacatgttggtaggagggagatgagggaggtgggtcgggctagtgccttgagctagctaagccgagcggggagagagagggagatgggctcgatttgacccaaaagtttagaggcggtttttaatttattttatatttatataaccattgaattgatgtttgtattat

SEQ ID NO: 41231 - DNA, 1282 bp, Oryza sativa
aaaaagagatacgagtttgggaaagaaggggaaagaacacagccgaagcagggttcgtgcaacctcctcaaccatagtactaaatttacaattttgcattatctgtgcgaaacaatagcacgattttcttaaaaaaaagaaaagcgtaacatcatgcttacattctattacaccacctaccttggaataaaattccttttgcaaccatgccaggacaaaatttctgtgacaaaaacagcacaagccactcgcgaggccgtcggcaaagctccacgtatacatgcatgcggtggcttgatggcgaagtgatggagccaagtccagcatcatgtcgatccaacgtgtcaactccaaaaaaactttaaaaaaccggtccagcgggaacgcgcagcgcaaacgaacgaggctgccgcgtgggccccactcccgtggacccggtccgcgcgcccctccccctcggctgatgtaataaatcctttttaaattaaaatttaaatgaagaaattcgtaaatattcatttaaagagcatataaacttcaaatggccataacttggccatttgaactcggaattggaccgttcaagtctctaatttttccttaagaagtcaagaacccatttttgtgctttgttcctgcttgttatatggagtttattagagtaaaagctcttttcttttacgttggtcgtgtagacgctgcagcttctgaagatccgctcttcgtggaggttgaagccgacgtttgggaaagtgagcaaggcaagtcacatcatccttgaacatattggatcccattttataaaattattttgatttaaattattgcattatcgctttacttaaattcccgcgttatcattgttttatttagcgatgcctatttacctttgttatgaccttattattattgttattgatattattaccttgttcaccctagattaaacaaaaccccaactagtggacactctactcatggtaccactagtatgaatttaggtagatgcttcgctggttaattaggcaacattaggtggttttacaactctagactttgggaatattctcatcatctggacactatggaatggatggattattgtggaattggattcacacctccccctctattcaaaatcctcaaaatggttttaggctaggcttggggtgcatggttttgatagtagcacctcggccatataaggaccggtcttcgggcctctgttgcaaagcactaccgtacttccacatgtctagtgggtaaggcttagtttgtggct

SEQ ID NO: 41232 - DNA, 698 bp, Oryza sativa
actgcacgataatcgtaattttactacgtcagttttacgagatgaagatcgaataggtgggctataggtaaagtttgtaggtggctttgagtgaggtctgattgatgtacaagtgttttgaacaattttatacatttggtaaaaccatgttactgcatgtatatacccatgttactgcaaattacatattctattactgcatatggagtgttaaagttcaaaataccaatatttaaaaagcaatatctcacaagatatgtattatttttaaaaccgttttcacagggatgctatagtgttactgcatgtgaaggatatatgggttaatgtctcacatgctaaatatatttgttactacacaaaagtggaatgttactacaaaggcaggtacacgttaccatatgtttatgcagtaacactatcgaaaaaatgtagtaaaacacagttactgcaaaaacttataatttttactgcactcttaaagtaacgatgcgatgggattgtagtaacgtgcaactgacaatagtaacaagtaatgttatagcattactacttgtggagagtcaaattctagaaaagccaacatttgaagaacattatctctcacatgatgtactattttttaaaatcgtttgcaccatgatgctagaaaaaaacgcttatcaaaactagatccatcatgactatatttaacaata

SEQ ID NO: 41233 - DNA, 1052 bp, Oryza sativa
tgagccgagatgcctatgatattgtttttaagattttttgtgttgttttctattgatttatcctcgatgtgttcttgccatcaaattttcttaaacatcaacttgcttatgtgtgaatttttttcttactgcagtcattccccaaatcagtatgcaagtgtgtattcaagtttgtgaaatgcaaatcatctatattttttattctatgtaaatttcacagaacaatagatattttcaccaaactaatacaaaactacagatttaagatggtgtatcacaaagctacagatttagcattaaatttatcatggaactactgtttatgttaatcacaaacctacaacgtttatgactctgacataatagtagcactagagatttaaactccaagacctatagttttgttatatataactctattattacatatatagttttggcgcacccacttctagttgcatagtaaatttggcgttaaatatgtaattttagtaaacatcactttaaatctatatttttaaaatattttgatcaattaaagtagctggaatgattttgaaatttactctttaagcaaccagcacagttgtaattatctcaatcggttgttgaacgtgccctagttttaaaagcaacaaccggtttgtggacaggtcgtatttgtattaaggaaccgacaatggtacttatcacaatcggtcgttaaacgtgccctagttttaaaagcaacagcgggtttgtgaacaggtggtatttgtatggtgattaatttactacttgtgtaaaactttcggacagtcacctagctatggcccagtactactagaagccagtacaaaacgtttaatattcagcacatgggtagctaataaggctttgcatcattgcatgaaatggccgggagttacaattaatagtgaagataagatggtacactcgggccagaactactagcagcttattaagtaccacgcaattaatccatatggacgaatcatgtgtccttgtcccagtaaacaaacaatacacacataagagggctgcaggaatta

SEQ ID NO: 41234 - DNA, 1880 bp, Oryza sativa
gtttcataagctcaatcaaccttgtgtgcaagagattagaaattatttttactgaaatatatatgaaaatgcatgattttgcagaggaatcggatgtacttgacttctgtatgctaggatgtacttcgtccatgtgcagcaacatgaacacttgtaagctagaatcgaaaacatgaaaccaaattaccatttttcaacatatagaaaagaatcttcggtttgctgtagctaatgtatataatcagtttttcccttgaagttgctgacaacgaagaagggaacgttgttgtggaacgttgcaacgaagcatgctaccacttctgcaacaagaaagctgatattgtcactgtcgtttcctaaacaactgcatcatgcaagcataagggactccgcactttgaatccccatgcaaggctagctatatatgctgccctggagtagtcataaataagttggatatcatgatatccaaactagtgtgccgtcgatctctcatgtgtgtttacgacactttgtatttctaataagccatgacatataatcgcattctaccatcttctattaaggatgcatgcatgtgaggatatgttgagtgatgatatcttggctaaaaaataaatataatcgagtttctagtttcatcacatatcatttctaacatttggtcatcaagaaaccagaaatataagtatatttatgcgcctttcatcctatgccctcatgcaacaactaatgtgttaaatattttcttccaaacgggaggcattttaacatgaacaaaaagaacttcagtattggagtcatgattttagatttgggtggtcctacttagatattttttaaatgatgtaaatataacaaggtaatagaattacatgttgatcaaagatataccataatatattaataagagacacagggagaattcccccctccccgggcaagcaaccgactgcggagttaaaacgtaaatcgcgacacacagggattgttttccactctgagtgccaactatccattgaagagttgaattttaactcatgacacacaggtagagttcccacgtactcccggtgaatatataccgatttaggagttaaaacttaacttgcatgcagttggtgcgtgggttacgaggccttatagattgagttaacattgatgatatgttgtcgctggttcctatgcagttggtgcgtgggttacgaggccttactgattgagttaacacattttttttgcgtgggattcgtttgaagatgtacttcagttaaaatttatcgatataaaaaattaacgaaaatcaactgtgtgagagttaaaacttatctggaagaaattgtggcgcaaacgaaccccgcagacatcatgtctactcgagaccgtatagtgaaagttaaagtttaactaatgtaaacaatggtgatgcgttttgatgtctcagtgctatgggtagcttaaaattggggtggtggatggttgtgaagctgatgtcatatagttaaaaaataactttgattaaccgttcggtgatgtaaactgtccgtatgtgaaagttaaagtttaactgatggaaagaatggtgatgcgtttcggtgtctcagtgctatgggtagcttaaaattcggggaggtggatgattgtgaagttgatgtcatatagttaaataataactttgataaaccgatcagtggtgaacactctcggtatgtaaaagctaaagtttaactgatgaaaagaatggtgatgcatttcgatgtcgcagataacgagtaaatattcgttctttgttccggtcatacgtcatagctatgattatcttaaaatccgggggtggtgggcggatgtgaagttgatgtcttttagttaagacataaaat

SEQ ID NO: 41235 - DNA, 2424 bp, Oryza sativa
aatcaaaactcttgcatattaagtcggctgatgacaaacttcacctaaaaattatggcacttgacgagatctacaactttgtaattaaaagtttgttcatttgagattgtttaggagttcaaatattcatgtatttgatcatatatctatgttttaatttatttttcttatatttccaaacgacctcgaatggtgacatgttctatacgaaaatttgagccatctacgagatctactactttttttatttaaagttgatattttgagaaagtttaggggtccaaatattgattttctttctgggatctatttttgaatttggtttttagttttgcaaacaaccttggatggaggcaagttctatattaatattctagagcacaatgagaatacaactttgttgatgaaagtagttctatataagattatttagatacttaaatattcgttataagttctggcctataattttacaaggtgttatttacaaagtaccatcttgatttttttagaaaaatcatattaaatctgattgagctaaaccaaagtcctatgagattgttatagtaattcctgtaatatgtcaatttttatactttcacagaattcctatgagattcttttttcccggtggtcatttaataatatcaagttacataacatgccaactcgtatagagaataaataacataagtgaacaatcatattgaaataagtgttctaagtaaatatgaaccaaatcatattacagagaatattgtaaggataatggaggagttcggtccatctcaatcagaaattttgttattttcaaaaagtaagggaaaaatgtttttgcatgtggatttctcgaagaaaaccggccttacaaatttttccctgacggatttctttagcaaacaacccgcataaatatacaacccataaaaactgatttgtgtgggcggctttgtataagaaaaaactctgttaaaatgggagcgccacaaaaatatgaaaaaaaagtatagttatttcaaactaacttaggtcatgataaactttatatgaaaattatagctctcgacgaggtctataactttgttgttggcatcgtctagggggctaaatattcattacaaactcttagatatatttttgataaaactgatttttaaaactttcaactgagctccggtagagatatgctatataacaaagttgcagagctcaacactatctacaagtttgttgtttatgacttctccatttgatatcatttagagtgtaaaatattacaattcttataataggtgaagccaaaagaatagcatccaatttacaacaaaaacttcaaaataggtgagatagtaagaagattacagactgaatgaatcagagtacctaggttctaatcctataaattgcacgcacacataaaattgcatgacttgtgaccctggacgcccaactgtgtatagatgcataccgaaatacaaaacattttttcgagtttttttgcacctacaagaataaaaattagaaaattaattttcactagcgtgtccttaagggtgccacccatggaaaccctcaatttcttccggcacggagttgcatgcgagtcagaaaacacccatgtaaactggttattggccatccgcacaaacattttctttagtagtgcaacgaatacacaaatacttcaaggataatagtcatgtcataaatatcattaggcgacgccacagcaaagcatcggggtctactaaccccgacgatttttaacaagcatgttataccccctctattttaccgtcgctgaccctggtcaaaaaaaatattagaccccagtagaattaattagttgaagccacttgtggttagcagtaatgacacaacaaacaaattaatatctaagctaggtcagcccagcccacgtaatgagaaaacgcttgaatttgagcccacaaggctggcagcccactactccactagtctccacaaaatccctgttttgataacgtattctagtattcctccatggtaattatggagtctcgacttctcgtcttcaggtcttcttgagtcacatctaggcaagggcgggcgagacgccgggatggctagacgggcggcgaacgggcgaatcagcaaagaccgaagacatcaagaactaggattaggtgatcacgcgacggcaagcgtgagcagccgagctgccgtttgattaggtaagtaggtaaccctatcccaattttttttcttccggggactatcacaaattcttgttttctcatctctgaaacctaatcttaggaatttagggttctgaaatatgcacttttcaatttattcagacttctgttacatggccttatgcctgatggtcgtgaacgaggaggaggattgaattatatattcataattattttttcctcccag

SEQ ID NO: 41236 - DNA, 1926 bp, Oryza sativa
tgcaggtagcagagggcggcgcgatggaggactcgcctgaggtcggccgggggggctcggtggtggcggcgctgggctcggtggagggcgtcgccggtcggtggaggagacgccgggctcggtggcggcggcggcaggctcggcgaaggaggagtttgcggcggtggcgccgggctcggtggagggcgtcgccggtcagtgtagacgccggtcggggaggtcggcgtcgggcgggcagcgtcgggcgtcggtgaggagtaggcgacgacgatgaggaaggacgtcgccgggcttggtgggggcagctgttcgcgtcggggaagaggcaggcgacgacgacgaggaaggtcgacgccggtcgatatagaggctcggtggcggcagcggcgggctcggtcgaggcggcggcctcggcggcagcgacggcgggctcggtggcagcggtggctcgctcggtggcggtggcggcgagggaggacgacggcggcgaaggaggagttggcggcggcgctagggttctaaggaggcgggaaattgtagcgggacttagaaaaattttcgatccgatctgagaaaccctagttataggagagtaatgagtcatctcaatcgggctttgccatagggcccgtcacagatgactcatcggtgacgggctccatactaatgcccgattgagatgatattcaggcccgtcacagatgactcatctgtgacgggccctaagataatgcccgatagagatagattaatctctatcgggctttaactaaggcccgtcaccgatgactatttttccatttttccgaacaagtctttatatttgtgcgtacaaaatatatagctgttgtataataattcattttattagtcataatatattttaggatactaaatgatttcaaatcgaaatatggttaacaaccaagttgtagatcctttcaagatctacaacttttattttggtcatttgtctatataactttgttcccaacagcttgaaattgattttgataaaattttaaatctaaacagcatttgtaaatactaaatgatttcaaatggaaatatggtcaacaacaaagttggtcctctcatcaagatctacaacttttcttttggtcaattcttcatccgacaaagtgatagttatattattcacaaaaatcacatttctctcatctggtttgtaaacatcaacacatatatgtcaattatgtaaacattagtactatcactttatcggatgaagaagtgaccaaaataaaagttgtagatcttgataagttgtacaactttgttgtttatggcttttccatttgaaatcatttagtatttacaaatgctgtttagatttgtcatattgtcgaaatcaatttcaagctgctggaaacaaagttatatagacaaatgaccaaaataaaagttgtaaatcttgatgagaggatcaactttgttgctgaccatatttccatttgaaatcatttagtatttacaaatgctgtttagatttgaaattttatcaaaatcaatttcaagctattgggaacaaagttatatagacaagtgaccaaaataaaagctgtagatcttgataacctctacaactttgttgttgaccatatttcgatttgaaatcatttagtatccgaaaatgtattatgactaataaaataaattattatacagcagctatatattttgtacgcacaaatataaagacttgtttggaaaaatggaaaaatagtcatcggtgacgggccttgacttcagcagtggggcgactccactccacaggcattccttgacggcagcgacgaaaccaacttcaacgaggcaactccaactaggaagatcttcagctctagtgtgggggaaaagagagcaagactgtatactacccactgtactcagcaaatcatacca

SEQ ID NO: 41237 - DNA, 888 bp, Oryza sativa
aaaaaatttaataagacgaacagtcaaacatatgctaaaaagtcaacggtgtcaaacattttgaaacgaagggagtataatgcagagtgacaaaacagcaaaactcatgtctcgcatgagaaatgtaagacaattagaatccaagtagttgtaattggaggaaggtcatttcagtcattcagtaggaatgggaagcactgggatagataacctcttcggcagattgagagtactgtctccgaatttctgttacttcaatgatcctgacgcacagcaactatctcgaacacatgatgagctgaggcgcattggttgtcagtcagacatcaagtgatttattcttctgactacgcctacaaatcgcaagaaatgagattgcgaaagtacagcctgaattgttgcatgcaaattttgtttattatgaaatgagaaaacgaaacagccgccatgtgtaattcttgttacgacactaattgtgcgctaagaaaagagcgacgactagcagttagggtgcgtttgagccgtgtggctttatttgtttttttttaaaaaaaaaaaaaactgagctgcgttactatgttcttgagttcatggttacgccttgggaggtacttggctctatgaattcatggcactattcaaattgctctattcatgatcatgccagctgttcttttgtcctccattatttacaaaatggaatagtttgagctgttctaaacccattaagtagtactgtatcagggtctcatcgtttggcttttttcgtaataagccaaaacggcttattagagaacaaaaattaatttgtaggtaaaacttttatatatgtgttctcggtgacttaaaagccaaatactgaaaaagaaactacgttaaaaatatctc

SEQ ID NO: 41238 - DNA, 671 bp, Oryza sativa
ctgcaacaatacaatttccctgcagggtcctacatatatatattacactattcgtctccacgccgacaaaacaaaatatttcagatctccatagagatcgacaacgccgacaaaccctagctaacccgtctgcattaagcctgtgaatcaaggcggccatgggacagggaagctccggcccagtctcgtgggatgctgctctagccgtctcctacatcgccgacgtcgccgcaacctgcaagcacatggaggccggcgggtgcaagctgcacctcctgacagcgttgcgggactgcgtggacaagccgcgctgggacgacgacgacgacgacagcgagagtgtcgaaacatgaattcggcaataataaaagggggtagcgcacgagacctaaaagtggatggatgcagagacaaaggatttagacaggttcaggccctctcaatgagaggtaataccgtactcctgtttggagatttgaatccgccgagtatagtatagatctgacgatcaggttgtctcatgccccctagagggcctcctatccaccttatataggatggggggcaggattataagatagaaaccttaaccaatacgatatcggtttcctaaatctattttacaatattatcaaatcaggactttaggccgctccataatataaaaggaa

SEQ ID NO: 41239 - DNA, 729 bp, Oryza sativa
gcccaggagaaattgtagtcgctgttaaacatccattattatcatttgatatttatgaaatgactgttattctcgaagtatttatatatttcgttgcatgagtgtttgagttatctatatgcatgaatgtgtatgtggcatctttccacatcattcaaatgcctaactataaatatgtgcagactgttgatgtacctaaggacatcatgaaacttattcaagatattaatgtagaactccgtgctgaagatgaaagtcgggctccaaatgaaacaaattatgtgagagctcttcccttttcattccagatgcatgcatggcatatcactgatctaattaatgttcctgagtgttaagctgtcatgtcctgtctatcataatcataatagactcccttgtttcagcttaaacactgtattatttttgtgaatgattttttcctcgcttccaaaaaataatactacttgccaaaaaaatattgttctatgttattgtttaaacttgttcgaaacgacttgttaataagttttatctcaatgttgtatcatatatgttaggtaccaactctgtcatataaacgctttcaggagactgacagccatgactggcattcacggtctttacaaactccagtggttgccgaggaagagaaatctcaggacgatactcgtgaagcaaaagaaccctatgctttaggttggaagcaaaaggagtttaacaagcaagacc

SEQ ID NO: 41240 - DNA, 754 bp, Oryza sativa
attcctgcagccccgcctcactcactctctcgaccgccgccgtcctctccaccgccatctccaccgtcgccgcctcaacctctcctccgccctctccgccgccatctccgctgccctctctgccgccatctccgccgtcctctccaccgccatctccaccgtcgccgcctcaacctctcctccgccctctccgccgccatctccgctgccctctctgccgccatctccgccgtcctctccaccgccatcttcaccgtcgccgcctcaacctctcctcctccctctccgccgccatctccgctgccctctctgccgccatctccgccctctccgccgccgcctccaccgccgccctcgccgccgatcgtcctctccgccgtccgtccatcgacttccccgacctcctcgaccctgacctccccgacgccgggatccccgaccaccgccgaccgcctcgacctcttcgccactgcctctccgccgccgccaccaggatccaggacgactacggcctgcgccgccgtctccaagtacgccgcttctccaagtatgccgccaccctcccccattcctccttttttcgatggatgaattgcattgtttagatgaatgaaatgtgatttgttgtttcgattattggtgctgctgtatagatgaattaaatgtgatttgttgtctgtggatgttttggatgaatgtaggggctagattttatatacatgaatcttagcatcaatagaggatcttagcatga

SEQ ID NO: 41241 - DNA, 4067 bp, Oryza sativa
gtagacgacgactgacaggtgggccccacctgtcagcgacagcgagggcgcgcgcggctgcggcggactgggccggctgggccgaggagagagaagagagattttgggcggactttgggcccaaagccaaaagaggactttttaaaacctttttcaattaaaattatttcttaaatgcaattccatttattaaaaatactttcttagctcaaataaatcccagaaaaatctaggaattatagaattaagcaaagtatttaatgaaattttatctgggcccattttatattggaatttattaattaaaattagattttcttttcaagactttttaaaattatttctaaaaattccatttaaacaacaatttataaattttgaattttcaggtgtgacaccgggcaaatattgtgaacgctgatctgaacgcagccttagatgcatttttagcctaaacaaagcaaatgataatttgctttccacaaacataaatacacattggcatatgtgaaataaaagtgtgttttgattattatttcatgatgaacaattggcacgagagataattggttatgatatttagaaatatatggtgatgaagtggttttggggctgggcagactgggcaaatattgtgaacagatatctgacgatgaacaagtttttctgctggagtggaccggtcagacaggacccttgctaagcgagcgtagctcaactggttaggtttcttttagtggaaccaatccacccgagttcaaatcctagatttgatacgagtggttgcatttatgctaattattctttgtttctcaaaagaaaaaaaaattacaaaggcaccctgtaaacaaacctcaaaataatagtatgactaacctcaatattccgagtaaacaagagtaaagcaagtacattgcatctcaactattagttgatggagacgttggtcagttcaacatcatcttctctattaccacatgtatatatcaaacactaatttcttggtgcacaaaaaagtacactattttgctccgacataatgaaaataatttcctgttgcagtgtgggtgaactgcaatgggacatcaattgtgcagacatatatacacaatgcatgaaaatgtaaaataagtttcggttactgttgtaatgttactttaatcagaacatgtcatccaactttcaaaagaaaacatgatttctaaatgatttggatttttcccatccccaaggcttagtccgaaatagctgctcagaaaatccataactcatgtttatagatcacattagagactacctatatatgtatttttatatatgtatttgttgacaaattttcactactatgaaaaccgtttttgtaaacgggcaaaacgtatttccacagacgatggcatggaagaaaaggtctgcaaaaaacacaattttcgcatgtggacacttgagccggccgcatgcgaaaaggataaatcacgaaaaaaataaaaattccaaaaattgaaaaatatacccaccgccggtccgccgtcgtcctcctgtcctcatcctccagctatcgctgtcgttctcaagccgccgctgacgccggtggatctgggcagggagggcggcggccggcggatccaggcgggggagggtcgccgccggtagatcggggcgggggagggcagccgccggcagatctgggctggggagggccaccgccgtggccttcgcccagcgccgctgccggaatctgcgtcgcagggtggcatcgctaactcctggccgcccgcactgcagcggagcccactcccagcacttcctcatcggccgcgctgcccgccgctcctggccgtgaatgcagcggcggcgcccgctcccggtgccttcttgtcggcctcgccacccgtgatagaagtgagagaggagaggaagagaaaggccttcgttagttgctagacaaaaacttttcaccacgtcacgtcgaatatttggacacatgcatggagtattacatatagacaaaaaaaactaattacacagattacgtgtaaattgcgagacgaatcttttaagcctaattgcgcaatgatttgacattgcggtgctacagtaaacatttgctaatgatcgattaattaggcttcataaatttgtctcgcagtttacgagcagaatgtgtaatttgttttgttattagacaacgtttaatacttcaaacgtgtgtccatatatccgatgtgatacgcaaaaacttttcacccctgaacgaaacagggccaaagagagggagagaagagaatgaaagagagatagaggtgaaggaagagagggtggaaaatatcagaggggagagagaggagaggatgaaaggtgaaaaattttgaagcggtgaggaggaaaatttttttgctagcggacccttaaaagatctgcatgcaaaaataaattttcgtatgcggacctttaagaggcccgcacgcgataataggctcatttttatttgcagccccttaagaggctcgtctaagaaaatagatttttgcatgcgggtctattaagtagccgtatgtgaaaatggaggtcatttttgcagacgccgccaagggtcctcgtacagaaagtttgttgttgtagttgtgaatttctttcaaaaatttgacagatataaattatagtataattgtggtgtaattttattttaacttacatgcaattatatttgcacatgtaactacaatatatcatgtgcaaccggtaaatattttactcatggatatacccaatatataaatacacatgtactacaggtaaatgcagcatattaattaattgaacacggtgtgtgttataatattcatatagaccggcaactaatacttttattttacatcatgaagtgatgaaacacgcggatgggatttagaagtagatgggggtttcagaagtggggtaggatagacagattttagtattgtctataacaaacacacatagatttagtgatcaatggatatgatagtataacatatccagctaataattggctagatatttttattaacttggaagcatctagtaaatatcatgttagtataggtacatatatgtaaacatatcagtagcattagagcccactcgagcacaacagtagcgatccatgagaacatcaggattgggtatttgcaagctaatgcaggtttctgaccaacgtacaacttcttgtcatcaacaaactttataactggacgcggccgaatccttgaaatgtgccacgcactactagaaaaaatatttttcatggcggtactctatttgttttactggcggttatataagaaatctgcttgtgaaattgtaactaagagatggagagtttaggaccgccagtgaaaatgaattgtcgctagcgtttgcttaaagtccgcttgaaaaaatacctatgtttttacaagcgatctcttaaaagacagccagtcaaaatactgattttcgctggcggttactaggcagcatcgtccttaaaaaaaatccccgcacattaaaaaaaatcaccgtgcgcgtttcccttaaaaaaaattgccgcccacctccttatccatccactcgcttctcctcctcctcctttttttctggttcctctccatccaaatccatccactactctcctctcctcctcccaccccaccggcagcggcggctcacgtaggcagcggcggcggccccgacggcagcactcggcggcacggggcggcgggggagggggtggctcggctgcggcacggggtggcggtgctcggctgcagcggtgcaggggagggggtggctcagcagcggcgcggtgacaggcggccggcaaactgcgatggcccacgcctcctctccctccccccccccccccggtctcccaccggccttccttcgctgctggccgccacgacaacgggggaggctggatccaccgccgtgacgatgggggtggccagatccaccaccgcggcgacggggagaccggatcagccgccgcagtgaccgtggacgccgaatcagccgccgcgacaatgggggaggccggcggggagggc

SEQ ID NO: 41242 - DNA, 2100 bp, Oryza sativa
ataacttatgcttcactattatttaatgatggcttaatgatagctcatgatggttaatcatgattggttaagtaattaatttgccaactaaaacctgataatggtgggttgtgagcatatggttttgatggttgtgctcatgacaattaaggaccggttcacgattttcggttgtgaaacatttaccgtgccatccacaaaccagcgtgggcaacggctttactttctgtatagtatggttcatagtagagcaccagactgtgaagtggcggagataagcccaccggggtcgctggggagtccataccttgtttataagggggtgattatgatccgggaacggtgcactgctttgaattgtgttatgcaggaggtattgtcacaatctctattcgggtacttgttaagtatcgcgacgcatggttgacatgatgttgaggttgtgtcttgtgggtacagtggtacacctctggctagagtttaaactattcgaatagccgtacccgcggttatgggcgggtctaacaatgtctttcgtgattagtttcacacctctcaccgtaataaataatgttgtaattggtaataacttgtttagctcctggtttggaatggtatattcctggtttggagatagaactgtgcagccgggattggttgttcagaatggttgggcctatgcaacacgggtgtgttgtatagtgttgatttaatattgtttaattactcaactgttttactattttctcaattgcttattaaatgctgtttatgcaaatgagactatactatgccatcctttgttatcctgtgcacttgcatatttgctgcgtggcttgctgagtatgtcatatactcaccttgcaatcattcatcagaggaggagttctacagtgatgctaatggtgtggatgattaggtgtagccctggtcaagctacctgtgaagaggagtcgcctgcgctgtttcttttattttccgctgctcagaactttattgattgagaggaactatctacctctgtaatgacattttattcgcttattaattagagtaataattgtactctattatcaatttgttattgtgtgcctcggctgattcctggacgagggtttacatacatgtaagcgtttagaattttggatagaaattccgggcgtgacaactcactggcagcacctctggccagctggccgccagcgaaaactattttttgtagtagtcacaacagttcagattggttcactagctcaggatagctcatctgtaataggcgggaagccttatctgtgtcggcgaggggtactgtcacgaaccaaaggttattaatgtgaaaagtcatatgtgtcgggtcagccaccatcacggacgaccgtcatccttatcgggcctaaataaaagacccaaactcatctatgacgggtcatagttaagacccgtcacggataagagttatccgtgatgtttcaagctcctacttccaagaactgacttttttgtccccaagagtgatgtctggcttgccgccgatctcgaccgggtcgctgccattgacttgtctacggctatgttccgagctttgagtgacaacatcaggtgttggcgtcagaacccgacatcgtcaatagcctcgtgcgtcgtcttaccggtggtaagccctttttctcatttatactttgtttggcccaaattcttactcgcaaaatgacgctttattgcctgctgccggtttactggatatgatgcaatgctcactaacattctaccttcctgcacagttattatatcttgacaacatactcccaccaacagacgttggtctcgatctagtgttcacccctcgtatacacgtgtatactaaggagattgtcgatcggctggttagtgcggatcaggaagctggaggggatggcacgcccccgttttgcaacctccctgtaagtgtttcacattccttcttccccattttcctttccattaataaaaattcatgtgctcacatacactggggccggcgtacgcgggtatttttaatgatcactaaatttgtacactaaaacccaatcataaagttatcatgagggctcctgaacaatg

SEQ ID NO: 41243 - DNA, 1905 bp, Oryza sativa
ccacgcgatgtaaggagaattagttacccattatatcgttatacatacatcagcaaagtgatatccttgtagtacatttcattacttcgcagcctcgcaatttctttccgtcacgccgtcaccgtcatttgttctaccgccggacacggacatgatcgacacacaagtgaacgagaaaatcaaggagatttgcaggctcgagggggctcctacattctccgtggttgtattctcaaacatcccattcgtcgagttcacttgtgcttcattgcatcaaatcatattctcgtagtttgggtttcctctggacacatttttttttgtcatcaacttgagcatgagcacttagggattgtctgcttggtcaaacagtacgcaccaaaagtttaattctgaggcaatatgtgaggtgttttctccagttgcaaactgcagtaagatagtcatttattaacttcactgatcaaggaaccactaagctagtggttcaaataaacaacctcactggaaatggatgagaaatcaagaaaatatcattatgagtaaaatttgaactaaactctttagttcattatttttgttaggatcatcacaaacttttatctgctatagcacaatctaccaaaaattaaaggaaaaaattaactaataccaggaaaactctgtactatacttatcacaatgacacagctggtagttatcttttaactgcaaaccttttcttacccaagtttacaactatctgtccttttgctacatatcaaaggagcagtcaactcttatattgtgctgtgctttgatggttcatacagcgatacacaggtagatggcagttaaaattatactttgtccgatcgtcctctactttcggttaacattttttccccttacacaattattgtgtttttttggcagcttttgcccgagaccatgcctgacaccaacgacgtaaattcaacgccatggtctctgccaaagcggttcatacaagagccggcaatatttgtttcgccggtggttgttggccccggtatgccgtcatcggacgtgtcgcttagcatccagctcaggcacttcttactgaccaatggtggtcgtatggacaggttggtgttcatcatcaccttgatgatgtgcatatggtgcatcatattttttcgcggaccaccttttttttccttgcttagattacgggtttacatgttaatatttctggtatgcttgcagcgtgaaactgctagagatcgacagctctgttgcgtatggaaacaatgtgctggaatcgttctccgacgggagcctgacagaggagcttttcatagacgtgttcagctcgattctattcaaggatgacatgaagtacaggctagataattatggaaaaaggattttcattccgacttccatatcagtaacgtgaataacgccaatttctactgtattcctttttttcgtacggtgcagcaacatgattgtttttctgttcttttttttcgcgagatgtgactcttttggttcacaccaacacatggccacacttttttttttttgcagtttctcctgaacattgattttatcaaacaaaatggaaagatacaaattttccactgatgctttggccggaaacttgcgcgactacatccagcattggttagttattaatttttgcataaagactaatgccatgtctacttttttcccctgcatcgagcatcttttaaacccagcaatgctattgtaagtttcgtttctttacttccaaacactgaatggacagataatggttcctgtgctccaccactatcactggtctctagatgcaatcaacattgcacacaggctggttgacataatggatacaaacaactacactttgctcggaacactggtaagcgaccaccatgg

SEQ ID NO: 41244 - DNA, 801 bp, Oryza sativa
agttactttttaactgaacatgtataccccagtatgtatgaggaaaaagaatccgtgtttccactgtgagtaaagttaaaaaaataactcctttttcatcccgcctaatgttttcaaacacttcaaaggttattacgtgaagagtcaagcaattgcccaacaaacggacgtagcttgcttcactggaagaacagaatattagttaaaaaaattactctcaaaagcacaaatcaatcttgcaggcacgaacccgatgatgagtaaaaaaaaactagtttcgcgtatagggggcaacctgtacataatccatccaagtttacgaagcattaagttaaagaattactcgccattcccatcctgaccatcgatctgctgagattaaataaaaggattcaagaaaatctatgtatacttactcgtacgtgtgcccgtaataatagttaaaaataactattagtagcaaacacactaaaattctccgtggtgtatccaaaagctttaactatcggctagaagtaaaactttaactattattgccacaggtaatatcagttaaaatttaactggcattcaaatctacaccacgactgtaacatacccaagcctataaacctgagaactaaatttaatttaaatgcatcatgtggttgtggagtgattttaattgtttttggatcttaatagtaatatgtccgtactaacgttacggtgtcataacattttttcttaataagttattaaaattcgactgcaatgaaaataattttcctagaatctgtccatttaagctttcagtccaag

SEQ ID NO: 41245 - DNA, 3150 bp, Oryza sativa
agccaaaagttctatcaaggccatctgaagtataaatagccagctacatcctttgattatagttgagtcatcatgtgtacagaaaaaaagaaatgcagtattacctcatattatctttctactgctacaactttattaattttaatatgtttgcttcgtcgtagcatccgccactttggcacaaccttcatttaacattgtcaagttgtcaacctacatgctacagcacagcctcaaccctgcttccatgcatagacaagctctcttccaatgccatttttggcctcaaccatgcttccatgcttagataagctctcttctaagaaatatgtccttttaatataaagacctaatgagtttcagtgttattacatatctcttctatataggaaatatgttgttaatcaaaacaatgcaaccctgatcggcaagaggcaaagataaatataccatccagtatctcttctgtacaggaaatatgttaactaaaataatgcaaccctaatcagcaagagacaaagataaacatgctatcactgaatgtgagatacatatttatccagaacaagtgatgtcaagaaacatagctttagaaaattatctgtataatatttgtatgtttatcttccctaacattaattttctaatcgttggattcagaccatgtcccaatccactttacttcccacacattccaggccctaatcttatatatacatctcattacactatgtattgattgtatcagtacattctatgtcattgcaaaggcaagtttctctacagactaataaaatatgtgctatttgtttcttctgtagaatgatttggtctgacagaatgagaagtaaacaaaaatctgaaaagcaacatatactataaggaactgaacttcattcaactaccactacagagtgagactgattttacttggcactattatggagtaccaatcaagtggaagccgcagccttcctgaccttaccttaatatatgtggtatttgatttaacaaattaatccaccgaaaaaagtcaccgctataaagtttcagtgtctgtgatcaagacgatcagatcaatacacggtggctgccaagagtaccttcgaggggcgcaacaacccacaccgaatcagctacaagggttttttatagtatagatagaagcaacttccatccatccaatacttaacttattttatccaagtttgcatggcctagtgaagttataagtttggaatggagtatacatgtgttcctacttgccctgctgccgcacctccatggcaaacaacaaacagtactatctgatgctgtctacaaaaatcttagaaattaaatgggctgcatataactcttcttcccctgcaagaagcatttgagtgaagccattaaggaatataacaaaaaaaaattctgagaaccattgtacaaaagctcaatgaaatgaaattaaggagtacctgccggtgtactggatgtgaagaacagatatatatatcatgcaatggcatgcttaaataagtgtcctgacaatggcatctcgtatcatgccatattgaaactaattttaagcaaagccattatgccattcacttccacttcaagtacatgtatcgcagattatacactaatatcttatgagtcccacttccacttctggtttgcataaatgaacccatattcacaaactacccaaaagtaaagttggaataccttcgcctgaataccaatgtttctacttttcagcaatttggctactgaaacagaaacaaattatcaacaattccttctcagatatagttgtaaagatatttatgcatcatggttcaattgcaccttatgagtattgacatgaaaatggataagaaatatcttgcagagatgcttctactctgagtagcagcagacgtttacctgcatgataagcttccgcatccaaccagtagatgaagaaacacaaccaaattccactgcagaaatcttgcgtttgtagcaaaattccacacacggccttctacatattacttttggtgctcctcatatgcagcaggtgctttatatttcccttaaccagttgtcctggtaaaaagcaaaattaagacgccacaacatctagtcatatgtagataaatatatcattttagccaactaaaggtttggataaaatatcaagcttagcctacttaatcatggaagaagatttcagattcaggaaacagtgtttcttttacagtgagcaattgtgaatttagagagaacatgtaagcagagtctacttgccaagagcacctatcttatcataacagaagcgattatttcagaacatacaaccgtttacacgctagaacacctatcttatcatagtagaaatgttttgtgggcaaacagttctgttcttcagaataatgggatattgtgttgaatttcccttgaaacagttttgatgtgtgaaacagcagtacgctggaacactgagagcctaatgcggtactacttgcattcagacaagcagccctgcaacaagaatcttgtgtagcatgtagtaagaaagcacccttaaaccaatgcagcttgcagcgttaacctaataaagttgtgcaaatgaatgtcaaactaaaagattacaaagatagagaagcccttatataggcacaccgcacacatctacacttgaaatatattctgtaattaaatctaaattgatacgaaagacagagttgctcttgctaaaagattacatttcattaaccttaatgtcttgtttaaatctggtgatgcagatttatagtgttcacatgaactgtacaataaagcttataaactcaattagatgaatatcaaaaggaaacaaattatatgtacaaggaaatgtggataaagagattaggtaacctgccgcatcagctatccctggacatgacgcccatcgagcaggggaaactggcttgcacatcccagacatggccgagcgccgtgagcccgtgacagcgtcgtcgtcaacatccaagcgtcacagatctagaaaacagtgaagtcgttggggaaagaggcagcggtggggaaaggggggcgtgctacgcagctccgcataggttgtcccggtggtcatcagcagaggggtgcatcagtgcatcacgtacttcgcgg

SEQ ID NO: 41246 - DNA, 701 bp, Oryza sativa
ggcaatcatacgccgttcgatgaataccctcaaataaccgaagcggtgtgggaggaattctgctctttcaagaccacccaagagtttagggaatcaagcgaggcacatcgtgtactgcaacagcggaatgagcacccgcatcggctgggcaccgcagggtacatcggcaaggaggcaatatgggcccaagaagatgcagccgctgcagcagcgaatgtccctgccccgttttcagacatccctgaacaaagagctcgcaactgggcgcgggcaaggggtaaggtcaacccggacggctctgtcacatttgagaacaaaagtgatgccgtcgtctatcaggaactggtgagttcgctacttaacctaactaatttccgttcgtataaagtacaagttcgtataaacgactatcttcttttctagttgggcttggttgctgaacaagcttcacaaagcgaggttgagtccgcgccgaagaggcgcgaagatgacatcctcacaaaggcgctcggaaccaaagaacatcctggccgaactcggggaattggtagcgatgtgccctggaagcatggactccctcagtacagctcccaatacaggaaacggaaagtctccaaggaagagaaggacgctcgtttgaaggccgaacttaaggttgaggccattcaagaactagaagctagcatgaatgcaagggtgga

SEQ ID NO: 41247 - DNA, 2082 bp, Oryza sativa
caatgcattttgttttctataattctttgaaaattaaggacctttattaggtgtagggtttgaaatctagttacaagggaagaattgatagattgggcgcagatttaatgtagttcggaggttatcaaaccatcacagaatacaaaatgcatggggaattttggtggataggccagtgtagtccatgcacggaaccgacctagacaccaaaattctccatgcattttgttttctgtcataatttgatgattaaggaaatttgcagattatctaaacttgttgatttatataccctttttgtctatgagtaggtcaattgtatgaattgttgtttatatacatgatttatatacccttgctgctgctgccacaatgattgtgggctgttttattatctagacttgcttgaattgaatggatgaattgctgtttacatgaagttagtagtactgtctccttttttatctatacccctgctactgctgttattgtgggctacttgttaatacacctgttccttgttttatgttgttgctgcccctctccaagtatctttgcccctgcttctgctgcccaatgtgttccttgttaaatggccagtgatgaattgctcaataagaacagattatctacacttgttcatttttttatctattcttctttttgcccctattgtggctcaataagtgatgaattgctcaataagtgaatcttgaatgtggatttaagtgcaactgctgctgtctatgtttgcccttgctgtctatgtttgcccatgctgctgcctatggttgcaactgttagttaagaacagattttctgcacttgctcttttcttctggattgataagaggagtatatctagacatgttgttttagttaatttgcccctgctgttgctacccctgtggcatatatactcctcctgctgctgttttatgtcaatcatgcaaattctgtacccttgctgctgctgttttttaaatttgcatgattgattcagtggttatatatctctacacttgttctttttttatgcataagaacagattttgtgcacttgctctttttttatgcataagaacagattttctgcacttgttcatttttttatctacaataatatatgcatgatttatataccactgctgttgttgcccctgtacttcttgttaaatggccaaggatgaattgcttaataaaattctatctatacctgttcttttctttatggataagaacagattatctacacttgttgatttatatacccttgctgtctatgtgaatttccctctgctgttgctgtttatgtgaatttccaccctgctgttgctgtttatgtgaatctccccctgctgttgctgcccctgtggcatatatacccctactgctgttatatggccctgctactgctcttattgctgctattatatggccatgctattgctactgctctaatttcctgcacttgctattttctttatggataagaacagatgaactacacttgttctattttatggataagaacagatgaactacacttgttctattttctttgggttgctttttcctcctagtagctgatttcctctttttatcccttcatgcaaatgattgtaattgatgcatatttctcagcaaaactgaggccatatctttcatagtgtaccccgtattacattggatctaatgctatttagtctaatggtaggaaatttataatctttttcgcgaaagttaaaccatgtcaacgcccggcgcaaacccgccctccccaacacctgcgaggatccaggaagaagcaaacccagccacagaggcagttgccgaaggtcatcccacgacaacggtggtccaacaacccgaaattcatggtaatttataggataaattttcaccacatgaccacataaattttagctagcaccccttagcaaatattgccttctgtttgtgctgcagaattgccgcaggaacaacatacgtcgatgtcgggcgggacaagtgcaagtaggtctagtagaaatccgcggtcacaaaatatatggccgaccacagtgcaagttataagagagg

SEQ ID NO: 41248 - DNA, 666 bp, Oryza sativa
agaattgtgggtattcccagctttatttctgtagatgtttctttggacattatacagtaccaggaagggtatgtgcactttcatgttcttttctcagaagttatggaacaataggtttgtagacatgtaacattcatacttgtttgtttagatcacgaagaaggaactggatacagctgtaggcatacttttgccaggtcatatcccaagggctcaaaaaagactgatggtcaactatgagaagacccaagtagatgctgcagtattgtcaccatcaggaaatactgcaaggttcagtgtgcatcatatttttggcattggttctgttggaaatgacctggctctcccacaaataaaaaaggctcttcctccctcgcaaagaaaaaggaaacaaacttgtgacaagtaaggtaatgtgtttttcatggtaatcaaatagcactaaatactagtaatttactttatcatgatttaagtttctgcatgaatgtcgttgtctttagatactagtttattttgtattataaaaacagggaatgatataatttttatttttttttgtaaaatttggagggaaccttttaggaatctaacatttgtattggtatatatattgaactgaagttatgattgttgccaagttacgtttgcttttaaacttcactt

SEQ ID NO: 41249 - DNA, 1533 bp, Oryza sativa
  unsure (1)..(1533): unsure at all n locations
actcgggacggacgggacggcgggattcccgncgccggcggcgctagggcacgggcgagccggcgggagtggcggaaggtaggggatgacgggtgggccccacccgtcagcgagggtggcgggcgggcccgcccgtcagcggcgcgcgcgcggggagaggccggatgggccgcggggaagaggagagagagggaaagggatgggccgagccggcccaagagggagagggggagggaaagggaactttttagggtttttctttttataaaatcattttaactttgtttatttcttaataattattatttgtgctctgaaaattccactaaaatttgagggctcctttttgaccaaggagaatttaacaaaaattctccgggccatatttgaatttttcttgtacgtattttaatgtttgccaatttcttttcgaattttaattaattctattatttcttttagaaaatgatttttatttcgggatgaatttatcaggacgtgacaaatccaccccccttacaagaatctcgtccccgagattcgaggaggctagcaagaagataggttgggcggtcttcttttatgatctgacttcttccgttgcatcttcttgaacgtacttgcccagcaaaacttccccactctgaactgcttggcttgatctcctgttgcagatggaatcttcttttcacctgacttgaaccagggtgcaccttttagctgacgcagactaggttgtggtagtttaatgatgcttccgttccagaacttctcacgattcatatcttcggcgtcaacctcacacaagttatcaacttcatgtcatgtgtcgtaacctgcttgtcattactaggataccatgcttgtcatcatgagaataccatgcttggcgtttccttccagcttaccaccatatgctttagactatgatatcccgcttactaaggataccatgattgacaacttgccattaactgtctcatattagctttcctggtctccggtgctaggtacttctgctattcgatgcaagggtcaaccactctaactataagttatgcttcccaagagaaccaatttatcccacttgacatgctttgacgtcttcccgaatgactttgctgctggacttgttattgtctgatcgtgatcctgccagatctgaagcttcgttgttagatgtgattttgatctgacctctatagattatcttcaaacatatcacttgttccataactgggaatggctctcacgaacaagcagctcggattcactttctttacatttagtttacttcccactattctctttatgttgttatcatttagccttcaaagtattcctttacacattcaaccctgatgtgttcttttcagatttctcttatcaatcacctttcgacctacttctttgcccggtaataaacacctttgctggtatcttctatcaatcaccttttgaactttgtcaaccaagtactcttcactccgagagttgtggatgcttctggtgacaatgtggtacttgagcctg

SEQ ID NO: 41250 - DNA, 766 bp, Oryza sativa
atatatgtaagtgcaagagatgagctaaagcaagcaggcagattggcggtggtattacagtagcaaacatatatttactctggtgaaatgagaagtttggggtactggtgtgttctacacccatccccattccataggatcttctgtggctgcatacatgtatatgtatatgttcctgtcgtatgtaatattctccttttttttcaaaagaaaaatggcattcttcgaacatgtgcagatgtgggtcaattgatttcatgaggtcatgtaaactacttttggatcacatagtttatttatttaccatcctttgcaatatttgggcactacactagtacccttaaaataatacttcaatttttactctttcgaagcaaactagcaaggaaaaagggcaattacagtttacttgattgaatcagttcaactgggttttctggaaaagaatggctaaggtaagcttgagataggcacagaaaaatctttgtatagatataaatctgatggaatatggtgtagccttgtggtattaatcatcctgatttttagtaaacactaggtgactaaaaatgcacataccctttcaagcttacctctaagttccgaacaacaggtatgagtggaaagtggaatatcaaaggcacggctaagtgttattcataaggcgaaaacatcattgcaatgactatcaagcttaagttgaatcacaggtgatgttgccagtcctatagttgcatcaagcacccatacatatgtgaaacagcga

SEQ ID NO: 41251 - DNA, 3044 bp, Oryza sativa
attccataaccctggactaattcgcgagacaaatttattgagcctaattaatcaatgattagcctatgtgatgctacaataaatatgtgctaattatggattaattaggtttaaaaaatttgtcttgcggattagctcttatttatgcaattagttttattattagtatacgtttaatacttctaattagtgtcaaacatccaatgtgacagtgactaaaatttagtctctgaatccaaacaccaccttagtgctgaagcacccaatatcaacaacagtgacatgacaccacggtgcctaacctgatcgcgccagtgacgggcgctaaggttggagacttagctacgcgccaatggctcgtgaaacacaactcctatgttgggtggcaccgaggtgcccaacctcaacaccattatgcttgcgcctaggttgtcaacctcaacgccaaccatttttacattgaggttctagatctagcttggttccagaaagctctccacttaagtatccgagcacataccgtaaacaacaaataccctctccacatctcacaagtcacaaacatcaacaaatgctaaaatataagccatctcatcataaacgtatcaaacacaatctcaagtcaaatgcgatgaaccttataccaactcaatccctatgaaatcagggttttagaaggagtttgcgttgtaaatcgatcttcaactcaatcctcgcgaaggtgtatggcgctgaggtcctatcacgacggcgagtcgggtgtcacatgggctaggggtcacgactaaccttttttgtgctgatccatacgaccttggtaccgaggtggttgatgtaaggaaaattttttaagtggtctaattttgaaacaagttttttaaaaggaccagtttatcaaaatttcggtggtttgtcctggagcgctcacacgcagagggggaggatgagagatgcgtgtgtccggtgggcgcggccgatgcgggcgtgtcaggtcaggtgggcccgatgggaagcgacacgctcgaagcggtgtttcttccgttggtgtgcaagcgcgtctcatcagacacgcacgcagagcgcgcgtgggttgggggaccggggttaccggtgtggtaaccttaccaaccacgctgccaccgtacgtacggactactacgcaggcaatgcatgcaaggtgtacttgatcaccaatcagaaattcgatcagatattcccaggttaaccccacacctacccacctacccacctacccctaccacacatcagtgatcagtcaagaaaaaacactccagtacagtgcatggttaaccatttaacccaacccgggtttggtttggccacacagccgcgcgcgaaagagctagagatacgattagaaaagaaaaaagaagtagtagtagaagaagaaaaacaaaaaggaaaaaagcgatgtatgcagcgttgtttaggttgctctaccttttgctttttacttttgggggcgctgatcgcgatggagatgcagtgcatgcatgaccggccgcttggacgcatttgcatgtatgcaacgcagtatcgtacgtctcgatcgctagagctaaagctgcctttaattaatttcgccggaattaatggcagctgcaacggccggtctgtcatatgcgatctgtgcagagagaccaagagctagcgatccaaacttcgaacgcatgcaacgtctagttagcacgcccatacatgcatgagttcgctatggtttctcaattttagttagtaactaattactcccagtaatctctactagatggctagcgagaaagatgtaataacgtgtgcatgcatgcggtgcatgtgtggagggttaattaattaattggccggtgccggtgatgaactgatgatgagaccgatattctttaattagtttgataagtacacatgaacataatgtgtgtgtgtgtatccatgcatgcatgcatggccgatcgcttttatgttactacaatattgtacacttgtacaaggcatatattaaggcgcgtgtcaaagaaattttcatcgttcccctcccctagtagtagtagtagaagaagaataagatattttcatcgtatgtgacacgtacggtacgtgcagctgtgcatatgctgccatgcatacatgggttcatgtagaagagactacacctagcaattaatcgtgccagaccgtatctttattctttccgattcatcttggaatggagtgccttcgtcgtttcagccagtttaaatttttgcccacactgctccacacactttgtcctgcccctgcctaaaggatgcattggcatatatcagtatatatatcacacaaaagaaaatgccaattatcaaacatatattgcgagatctattagataatatccgtggatagataattagcagcagctagctagccagctttgtggttagtacacatataatttgtttgacagaacaaaactaagtaattaattttgataaattaaatatggtaaccactgtacgtcttctgtattttattagtcaattatatgaatttacactgtgatattttatttttacagtgacaaattgtatatggggtgctgtttttataacagatggggcccatgacatgagaaagatgctagtacgttttttatgctttaggtaacatgctttaaataacagctagtgtttgattcaggggttgaaaaaacaattaatcgaaaaccactcgattaatcggccagattaactacccctattaaacttaattaatcgcatgatccatttcaaaacctggtaacaagttttgaacaccttaatcatcattcataatcatcactcttccctacataaaaagaatacagtcaccgcgagtggtaagattacctcggtccccatctgcccctctcgatcacctgtctagggtttctagaatctagttaacctcaagaaaagcaagcactacgactcccccttcctttcttccagcctcgcctcgcgctcacctcatcacctctgggttttttcttccttggcctgggctgcaggaat

SEQ ID NO: 41252 - DNA, 1083 bp, Oryza sativa
ttgcatcgcttgttcctacttcttcgtgtgtgtgtttttttgttcatctttttttgactcgttcattgtttctggagattaccgctttgggtaaactgaagccttaaatgggagtgagcatctttagtagtacagtatactagtattgctgtttgttcgagcttttattttcctggttgacttgtttattgactactagtattggatagctagctatcctttttctgcaggcaacttttagattgattcttgcttgtttatagaagtggggcagcgggtagcccacctctgttttttttttgtttgtgtgtgaggctagattgccgtcttttattagaggcctaatggcccgaatcgatgtgttctaatgttttggcaaaatttacgaatttttttcgtttctcgggagaagtcgtactcacagcaacaaatttgttgcaaaatattactggtatagtcgataagacttgtgactatatggcttgatcaaggtattttggtccgttacgtacgtcgtttagtttcttcgggatgtttcttttttttttaaagaaaaaaaccttccatcgtgtttcgtttgctgtgcttcttttaagcttgttttatctgcatttagcctggccaactcgatctccatggtgtctgttaatttagacgaattggataaactgcttgcttgccgtacaatcttgatttggagatcttcctggccaacataattgactttgtttttaaataatggtggttttaaatttgtttaaagtttgatcttcaaccagaaaataacggtttaaataaatttatttttgtacttgtttaatacgggctctctgtttctgggctttaaagatgatgggtactgatttctgagctgtataggtagcctagcggccttttaatcttcattttttttttcctatttgaccgcagttcttatcggctttgacgggccttccatcatcgtctgctctcctcaatcctcccccactccttgggtaaatcgttagcctagccgccacccgtactgagcgctccgccatggcgctcgtctgaacttcccctttagcgcccgccatggcctgc

SEQ ID NO: 41253 - DNA, 2895 bp, Oryza sativa
ctttagcggggtcaataataacccaatcatcaagccgggcggtgccaactcaacatagaacattaattgggtgacaccatgccaaagagaaaccatggtggtcaggcctaggcctagagcatgaaggagattagtagtgcaggaccgcatacagaagtctccatggacatctcgattgatcacgattaggtaggctagctgctagtcatcactgaaaactattggaagtcccattctttttagcaacaaaatatatatatcatctcaacttgtctcttgcatcaaatccattggctcgcacagtactatggcgctatggcaattggcaacactagatccatggggttgccttttggtttggcaaccaatgcttgggcctcagagtgtcttgcttggacggtttggagacttttgaggcgctctagggcaggacgattcaaggtgcagagattggtgatataaggacggagatgaatgatacgagaaaggagatgaatgatgtgaaattgtggaacaatcaagttgtgtgaaaagaagtgacaattaagatccgctgaaatccatctcgtggagttaaggccaactctagatgatccggacctatgtatactactaaaaaatcgaacacgaataagtagggtctcaacatgagcccttaccttttgtgctagcatagttgccaaaattaagaatccagacgatgcatatcattcagtcaatgtttaatgcatatcccatattaaacaagtttcatggttctcaatgtgtgcgttattcataggaattaaaagaggaacttcaaaattggaacatagcatggcacaatcaatttaaaaaatgaggtcgttggacaaagtcatgcaccgatagaggctgtggctcatgcaatcttactagcaaaggtgagacgaataacatgaacacggtagcgtcgataaagagaatgctagagtgttagcaagcccaatcctgtcaatttagtggcctggagcgaagctagaaaaatgggccctctaatacaactatagtaatgtgcattttgggcaacatgatttcactctaaatttagaaataagcaagtgatttatgaaaattatgtcatactagattcaattcaacgttataataaaaatgagtgctggtaaattaccaagatgagaactagagaaaatgactattcactgtcctagttgcacagctgcaccgcaaggatccctaaatcctaaatcaaaatttcagaaattagaagaggagcaattgggagtaacattttgcatcccaaaatttaaacacataaacttagcatacatcaaaggggagagcaattgggtacctcctagtctcctagaattgaacagagagatcggatttttgcatccggctgccagttgcagttttgccgccgagcacgacgccgtagacatgtagccgcgcgcagtcgtcgacgtagcattgcgtagctgagacgcggctggaagggcggcgaatagccgaacaggcgactgcgagcgaaggcgaagcaatcggacggaatcacggaaggaagccaaatcgacacaattttttttcctgtacgtgtgcctcttcatctactgagctagtgggcttcctaattcctataggctattatgttagcatatatggggttgggcccccatcacttcgcgggccctgtgtggaggcccagctcgaccccctagggctgggcctgagtgttagctcagaagtcccacgaaatagaatgtgacatgagcgaatggtggtggcttggtggaagtcgacgaggagataataatgatgggaggttttggcgaatggcaggcgggtaattttctcttaatttaatgggcacttccatatttcattcgcttaattcttttggggaaggcaaataccacaccacatgccttgtgtaaaaggatggacagactcttgttgatattactggggaaaccgtgtaacaaatactcatttggtagaattcatcttgaaatttgttaaaatcacccaattgaagagacaaaatagtgggccgttcattagtttagatgaaaaatctggactcttgagtaaaattcgcatagttgcatgaccggatttaatgtgagaacgaaaaatcccgcgtccccccaacgaacccaagcgctagagagagggaaaaaaaacctctcgccgtcgcatgcactcccggttcgctttccctgctcccctctcttctcctctcgcgtcgtgctcgtgcctgcccccttcccagttccctccctttggcttggtttctctcaccaaatgccaaagccaccatgccttctctactactactactactactactactccccaccacaacatcccgcagccccccctccccaccgcctccttctccctcctctccgtcccccccttctctccccccctccgctccccaaaacctaaccctaatctccacgcctccctccccgccgccgcccgccgctgcgggggctcgactccaccctccgccgcggtccctcccgggggacctcgcgtgcgcccgcggccgccggctcctcctggttctccctcttcctgcttgcgtctctgcgcgcgtgggggcgggggcgcggtagggtttcgggatggacccgcggcgccctccgtcgcgcgggggcgccgccgccaacggcggcgggctctcctactccaccctcttcaacctcgaggtactgcctgctctctctctctctccctctctgtatgtgcgtgcttcggtggatggtggttttgacgcgcgcggtagtggcggtgttggagtggggggcgcgttgtgattggggtgggtattggtagtgctcattgtcgctgggttttggagaattctctccgggcgctgtatcatcacttggttgtttttttaag

SEQ ID NO: 41254 - DNA, 1333 bp, Oryza sativa
aggaggaggagggggagtaaagtaatggtgcggaggagaggagtggagaggaggtggcgcgccatttccggaggcgagaccgcgagaggggaggggaggggagggggaaggagatgacgaacgaagatcacgagggaaggagggagggaggagtggcaccacgcacgtctgaagcctccaaacataaccgttgcttttttttgtttttagcatttgctattagatccttaaaaatatataaagtttttttagcatttgcttttagacccttgaaaaaatactccctccgtttcacaatgtaagtcattctagtatttctcacattcatattgatgacttttcccatattcatattgatgtcatcaatataaatgtgaaaaatgttaaaatgacttacattgttaaacagaggcagtatataaaagttttatttacaaattatttttcgtttgcaaatatacctaataaaccaaacgatggcccagtgagttaaaaccggtaaagaaatttccgtcgtccgtacagagaaaagaaaaatacgcgcgaataaaaaagtgcgtgcaaaaatagtttctgtccgattccaaaataaaaaaaaattccgagcgaaaaaagagtttccatcttcctacaaaaggaaaaaatagtgcgaaaaaaaagtttctatccgaaacacgcgcgaataaatacctaactaaaaaataaatatctatctctaaaaaaccttctgtcgtaaaaaaagaaaaaaaaaaccgactcccgtagagaaaaaaaagtccgactcctgaaaaagaggatttctcgtccgtaataaaaaaaaggaaaaaaaacgttcgactcaaaatatgtaaaaagaaaaggaggaaaaaacgtcccaaccaaacttaaagtcgccccttgttgtccgtatatatctctttaactctaatctaatctatcaatctaatctaactttttaaaaagagaagtttccatcatcagttaaaaaggaaaaaatacgcaagaaaaaaatagtttccaaaaaaatgcgcgggaaaaatacggtttccttcgtctgaaaagaacaaaaaaatgctattaaaaactatcagaaagaaatacaccatttctaaaaagaaggtttcaaaaaaccacacaagaaaaaaaacgtttataaaaaaaagccgctctgaaaaaactaatagatgaaacactgtttataaaaaaaacagataaaaaaacaaacggactcaacgcgcgaaaaaaaaccgttgtttcaaaataaggttcgagaaaaccgtctggcttaacgtgagaaaaaaaccatcatttccaaaaaaaaaaaaagttagag

SEQ ID NO: 41255 - DNA, 2011 bp, Oryza sativa
gggctccctacagtcctacaccatcctccctctacgccacgtgatcccctgcctgtcagggcgtgggcccaacggcatcttagttactttactcaatttttgataaaaaggagaaaatggtagtactggatatttgcctattcaatttttgttcttcgtactttcatatctcaagattatcgtcttgtgataataatgtttagttgaaaaactttttccaaaaaacatcacatcgaatctttggatacatacatagaatattaaatataaataaatttagaaaatagttacacagttaggggagaaatcgcgagacaaatcttttgagtctaattaatccatgattagctataagtgctacaataacccacatgtgctaataatggataattaggctcaaaagattcgtctcgcggtttccatgcgagttacttcctccgtttcacaatataagtcattctagcatttcccacattcatatggatgttaatgaatctagataaatatatatgtctagattcattaacatcaacatgaatgtgggaaatattcattaacatccatatgaatgtgggaaatgctagaatgacttacatcgtgaaacggagagagtgtgaaattagtttttttattcgtgtccgaaaaccccttccaacatccggtcaaacgtccgatgtgatatacaaaacttttcttttcatgaactaaacaggcccaatatttcacacaaacattgtaaaattttttgcacgaagaaacttaagtagttttatagaatttaaattttcgaagggcataacattggtattgagtaactctcgacaagacttaatagtctttttttaaaaaaaaaaatcatgcaactatattacccggctttgaaacaaagcctagacaacatacaacatacagagttcacagtgtcttaacaaaaagaaagcagaaaacagagcaaataagagagccgctgggaacaaccagccatccatgacagagctcagaacagcacaaaagaactaaatacccctttttttctactaaaccccactattttgagaattaaaagcaagacgagaactactcatctaaaccacaaactatcctaaggcagcgttcgtttggaggacattgagggagaaagcacctcgttttccgcacgcacgcttcccaaactactaaacgctgtattttttgtaaaaattttatataggaaagttgctttaaaaaatcatattaatccatttttaaaatttaaaataattaatactcaattaatcctgagctaatggctcacctcgttttgcgtatcttctcaatctcctcaatctccttcttctcaaacacaccctaagtcaacaggcagattaattactagtcattattatcaccttgattactactttggacttcaactcatggatatacttcatgtaataagacatatataaccttgctagtattcaaaatgcacaacaattttatgatacactatataagagtttttctttcaattagtactgttcacaacagcaccagacaaaacttctctctgaattgctccaaacttctcgatgaaaaggaattactcgaaacttctatcagaattactactatcagtgtgcatctagctacaactgtctatctagtaaacactaatatggtgaaacaaagaagaagagggagatagggattgcgatttgtgagaggaagatgaagataagaagcaaaatagaaaggtgcaaagttaaaagatgctcaagtattgaggtgttcacggtaacagactctagcattgagagggcataggcgaggggcgcgaggagcgacacgcggagggcaggaacgccgagagcgaggtgagcgacgccaagatagagggccactggcagcggagggtcaagggaggcaggatgttgccgcggcgggcagtagcacaggcggaggcactccactaccataccatgacgcgcctagttcttctctcggacgacgcattcgtcaaacaactgca

SEQ ID NO: 41256 - DNA, 2725 bp, Oryza sativa
  unsure (1)..(2725): unsure at all n locations
attcctgcagccctaccgttacttgatagaatatctgctaagtaatagtaattgctccatcaacttagacttatttagtaaaaataatacaaccgtcacatttgttacgcctttatgtggaacacacaaggtgcaacttattcatcacgatcaattattcaccacatttatgactagagatagataacatcatcgttgaaaagattaattcgaccagatatgtaaaaatcgaagctgatcaatgcaatagtggtgatctcatcgtaatcaccaactccgtatgttgttcctcatcatcatggaggcctcttcctcctcttggcgcctcggctgctactttgacaaccactgctgacgcttgacatgacgaggcgtttttgtcgccctaggcgccttgcttgtgcgtttgttatacgcctcggtgtgtggcaagaaaaacccggtgccaccggcatcgcgctgctttgtgggaggaggtggcaaggctggggcactggtggctaccagcagcagtggcgtcctcatctccggagcaagccttggcggtgcaataggcacccgatctagcatcatgccaccgttgctcatgaacggcctcacccccattgatggtggggcatggtagcattggtatttgttgtccaccatagctggtagaggaccaacagtagcatggtgttgtgtcgtcgttctttgcacagcgctgccaaagaggacatcggcaagacaagcggcgaggtcctcgacaatggcgcggcgaccctcacaagggtcgatgacggctccaatgtccctgaggatctccgatggcaaccactggtggacgtcgtcatcctcctcactcgcgccgtagaagctatcagccatttctggtatataggttgagcacttgagcatgagcaagaagagagatttgaggtgtggagatggagaggtaagggtatgtttatatagataggtgaggaacaataactatagagggcaggatattagtaggcatgtttctttcctcaatcttataaaatgaacatgtttttcaattactgattttttcccttcttaattgtgggtgtttcttctcttcatttactttatgccttctatgtatttttggcgatgataatgtgcttcatatgtttcattcaaaagtatacatggattatctagagagtagtgaaaggcgctaatgcgctatacttagatattgatgcatgtaatataannccactttattaaattttcaattatttgcagtacgataaagagaaacatgtgggcagtgtgctctctgcctctgttgtgtcaaaatgaattctcctaactatatattgaattcccttcgaaagagaattaagcaatggataacgacatatcacatgcaaattgttgtacttgctggtgaaataatgcatcagcacataaagacaactgcacattttcgttcacaagaaaataatctatacatttccattagtaaatacaattgcacaaaaaaaacatatgtgcacatttcattcacataaaaatgttctgcacattttccattcacacaaatctatacaaaaactgaaatacatatttacacatttcggcacatttcactgaatcatttttacattgctcatatgtgcacaagctttgcatgtaacacatttctagacaaaaaaatgtaacacattttctgatatgggcggtcaaagcaactgctactttggatttctagatcaagctagcactttgatggctggcttttcataggaaagagggaggaggggatgcgggcggaggcgggtagggttttgggctagtgggtgccattttgtgaaaaaacccctcagcttccatattttagagtccaggcctacttcgcggttttcctcccctttgcatggaatatccggatttccgaagggcctaaacgtaaaaagccagctcaaagggacggttggtgagggacgccggacgaattacgaacaaaacggagggtcttttcacaaaatttccaccctgtgggtactgcagcgatggtagcaaaatctgacgtggcacaccccatcgcgtgcccaggctgcgaccctttattttctccgatatgctactcatgtgactcataggttcaattctaattcatgtttacacatcttcactaaacatatagctctaatattgtgtgacaggctggcagcaaacatggtttgaacagaaaatgtttttgaatggagataaattcagcgaaatgcaactttataagagatcaagaggctggtaggcaatatgttcccaagggtacaagttcaaatcctcttatgagttatgacttatgaggggctggtgggcacctagatgatggtagcagaatcatgtgacccaaatgtccaaagtgcctcgagggtggaactagcagagttccactaagtaaaaccgacatacttgttatgaaacctattttattctggacgaatcaagatatgagtggaaagcttattacagaagaaagcttataccagaagatatcttatcacggaaggaagcttgcggcgtaaacaagcttgtaggagaagcaagcttgccgcaaaagccagcttgtgggagaagcaagcttacggtgtaagccaactcacagtggaagccggaagccagcttgtgggatacgcaagcttacagtgtaagccaacttacaacttacagtggaagccatcaacctcctctgcctataaataggatc

SEQ ID NO: 41257 - DNA, 1287 bp, Oryza sativa
agaagcaaagatgacaatttcataaaaaaaaattgttgcaagtctaattaaacctacgcattagtactcttcctctaaatgcacaggttatagagatgagttataattcaagtcaaactcgagctaaccaatatagcctaacaccaaactcatatataggagtacatgctcctgtatatggtatagaggtctgtcaactgagtttaacatggacaatttatcaaattcaagcagtgaaaattatagccccacaaatttgaacttttacgctctacttagcttaaaattgaaattcaagattgtgtactgtgtatttaaattaatgtctcaatgactttgtgtgcatttgtgatagacagcaatcattcgggaaactgcagattgttctgactattttctactatggaaatagctaactcattgcttggaggcatttcttgtgttcacctttttgcttgatgtgttatcatgttctgcagcccctgaagtttgatcatccaagtcttcaagcatcaaatctccttctttgtcaaccttgatgccctttgtacgcctcttttttagtcggtcctttgcctaaaagggtaaatagaaatgaaaaacattgtcacccgacttttttccattgaaattaaataaaacatgttgacattccatgccatactcaatatttcattataacgaaaactcaacggacattctattaagaaaccaattcaaacaacctcatcttttgccatattactgcagcaattttaattcaaggtttgttgttctacagcatgtaaaacctaataacatgtaataagatgacatgtgtaacaattgttatagtacaataccaacaagaaaaaaagttggtcgccaaactcttccataaaccaatgaaaggtttccaaatgctttcatgatgatacgttttctaatgcaaaccataaaatgaactaggcaaaatctcaaaaacaaacaggagaaataagcttcgtacttttttgaggttgttttcttaagtttttcaataatacactacataaactccttgataattggcagaaccagaaatcaaccaatcatgaatcaagtcttaactcaataaaagtagtaaggtttttgcactgaatctaataaggggtgggccctatggttggtttattgtcccaatggggatagattttcccaatcatcttgagaacattaataacacggtgatttgcaactattcaaagagtttgaatagcatatgccaaacaggtgttactaaatggggaaaaaatgaacaaaagcatg

SEQ ID NO: 41258 - DNA, 558 bp, Oryza sativa
aaatgaatggaaattccaagccttaattaatgaatagtattgaagacgtgtatgcatgtactcctctgtcccataaaaaaactaatcctaccatggtccaggttcatagccaggattggcttttttttaaaggacagattagtacaaaatattcatggtcaatagaatttatactgcagtgtatggagtcatacaaccacaactaacgacttcatcacagcactttccaactttcaaaaattacagagcaggaattttacatgaataaatttgattattatgaaattctgggaagaaatcctccgtttgaaaggaaatattcatatcttttccaattcacgtagggatgaaacgatatctatactattttaaatattagcagtggtgccaccaccatctcatatcactgacgtttgttcctcccaacttctgagaaattttgtgccccctaattcaaatgcttcatattctcagagtatagccaactactaactccaaatcatctatagtcaatttaataaccaattcatacgatagttacatataaatatatactac

SEQ ID NO: 41259 - DNA, 1136 bp, Oryza sativa
cacatcaaatgtttcaacacatatatggggcattaaatgtagaaaaaaaccaattgcacagtttgtatgtaaattgcgaaataaatcttttgagcctaattacaccatgatttgacaatgtgatgctacagtaaatatttgctaatgacggattaattaggcttaataaattcgtctcgcagtttacatgtgtaatctgtaatttgttttgttatcagactacgtttaatgcttcaaatgtgtatgcgtatacttcaaaaactttacacccaaagaactaacacgtaccttctgtattttttactgtttcgcaatttatcgttcgctgcagagaatttggtgttagagtatatagtacgaattgagtcaggaactcaggatccagtgatccatcaagggcaccgagctttgcatggtaatttccattaatgctattttctacgaggagaacattagatgttttttcgcaaaatctatttcgagaggcatctcgatttagacttaacgagcgacgcagacaattacgtgagaagtactattagcgtacatgcatgcaagtagtttttgctattaggttgtgcatattttttttcttcttatgaaattttctattaaattacttatccgatctataatccgattacatcgttgtgttcgtaacaattaaatctttacaacaagatctcatatgattatattttgatgaaaaatcacaaattacttttatgatatgtttaaattacttttagatttcactaagttacttcttagacatacaaaagttaattcagtaaagcctaaaagtaatttacatatattatagaagtaacttagaacaaaacgaatgtaactttgacatgtcatttgaagtaaatccgttatagagataaaaacatgactctatctagaaattaaattaatcagcacaaattatggaattaactaaaaacaataataaaagtaatcacctcagagcattatgaatgtataggaaatattttaatcaaatctaaaagtaacttatatatatgataattaaatatatgataatttgttcaatgaaaaaaggtattaatcaaagttactttctatcttttttttataagttacttctataatatatgtaaattactttt

SEQ ID NO: 41260 - DNA, 604 bp, Oryza sativa
tacattagtacatgtaaatgttcagctgtcagaagttagagatgtacggggctaggaaggagtagttgttttgataatcacattttggattcatttcaacaagacaagcatgcatgggtcccttaatatttgccggtccttattatcattgacctaccaactatgcatgcatggaccaaagagtgtcatcttgtagctagcagtcgttcgtgacgtttagtcagcaacctaatgaattggaacaaagacgtttcggcgtgcatttttggtgatttcttaactagttaaatgatggaggatacatcaatatatatatatatatatatatgcaatatttcaaggttaaggatttgataagtactgttatattggggtaatggcatgtatatgtagggggcatgtagtaaccaccctaacgtacacgtactctagttgtattacaggtttgcatcttttgcaatttttcttgccaaaccaccttaaccacctgcaaactgacacaatttatgtaaaaacctatccagatactgcatatatagagccaagtcatgcatgcatgacagtcatatactgctatatttgagattgctgtacgaatgcagca

SEQ ID NO: 41261 - DNA, 1684 bp, Oryza sativa
gcacctcagaccagtccagacctgatctactagccaacaagctagctatcgcaatgatagctaatggcacaccagcacatttcttcaaaatcttgtcacatgcctcagttgatgaactgtcaagagatttgccttcactaccagttcttgtatacaataattctttagagttatcatgagaaagtggtttcatattgtacacatcgctgataattgttgcacctcagatttacgagtagttacaagtattttacttccgtaatcattatcttgtaaaccactttcgagtatttgccatgatggcttatcccatatgtcatctataacgataaaaaacctagaatagtagaagaactgtataagcaccccaatcactgaaaattacgagtcatcaataagatgtggttttctttttatatgtgaaggagcaataatttttagtgccgaagaaaatctagataagagagataaacatgcattaaaagtgagatattgcaattaattattcattagcctatgcattggcatgtgcttttggataatgtgtgggcacgacggtcttgtagctaggaaccagtggtgcactagaatagtgacagggataacgctgacaagtgggtagtgtgctcctccgtcatgagttcaaatgtgacatgctcatgtgacggcggtggccaacacatcttttggcgttttctggaattttccgaaaatggtttttggaatttccaaaatgataaattttgtgaaaaagctctctggtgatttcaaattttttcgaaatattttcagaatttccgaaatgttatttttccttttttttttgctaagtttgtgctgtaatttatactttttggaatttccgaaagtattgtagcaacttccgaaaataattccgaaatttttttggaaattcggaaaatggttgctcaaatgaaagtattgtatcaacttccgaaaataattccgaaatttttttggaaattcggaaaatggttgctcaaatgaaattgctttcttgtgtttttcagacttgtccgaaaatggttttcaaaatttttcaaaaaattgaatcttgatttgcctccaacgatcagatttgaggttgtggttataaataaccccctccaccccaagtcaagattgctcgctccattgctttcttgtgccccttgcttgtgttgatttgagattcactttgagccttgccctctcacttcttactttccactagggatggcagtcgggcacgacgggcacgggtagtgactacccatcccgtgtccgcgaggtaattcatgtccgcgggcatgcccgttactacatgatgggcaaggagcacttccaatgcccgtcccccgtaggcgccatgtgcccgcaggcatgcccgtttacccgtcacatctgggaaccagaggtgggaggcgcgtctggaggaagcggcggcgaccggaggtgggaggcgcgactggaggaaggtgtggcgggctggcggccgatggctggaggacatcgacgactggttggagaggagctcggcgcagacggggtagaaggcgacggcggtcgcagcttccttggttgccccccctcccccgtggccgctatgaaagtcgtcggctggagggtggggccgccagcgactagcggaggtgggaggtggtggcgaattgcgcgcccctct

SEQ ID NO: 41262 - DNA, 594 bp, Oryza sativa
agaggagggagtggaggggagttgggctggggagagagaaggaaggaggcccaaaatgaacagtgaactttcacctttttccagagatttgtagagttgaattttgaagatatttttggagggatttgaatttgaattttgacctagggtttcatggaatttgaaatgaattctaggagaggatttgagatctctattggcacaaaaacaaataagaaccaaattaactccaatttttaaatgacaaacttttaaataaatccaaacaaaattaagtgtgctacaaactccgttaccaaatatcgtgtctcggtgtcgacatcatgtttggatctcctatggcgtttcttccccgtttacactggtggagaaaccctttgtagtcccggttcgtaacccccctttagtcccggtttccaaaccgggagtaccaatccgggactaaagatcgctatctttagtcccgggtgaaataaccgggagtaaagatcgatctttagtcccggattggtactcccggtttggaaaccgggactaaaggggggttacgaaccgggactacaaagggtttctccaccagtgtaaacggggaag

SEQ ID NO: 41263 - DNA, 707 bp, Oryza sativa
cgaccacgccaccttccgggatgctagctcggaggatgacgctaccatcgtgcacctggcgcgcatggtggaggcgtacgacgcggctcgtatcgacttccatcagatggtgcgccgcgggatggtcgagaacaacttgaagatcctggagctgcgtcaggagaacctgcagctcaagaaggacctagacgcggtggaggcgcagctgcatcagctcaagatcgcccagggagaggtctgccgccccaagcgtcgccgcgtctgccgcagccagaagatcaccgcccgcaagagcacctccaggcccgagcttgttcgtcagtccctggagtggacttgcttcgtcgagacccctcgtaccgagcccgcgcccgtggttcctcaggagggggaagcctccggcgttggtagcacggaggatgcgctgttgctcaccttccgtcctggcccgtcgcagcggtagacgaccagttagtaggcttgcacgtgtgttctttctcgtttgtcttcttgttggagtcgtgtggggcatggttatgccggtgtgtggtataactgtgtcagagcctgtctttattttatttgcttaagcaacttgaacttgaactttaatgaacccatttaatagcagtaataaattcaagaattatagtagtcgtgggtggttagttttaattgtcagcttctctcttgatgaactgctgtac

SEQ ID NO: 41264 - DNA, 699 bp, Oryza sativa
acttcatgcacaattttacaatattcacttcgttttgagtcctgcttcatggatgcttttgtttgtttagtcttccggaaaagtgacctcccaaagaatggaaacccgttgtgccaaaggacacattgtgaattgtgatcactcgctgttggagtattttggttgtttcagtctttcagacaatacacttcatctgtcacaatcagagttttgatagaaaaagaacaagaaagcagagtactctgcattcactaatatacgcatttgactagcgtaatcttgtttctttggtgtactacctgaaggcatattcctattataagactgaacaacatcccgcttcttcacaccgacatggagccatgtattctgaacaggaacaggaacttccatcttgattcttgaatgtaataactgtagttcatccaattagtatcatgatctggccccttggaatgccatggtcacaggctcacagcccacaggatcctgcaccacacctattctgtctgctcctctgtcaccttacaatattggtagtcttgtctcacaccaaggtccatagtatagctagcagccagctccaaaattttgtcatgttaaaatagagctaacttaagagacaactcatcccacaactaactaccagttacctataagcctgcttggctcaagcctacctatatacattacatagtt

SEQ ID NO: 41265 - DNA, 662 bp, Oryza sativa
gcttgttgagtatgtcatatgctcattcttgccataatccatccacctcagttgaagataaaggatcgccgaaggagaagacctttggcttataccccagttgagctcgcctgtgggagtggagcccggagcttcctagattttatttttccgctgagtttccttcttggtgaggactaagtgccctcttaagtaagtatttatccgtttagttattatgatggatttgtatattaaattgtcagtttgtgtacctcggctgattccctggacgaggattttatgcccaaatcagttcggaaattattagtgaatttccgggcgtgacaagttggtatcagagccctctcactgtaggataagcccaatggtccaaccttaaggactaattttccgaaaacataatttgtgaaagtttctcttttcttccttatctacaattcttcgcacatcgttttgtccttctctcctcttttccctctttcacactgagtagttgttaaacttgatggagaaactccaaggcgtccatgttgtccacttctgccagtaaagtggatccaggaagaacccaagtgcccacatatcacgatagagtgaacttggatcctactttacaacctatgcccgccaagtgtctttgaagaatacttagtacgata

SEQ ID NO: 41266 - DNA, 2159 bp, Oryza sativa
cttgtgtgcgtgtatagctggtttttgtatgtttttttagggaggtttatgcatgtacactcctacagaaagtgctatagatgtcggttgtaaatatcagtttttccaaccgacacctataggccggcagtgatgtgaagagatataggtgtcggtttagaaaccggcacctttgacgatccacgaatcctgatgcatcgagtcaactccatcgaaatcatcacgaaaatcatccaaacacaataacaaaaatcgattcccctaccttcccatcgttgatctagctgcccccaccatcatggcagccagcggcggagaggaggcgccttccctcttgctggcactgccactgccttccctctcgccggatctagtggaggggagcccaacgccaccactcgtgggtagtttgccgtcggtcgcgggagcccgctgaatctagcgaaggggagggtgggccgctgccgtcgtcgggcggcggccgtgagagagactaagaaagagacgcttgagagagaagcgtgggacaaaggagaagacactagagaaaagcgtgggtatatgtgccggtttatttttaaaaaccgacacatataatcagtcctttaattaaccggtaactataatattataggtatcggttcttttaaaaacctgcatctatagtatggttttttctctagaaccagcacttatagtgtttaaaggtgtcggttctatattttttttatcacaggggtacggcaaaaggtcgataggtgttggactaaaatgaatcgacacctatgaacatttctctatgagttttttttatgtagtagaggtatttttgtcattgccttttgtctttaactggtttaataattacaaccttttgttacattaaaaaacattaaacatactttctctctgtttcaaaataaattaatatgatatttgatacatttttactataaatctagcatcaagtattatattaatttatattggagcggtggtggtaccaaggtatcttacaacacacaccacaagagatgacaagatcagtcatatcgcagatcagattgcagcagtcttctcccaccttgttttgatcgcacgaaaaaaatggaaactatacggttcacactttcttgtctcaagaatatactgattgcaaacctatatctatactagcaaaatacccatacgttatcacgaaaaaaataaaaatacgataaacactagattattagggtctaattttcctaattcaggactgggtaaattatgcaatcctagttagcaaaatacccaagtgttacagcgagacgaaaaattttggcgtgtcatatcggatatatggacacacatttgaagtattaaacgtagattaataacaaaataaattacagattccgtctgtaaattgcgagacaaatttagagcctccccattccgctcgtcagcctccccacctccttcctctctgtgtgtgtgctcgccggcctccttgcccgatggatgctgcccccgctcttctccctctctacgtgtgctcgtcggtgggtgcgcgtcgtacgctgctttcgagccgaggaacacgagcgtcgctgtggagaaaatagagaagaaggcacatggaacttggtgatatggcaattgtacagtgttttgggggctgttacatccaatcgatgctatagcatctgccaacttattacattcacgaggacattagctaactcaaaaagaaataaaagccgaggttataatcttcttcgcttctaggacaagaacccccatcgctgcatattgtagattcccttccttcagggcttgaaccagcatcagtaaatcagactctagatggatatatgccatacccccgtgagatatcgcttctactgccttcaccgcggccaaaacttcagcgtggaaggcatcctgcaaccgtgatgagtttccggcacccgcctggatcacatgcgcgtccgcatctctgataacataatcccagcccccgtcagctcatttggtctaaagatccatcaatattcagtttcaggacatcctcctctggtctttcctattttctcaacaccctcgccggcccaatgtttactgcttcactgacatcatatggaactcgtcagattgcttcgtgatcatgaaagcca

SEQ ID NO: 41267 - DNA, 1129 bp, Oryza sativa
tccccaacaccaccactgctaccaccatttcgtgcctctgtggttgagatgcaatcagtagcgttttagaacttcctcaatttaaataactcaaaggcaggggccgcctaactcaatacttgtgcgattagtggaaccttttagatgtctgtggaacaacttttctcgtaattgtgagaattattatcatcagggtgtagttgtgtatgcatcaagttccactgttgttggagcgttgattgttagtactattgctgttcttgtcttccagtggtaggtgtgagttatccatgaactttttattcacctgtcagcctttattctttacctaaatgtttttcaaataaattctagtgtaccaaaaatgttgtggttaagaaaataccaacgaaatctatgttgtgatgtcatatagttcaatcactctcataacctttctcttatgcatgtccctgtgatgtaacatttcctgagttatgtataataatagaaaacaatatcgtaaagagcacactatatgtttagtgttgtatatgttcttgttttcctgatgcaatgttgtcatatgttgggcaagcttatcctgcccatctttctgtccaacttcttcaagtctgaagatattcttttttggggcccatttgtttttattcaacaaaatagttgcacacgtcttttgtgctgcagcatttcattttatatgttctcttctgtcagaacttggatgaggtgcaatcgtacattctggttaagagaacttcagaaaacactccaacagctcttgttgctgatactgaagagtttcttcgcctggtatgtttatgtgttttttctcccgtaaaatagacttctttatgcactgcagttaatgctgactgtagaaaattagaaagtaaaatgctgcaacataattcattatgtatggtacaattgcatatttcttttggaggctttttatctaatttcttttcatactacctgttaggagtgctgagagccatctatgtattggttatactttagcaaccaatagttaaaattttgaatacacttatgaatagattcttacttcatcaaataatttgaatctgagatctcaagaaagaaatgtgccaagttaaattaaact

SEQ ID NO: 41268 - DNA, 541 bp, Oryza sativa
caaaatttattcacacatggttaggcttgggggaaattatgaggggatctctcagtactctgtatgcttcacaaattttgaaagtctagaaaatctcatatgacatcagtataatcaaatttgacccaagcagcacgatactcccttggcctcccaatataatagattaaaacataaaaaaattgtcctaaaatataagggtatcgtaagtacaatttgtcacatcaatcacctcccattcaaattacttcccatcctaccaccaacgaccctcccactccctacatacccttatttaataagggggcatatagccttttaccttcatccttaatttcttcaaaacaaccaaggatatcttatatttgcggacggagggagtattatataaaaattaaccaaatatgtgctaaactattattccctgttttgattctataggcaggcacatactttaagatttaaactttgtgatttttgaccaagaactagtccaatgatttatagtgatataaaattgatattgttggattcctatttt

SEQ ID NO: 41269 - DNA, 814 bp, Oryza sativa
tattgtttctatcaaatattgcatttattttcgaatgtcattgggtggatttaacctattgtttgttatagcccttttgttcttgattactttattccttgataccttgggttattataacttgactagttgagctttatttattggttcaactagatattagatataattgcttagccctgcttagaaacattagctcactattgggataacttatgattcactattatttcatgatggcttaatgatagttcacgatggtcaatcgtgattagttaattaattaatgtgccaactaaaacctggtaatggtgggttgtgagcacatggttttgatggtcgtgctcatgacaattaaggaccggttcacgagtttcggttgtgaaacatttatcgtgccaaccacaagctagcatgggcaacggctttatcttttgtatagcatggttcattgcggggcactagactgagaagtggcggagataagcccacgggggtcgctggggagtccatgccttgtttataagggggtgattatgatccaggaaggtgcgctgcagtggattgtgttgtatgaggtgtattgtcataactcctttccgaggtaccgtggtggtattgaggccttgggttaaggcaggttcgtgtgggttcacggccttgataaataatatggtatagttctagaatcgtgtttacaaaatagctttgagcaactaagtacctttaaatgctgtttactgcaaaccctaaccctttatagtataactcctttgtactcccttgcatttattctacacttgtgggtgtgtct

SEQ ID NO: 41270 - DNA, 1237 bp, Oryza sativa
ttgcgatcattactcggcattccggttattatagcagaaggtgtcaaccgtgatcatggacacattgaggacgaatggctatttatgcgtgtatggatcctactcctccaatagtatgtggtggtcgcgttggacactggatggtataatactcggggtgtccacaatacctgcctataaaagaaggagctcactctcatttccaacacacaactttgagctgaattacaagaggctctattgtatcttttgtatattagaataaggtagagagtgaggggaagctctggaggagtgcccggaagtttggcgctcatccgacttctatctcgacgagtgtagctttctaggaggaattcgggaggagtaccagagctgtcggtacactctgctccgggttcggagaactccttctataaaataagcattcatattcatttcttatgttatttaattatttagtctgagtaagatatatttccatctttgcgggttcattgtttagtattcatactaagtgctctagtactagaattccagatagagaaggaagttcctacgcaagtattagagtagtaattaataacttagacgtggtgtataggttagagattacctttgtttgttgtgtatcccacggatttgtcagaggtaggcggcaggtggtgacagccctgaattctgtcccagtaatcctccacgttcggatacatcatagagctatagctggaataacgctggcataccagcaggggtcggtgcccgaagcgacagataggaaattacctttgcttagcgtagataattaacactcatagaaagtcctctctagcctgcctaccatcagttgttgtccttggatagtcttagccttaggtagattacacacgttccctgagttcgatatcctttatgggtcacccgaaggtgaagtgctacagcggtattccgtgcgcttgcggatttatccgtggtcgtaagaaataccaacatagagtatatggtagttagagtcatattaggatatgattgatttgtgtggactccttctatatttgtaatccttccttatctcttcccatgtactactatatatatcggcctctgaagctcaatataacacgtgcaatattcgcattatttctctcatctactattcaacatcaggtagcttggaatgaatgccataggatcctatacatcaccactacaccatccatcagccccagatagtatc

SEQ ID NO: 41271 - DNA, 2948 bp, Oryza sativa
tgtttcactcacaccatataagcatagtggcacgtggattgattttaccgccttggttttgtttttttttccatttgatctcatcatgaatcttggtcaatggttgcggcatggttgtttcttgattcttaaacctctcttgtttcactcacaccatataagcatagtggcacgtggattgattttaccgccttggttttgtttttttttttccattttgagatgttctcttgacccaccagtctagcaatgactcattttcatcgtgtgataggtttatttcgttgcagtttagcctactcaaaactctcacccagatttggcgcaccaaggtgcaatttgtgaacagatgttgcgcgcgttgacaaaaatagttatttgactcatttctcttttctttaacccaattggtctttaggtctactccctcctttccattttaagtgcagccatgatttttcgtacacaactttaactgtacgttttatttttttaaaaaaaatgaaaaaattaaaaacatatgtcacttataaagtactattcatgttttatcatctcataataataaaaatactagttataaaaaaattcaattaagatggacttgggtgcagaaacttatgcttgcacttaaaaataggacagagggagtacttgttaaaaatatcaactagtttcagaatttcagtagttactggaaaaaaaatttagtagcatatttctaaatctacaaaatttacttttgatagacatatttcattccaaccacctatcctcttaggctgtgttcggaactctttgttcccaactgccccttttcgttttccgcgcgcacgcttttcaaactgctaaatggtacgtttttttaaaaaagtttcaatacgaaagttacttaaaaaatcatattgatccacttttttttaaaaaagcaaaaacctaattaatcataagctaatggatcactctgtttttcatgcacacaacttgggttgggaacacaggattccaaacgcagtcttaatgactttctcggatttaatacgtgactcttcattcttccacataagattagctatatgggcatcgagaaatgtaaatattaataaatcgcttgtttacgaggaatagctctttaagtagcatgtttaaatagatgataggtaaaattatttatccttggtcattgtgggaagatgaaatatgaatatcaaaactagatggagggagtagtattaaattgcaatacaaatttgtagaaattgagtggcaatatttatagggcctgtttagttccaaaaacatcacatcgaatctttggatacatatatggagcattttttttgcagggatacatatatggagcattaaatatagataaaaaaaactaatttgcacagtttgtatgtaaatcgtgagacataatgacgaattaattaagctcaaacgattcgtctcgcggtttctaggcgagttatgaaattaggtaatgatggattaattaggtgaaagttccagacaagttatgaaattagttaacgatagattaattaggctcaaactttcgcttcgcggtttataggcgagttatggaattaggtaatgatggaattaggtgaaagttctatgcgagttatgaaattaggtaatgacagattaattaggctcaaactttcgctttgcggtttataggcgagttatgaaattaggtaatgacggattaattaggtgaaagtgttcgatgatattttgtacaccttttttttattttataagaattggggtgcgttaaaatattaattccgggaaatacagtacaatagtaaaattagtgattaattatcactaatgatataatctggcgtacattctcatgagaatgttatatgacatgtgcagtgctgcccaattaatatacgggcgcgtatatactcatgtgtgtgtatatatatatataatgatgtattttagccaggatagaatatataaatatatgcatggaatagatggttgaataaatggcagcacagctataaacgatatcactgacgaaaagaagaaacgacggtggattgattttggaaatatgccactgtagcattgtcattagaggatgttgatcatgatgatttgccggcagttgattgcatggaaaccaaatacatgtttgcatggaaacgtaggaaattaaaaagcaagatagctatctggatgaattttccttgccataagcatcacgtacgcgtatacgaatacaaagaaacaatcgatccatatcacaccggattggaaaggagtcgccgtcgcagtatactcagaaggaaaatatattgagcaggatggctactaatcggtaatcacagcatatggaaagagataaaatcatacagaatcaatcaattggctggccatatcgatcgacccatgcacgtactggctgggaccgccttccttcactataaaaggccatgccattttacacaacgaacacacacagaaacggaggaacacacagacagaacacacacacgaaagttacagagagagagagagacacgcaccattttggccggagaatctcggcgtccggcgggaacacgtgcgctcggcggccggtgacgttggccgcagtgcctcggcgtccggcgaggaggcgcgcggaggaggagacgatcgccggagcatgtactcagccattgccatgggtatagcttattagctttcttttgtctttttcctgctttttctgttcagatcgtcatgcatgcacaacacggcgacgaggcgagtttctggtgctgcccggcatgctggagatagcgtcctctccgcctgtcggaggcactgccggccggagatcgcgtcgctccctctcatcacacacgtcggtcgccggtgacacatctacctgttgccgcgacgtccttgcctcgccggccacaacctctatc

SEQ ID NO: 41272 - DNA, 1235 bp, Oryza sativa
taaacggcagggcgggcagagtcgacatcaagacaacatcaccaacaccggcgtgcggaccgatgaggccgtgaatcgctgccggcgcccacttacacacatctacaccaccatcaccatcatgcatgggagaacgtgaagcgaagacagacgacgacgaccagcatagcttaatcggaggtatctcacgggtttaacccgcgagagtaattaaccgggtgtcttccgagaccctggaaaccaggagatcacaattgccaagtcagatccaccttgcttatggaccgtggagcgtttttgaccaaggattttgtataataaaatacatttttccttcgtccactttatttttttgtgtatttagtacactggcacgcccgcatatttttatttttacttccctgggtggaggaaaattttttttctctccaaacagaaagtttcaggcgagttatgaaattaggtaatgacggattaattagtctcaaactttcgcttcgcggtttataggtgagttatgatattagttttttcattcatgtacattgttggagaaacatgcgttgctgagaatcgaacccctttacctcacaatatttagcacctagagttctccaccaagctatcttgtctttgtgtgcaatggtagcttgtagattatgaatatttatacattgaacagagatcagcgccaaatgctttggcgctgacctcggatgacgtgtaaaatccgtggcacctcggatggtatctcattgccaatgatagtggcaccgagatgttatatctcagcgccaatctctatggcgctgagaaaacggcctatttggagattggcactgagaaaacggtctattttttaaatagttttggtacagttcaatctcaaaataagttttttaaaagagtcaaattgtcaaaattacggcaaaaactccttccggtatccggtcaaacgtccgatacgacaccaaaaatttttacttgaccaactaaacaggcccatactagaagacatatttggttgctttggccttgtttagtttataccaaacttctcccaaactcccaactttctatcacatcacatctaaactttcctactcacataaactcctaacttttctttcaaactaccaacttttcttaaactttttcccaatttcagaaactaaaacacaatctttgactggttgatatactacgcgtgggtgcgcgcatcatgaactactgta

SEQ ID NO: 41273 - DNA, 1674 bp, Oryza sativa
atagaaccataaccctctttatcaaccgcttcaatacccaatttctagcatattcacatcccacctggacttcatcatatgttcaaggtctttgttagtttccatcttccatccaccaccagtgcattatccaagccccacactgcaatttgttggctcacccccaaattatcttgcttgccatatcatcacgcaaattggcaagagaatagcccttgcatctatcaacccacaaatcaaacctttgttctgccatttctagcatctcatactctaggtctgctacgtacttagcgcccttaacaacaattctaaacgcattgccaggatcaatcctgacataaccaaaacttacaacaattttggagtcaggacagatctaattccaataacaaacacaagtaacaaataaaagttcatcaagcgaaaagacaactcatcagagggggcaaacaatcggcttcatcaccgccacagccaccaccaagtgatggctggccggcgctagggtttcccgccagttgcagccattgggggcgacgggcgtgagtaggctagatcagaggaacaatcgggcgggaggggtggcggaggcggcacgagcaagcgggaggggcggcgatgctagcaggcaggagtggcagcgacacgtttttggcttcgaacaacaagaaggaatactctctctgtccctgaattttgcaacctacgaccgatgtatcccagttcagattcgtagtattaggatacatcccatctaattctaggttactatattttgaatggagggaatactacattgatccaggaacaaaaatatcatttcaaatccttcctgttgacatggctttctaatcagagataaactctgatgttttgggtaaaaaaaaggggaagagtggtatctagatagtgccaatccgtaagagtggcaaatagttaaaaaccccgatccaaatggatcaagatcctctgacttcagtgaacatgtgatacattgttgggactttagcatgtcaatcaactttatactgagatgagccagtcaaaccatacaaaggtggcgatcaaatgtattacacatttaggataagtactagtccaaatgtggtgaccagatgtgtttccaacttatactcatataagactttccaggataagtatagtcccaaactttcatcttaagtaatgatacatagaagaaaaaacaacttaatccattctcacagtttaagttagtttcatttaatcgctacatacgctacaacactgtagcgttcttgtctgccgttcgcttgcaaggtcagaggagccgatcctattcatttattttcagaatttgccatccaatacgcactgccttcacgatatgccatctaattcgcactactttcagaatatgccactggatgcgaattttctgcgccacttcgtccgacgtcagttctcgtcgtcgtccctctgtctgccgccgcccgcatccccttccatctgcccgtgctggtgccggtgccgctgcgttcccattcgtccaccgtcactgctgcgaccccgtccgtccaccggcaccccctccccttcccccgggtccgtttgctggtgttgtccccgtcccgccgtccatcctctggcattgcccgtgaccccgttgtcacgcccggaatttctaaccaa

SEQ ID NO: 41274 - DNA, 516 bp, Oryza sativa
tcagattttgacaaatgagtctattgtctgaaacaacctaaactcagattctcccttctgtttttcctttttgaaatcactctgtatttcattttcttggtatatgcttagaatcaaggtaagaatcctcaaatcgcaaaactatacccttttcctgaagattaacaaacaagcactcatgaagcaggactcaccaagctgaaaaaagtctgataattttattgaataaatagggccttgaattgctttgtacaaattgaataggatttacataagaattgctttatacaaattgaataagattacataaatatgcatactatgaataaatcggaataaaaagattacactgattgcaatgccgatttgctaatgcaatcatcagtcctaaacaagactaccaatcatcagttctaatttaaagacaagactgcagactaacagttctagtaagttacatgcagactgacaatctgaaaccaacactctacactgacagactaaccgaagagaggc

SEQ ID NO: 41275 - DNA, 610 bp, Oryza sativa
tggtaggaccgcgaggcgggtgtctacagtggtgtcgccatcagtaggactgccatgtgagaatctaaacataattataacttaatgcatgtgtgagtcttgccttcccgggtgcgccagaactcctctcactgctaggaattgtgtacgcctagagtgcatgaggatgtaaagttcatggagcgggtactgccaatgcgaggttatcgaaaagctttgccgtgacgcatctcatgtgttgggacaaggctcatgtgttgggcagtcgcggagtgcgggtaaagtgtacatccactgcagtgtgaataaaccaaatctattcgaatagccgtgctcgcggttattgagcaccgggacatgtattacacttggctagactctaaattcttaacttgtgtgggatgggatattgcatgatgatttctatactgatggagccacttcctgagaggcgggaaggtggacgtcctcaaaaaaccatgacgactcaatggcaggaagctatccttgggatcacaatggatggtggatagaaccatcattgtttaatatgaacactggtactaaaatttgatcagtctgtgctaggtcttaggtttgtgaaaagaat

SEQ ID NO: 41276 - DNA, 673 bp, Oryza sativa
tacagtagttcatcactaattcaggactgggtaaattatgccatcctagttagcaaaatacccaagtgttacagcgagaccagaaattttggcctgtcatatcggatatatggacacacatttgaagtattaaacgtaattaataacaaaataaattaccgattccgttgaaattggcaaaacaaattaaaagcctcccatttccgttcgtaagcctcccaacttctttctttttggggggggggctccccggcttctttgcccaagggatgctgcccccgtttttttccttttttacgtgtgctcctcggggggtgcccctctaaccttgttttcaagcccaggaacacaagcgtcgttgtggaaaaaatagagaaaaaggcccttggaactgggtgatatggcaatggtacagggttttgggggctgttacatccaatcgaggctatacatatctgccaacttattacattcccgaggaccttagctaactcaaaaagaaataaaagccgaggttataatcttcttcgcttctaggacaagacaccccatcgctgcatattgtagattccctttcttcagggcttgaaccaccatcagtaaatcacacctagatggatattgccatacccccgagagatatcgcttatactgccttcaccgcggccaaaac

SEQ ID NO: 41277 - DNA, 1610 bp, Oryza sativa
gcctcacgccccgagccgccgcgccgccatcccgccgccccgcgcgcccacgcgccccgtcaccgctcgtcccgtcgccgtgcgcgttccatcgccgcctcgagcccgtgccacagtcgccgtcaccatcccatcaccgcgcgccgagcctcgcgccgccatcacgtcggcgcccgtcgcgtcaccgtcgtcgcatcaccgccctgagcccccgcgccgccgtcgtgtcaggccggccaccccttcccctctctttcttccccctctcccctataaatactccacaccccctctccatttcccccactccatctccctctttctcccctcttccctctccaccgagccaccgccttggtgccgccgcgccgccaccctcgcgccgctgcaccgccgccttcgtgccaccgcgccgtgcgccgtcatcgcaccgcccacgcaccgccgcaccgccgccttcgtgccgccgcgccgtgcgctgtcgtagcgccgtcgtcaccgccgccgccgtcgtcggtaagccgccgcctcctccccttgctcggtcgccgtcgccaaagagccgagagagagaggagggagaagaagccgggagggagagaaagagagaaaagaagaaagaaaggaaaaaggagagaaagaaagaaaagaaaaacggagagaaaagaaaggagggaaatgaaaagaaagaaaagaggagagaaaaagaaaagaaaaaataaataaataaatagaaattagagggagattagggaagtgagaaaatttaaaataattagaatttaattatagatcaattatagtcgtagaattgcaaaaatttaatataattatagattattttggtaatctctataggtgatcaattcattcacggtaggtactcggatttaattaataggaattttagacgtatattatatttaatcgtttagtcatagactaaattaaatcgtataatattataagataatttttggattccggccgatatttagctcgcgatagaaatttctaacaaattatatgaatataatactcgggtagattaaattaaaaactcatgataacaaaatatttatacccgcaaaaatagtttaggatgtataaatcgaaattgggtttgccctagttcgcgaatagtaaagttaatataaaagaatcgactttcgcattcgacttccatttggatttatttggatttttatttgaattctaaccgaattcaaatcaattttcacacgtaactatagagcccgagggagttgcggatccaagtgaaggccaagacacgcaagactttgagcaaggcaagtcatcactattcctttaacttgttgatcccaattgcgaaattattttgtttgcaaataaaattgcatgcaatgataaacatcctacttgtgattatgctatgccttgattattgtttacccttaaaatccttgtaaccatgtttacgtatgagtccctagtcaattatgacaattgcttagaaatgctattctagaatcatgcatattcatatttatcaaatgctaaatgtttgggcaattacctttgggaaggtaattgagatgcggcatgtggagacatgagcgccacattgc

SEQ ID NO: 41278 - DNA, 1005 bp, Oryza sativa
taccctaggaaaacttctatgcagtgggaaattatatttttagtttatcagtcgttaggtggacagtggttaatgttctacgtgagcaactcttttactatgtgggatctatactattatccttagttcattttgtattctcaccgataaaatatgagtattcagttattcactgaaattctggaaatacctttaaaggtttcctcctgtgtttggaaaagaaagcagcagacgttcatgtcatcagtgttgaaaaaaatataaattatttaaaaatgattacattgcttgaagaagattaagggtaaggcctgttgtgtactgaaattacagacttaaagagtgaaatgcggctctgctgactgtatttgtttaatttacatggctgcagaatgtgctgtgagcactccaactgagctgtgaccatgtatctgaggcagctgtgattcaactttgctatattaatatgtatatagttatatagttttgtgtttggccaatgtgtcctatttcacttctggactggatgcgttctgcatcacccatgtatatatagtattgtttaggcccatattatctgtcagtgacacaaccaagaagtacgtatagaaactgactagtcaattgtccatgtcctgattttcagtcttagtttctacatacccaatgcaacacagaattagatgaactgtttgtactatgctactatagtactatgccatgcctattaaacaacgataatgtgattactgaaaaacgaatagtctatctaggatatgttactgcactatttattcgctccacatttatttcatgatttttacactagattcattttttttaacttagagagctttctttaagtgcatgacaaagcttgctttcagggtcctgtttctggttttcggggtatattgagaacattcatttcagcatttgtggcttcatatgagatctcttatcaggtaaattgtggttcttcatagtgtgcatttaaattgaatt

SEQ ID NO: 41279 - DNA, 528 bp, Oryza sativa
catatggtagaaaaggagtatcctttccagatatcagaattgattcgcttcttatcagccgtttgccatgggagttggcctgctcaatgtgtgtatgtattaattcattctgctcctctttcaccgtaatacatcgacctgtaatttcctagctctggtgttccattgctgatatggctttggctactctgccaggcttaaaagctctaatattttttgtgcccttttctttttcttctttttttgggagccctactgatgttcatgtttatagttaatctcaatagtgctaattggagtttgtttgtttttcttcttttgtcaatgtcacactctgatcgctgacaaacaagaaaagtagaaaactggatttctctagtggatttgcttttttgagaaaaaaaataccatcgtattatctcaaatttagtattatagtaaatgatcacctttcaatttcaatatattgttattttccaattccagtgttctgaattgtggatagtgctcctgttgcatgtatgcttt

SEQ ID NO: 41280 - DNA, 2611 bp, Oryza sativa
ggaccaaggttgcaaggggtaagattaatgttttattttattactcctagttaacagttctgctaaatagtgccaccattttattttttcctttcgagtaaattacgtctacggtacataaaggaggtgggtgcgatctagcgcaaaaacttgagaaagagcatataagtgcaataacttggctagtgcgtgcattttggacttttggttaaaaggtctatattctacaccatactttttacgccatataaaaaaagccgccactcaaaccatctcgaaaaggatctacaagtattatatgttgctttcaattggtaagttataataataaaataatctgtcaatttaaaaccgaaagatatatgattatcaaaagtaaatgcatgactaatcaacatattcattatcgcgggttatgaacatggtgaaacacgaaaataaatccatgagccagcggtctagcaaagcttataataccaggattaatcaaaggtatgtattaaaactgcttaaaaaaaggtacgtattagtgttttggcctaaaatgcacatgattgtcaagtttatgtaccagtctactcattattcaagtccttacactaaatcgcactcacctaccaagtttttataccatgggtgcaatttactctgacctttcgctgtgtgtgcaccaaccctgttggtgtttaaattcattaactaaattttttttaccaggtttgatttgatcttttcgctatttgatttaggcgcaaaaaaagggaaaaacgtattgtgtattttagtaagcgtctatatatacacggccgtgtgttgcaagtttcacaagttgcataattttgtgtgtgtgtgtgatatataggatttgaacgggaacatgttcttcaagtagcgtccttaccatctcgcctataaagaactttgtgcatgtgggagagaagcttattcttttgacttcgcccctctaaaacttgtaatatataaattgcactataaatgatatcaaaaggaaaatttatcaaccacaaacttgtagatcacatcgagctctacaatttcgatatagagcacagctccatctgagttcatttaaaaacataaaagtttgtttattcaacaatagatttgagattttgtaacgaatatcaggacccgtaaaaagtctcgaatgaaaaaacattcaactatatagttgtagagctctccaattttcataaaaagattttcatcatacgacttcatatatatcaagatactactcctttcctattgtagtagtgctattatttttaagggtggtattttcaagagaaccgcctcaaaaattaatttttgcgtgcctttccatatgagaatcgccaaaaatgacatttctgtaggaagcccatctgaaaaaacttgttattctttgaaaatgtctaaactttaaagatttatagaaagttcattttaagttcaaatgaggtgaaccaaagttatatatgacccttacaatatttttgtatttatatttcagttagtataattgtttacttatcatttacctctaaatgagttggtatgttatctaacgtgacattagtgaataaccattctaaaataaatgttctaagaaaaatattaactaagttttactataagaagtactagaacgatctcggagaactttagtttacctcaataggacttaaaatgaattatctataaatttcttaaattttgattttttaaagaactgcttatagaaaaatagatactagagcttataaagatatttactacaaagttgtagatctagttaagttctacaattttaatatagaatgtctttatccaagatcgtttgaaatactcaaaagttcattttcaaaaatagatctgagagtttgtaacgcatatatatatttagacatcgatctaaacgtattatctaaaatgatgaaaaaaaactttcaatgtagatttcgtgaagagcgacaaattttataggcggtttcctaagaatttgccagttaaaaaataggatttcatacgtggtttataatcctggacagctaagccatcttcacacaggtgattttcattttgagttgcctgtcaagagaaaagaaaaagaagcctaagcctacgatttttttttactagtgacagttgatctaacgactaatatatatgatcctttttatatgcacagacatcaacgagtgtgatgtgtccaacaagaagaaatatccctgctacggcgtctgcaacaacatcccaggggattatgagtgccactgccgtgtaggataccagtggagtggtgaaggccccaagaaacaagagtgcagcgcaaaattccctcttgcagcaaggcttgcccttggtacatatgcacctcagcatttttttaaaaaaatataaaataatatactatatatatgtcacattgagtttacaccaattcaatgatttcccatcgactatgtttttaattgtttctacaatataccattcaaccaaacaaagaatttcttataatgcctaaaaatataagggttgacagttaattgacaaaactaaaaaaaaaaatcaacaattttaaaaaattagcctcctagcacatgat

SEQ ID NO: 41281 - DNA, 1087 bp, Oryza sativa
  unsure (1)..(1087): unsure at all n locations
atttatgcaaatataaaaaaacgaagagttgtaattaaagtaatttggataataaagtaagtcacaaataaaacaaataataattctaatttttttaataagacgatggtcaaacagtgcaagaaaaatgttaaaatcacttatattaggggggagaagtntacttttgtccacagctactagtataataacacattttttttagataatggaatataacatcccagccagtataataacacatgaatagtactttataagtggcttatgttttttaatttttctaaaaaaattaaataagacggataattaaagttgaacacggaaactccagattacatttaaatagtacttctgtccacagctactagtataataacacatgaatagtactttataagtgacccatgtttttcaatttttttaaaaaattaaataagacaaatgattaaagttgaatacggagactcaagattacatttaaaatggtacggagggaataactttgccgttaaaaatctaaaaagtttgaccatgttatctgcatgtggagaggagtgacacggggtcacgggccagccgcaactgtcgggttcaaaagatgcgttcgcaagaaagcaaacagattagagtggtggccccgcatgcagtggtaacaactgatcgaaaccacggcatcccgttcaagtagctggtttagctccacggacgcatgcctattctagtgctccactgccactatctttagtagcgccgtgtcgggctcccatatataacgtccctcgccgtctccatttggatttcagcgatcgatctcgaccgcaccggccccgcatgcctgcccactgcccaaataaagcgtcgtcgatcgaccgcgcgcgatcatggcgatggtcgtcgcggggagccatcggccgccgccgccgccgcagtcgctgcggctggtcccgccaccgccgccgcagcctcctcctcctcctctgacgtacaggcaccactgcaaggtgtgcaagaaggggttcatgtgcggtcgcgcgctcggcggccacatgagggcgcacggcatcggcgacgacaacgacacgat

SEQ ID NO: 41282 - DNA, 850 bp, Oryza sativa
caaagtgcggagtgcccacttcacttgcacggtttgacctcattttgccccgtttttaggactaaccgtgaaggcaaagctgaatagcctgccaccactacgccaccacatactctcaccagttgctgatgaaatgtctttaggactaatcgtgcatgtagtacactttccggctttccgctccctgccgcctatctcggattctcggtgtgcatgccactggtgagtatacggattactataaggaatgaacacccattagctgcggaattctgtgtcaagggaccgattgccactagctatattttgactgacaaaattctaggagtagtacttgcctacggcctacctatggaccgtcagtgtcacttggccaacatcaaacgctctaggcaccggagggaggaaactcaatagtccagcctaaaccatgcatagatgcagacggctgatgtcaactgtaaattaagcatgctgagatgagctgatttaagcccagccgtttggtactctaagggattttgagtttttatttgcacagtttgaccactcatcttattaaaaaaatttagaattattatttttttgacttaatttattatttaaagtactttaagcacaacttttcgttttttatatttgcataatttttttaaataaaatgagtggtcaaagagtgtaagaaaaacttaaaatcccttatattatgggatgaagggagtagtatattagtgttggtgtgtgacctaactgatattcactgcacaccacagtcacatgaccaaacatacacggggatttgatgcaacagtaaaaggtctgtaaatgaaaaagcaaatccaggacctaa

SEQ ID NO: 41283 - DNA, 978 bp, Oryza sativa
agtactccaacttatggacttctagctattccaaaagtttttgatttctgcattgaagtatagcaaaaccaagccgtcaacaaaaaagaatagtgtgaaatctacaagttcaacagcatattgaaaggaagtaatgcgacttaagtacacaaaaggcacaaaagaaacatcaagatgagccctatgaagctagatacttcatttgtttaaaggagagcaaaattcaagtatacaacgcggaaccggtgttctcgtgcatttctctggagagaagcaggccttgtgggccatctctaaaacgctggttcgaggtagtccgcgtatgatcctacctctaactcgaaaaggctcgagatgccctctagagagtgtcgcgttaatgcaactttaccatactgctggaattaagggcaaacagtgcatgagcaggagacttactgtttattgcgtgcagagaacactagaatatcagtatggcaaagtattgtcaagggtattaatatgccctttggcagttgacacatttcactaataccctttagcaagaataaaagtgcatttaatgatcaggcatctcttttgcaaatctatgatgtagtttgagcatcctttggcaggctagtgaaaagtaacaaaataactctccatttgaaagagtgcagcaatcatacaagccgaaaactgcatgattgctaggaaaaaagtacagtttattttgctgtgtcataaacaagagtgatctggtaacctcagtaaatggcggcaatatggcatttggcatatcacaattgttctctcccaagttccggtctattctctttataaatggaagtgagtataaattagtttatacttatatgaaaaacatcaatactctttagtcagcttattagcagcagaaggtgagttgtggcataacagatcatacttgattcaccataattttccctagcagaaataatgaacatgtctttcgaa

SEQ ID NO: 41284 - DNA, 876 bp, Oryza sativa
acaaatgaaaatagttaaaaatgaacctattacaagacggagggagtaaatgtgtggtatagttgatttaatttcagctgcaatattgggtcaacaagtactcactaatgagtaacccgtgtccattccttatactcattggatcgtatagcatgcatatcgaccagcatgtaaataaagaacggataattggtgcactacagcatttgccaacggacaagccgcctaataagcaaaggctgcaagcgccctatcgatggtgcacatacacgtacgagcaaatgcacgccacgcacagcttaactttcctccttttcttttgcaccataggcgcctcctgcctctatctctaaaccagactgacatgactagctagcaagcacgcacgcacgccatatgatagagggtaatactaatcctttgcacgtttgtgtgcatgaggtactagtactgtaagaaaagaatgcgttacccaacccaccactgcaccagtattaaagtctactgagaggcagctgctagtttctgatgggagcgacactatactacacgtagagacaaggtgaataaaggatgatgcataatgacgaggatcaaaggcattcaaagattagattccttgtgattgtgcggacgatggttagggctcaaaaatggcccacaaaagagagcacctagcaaatgagcagatgagatagagggagggaatgaagcgaggagtactgaaacttcaatagttgagcacgtactcgagtggtatgaaagctcagcaccgcgtccactcctttaactgcaatactgtgtatacttctactttacttgctgcattatacggccgggtggtaataagagcacggccagaaaatctacacaact

SEQ ID NO: 41285 - DNA, 709 bp, Oryza sativa
catatatgatattatataagagaaaatataatgatgctagctgtgcaatctgcgcgggccaccatgctagttttacttgtttccgttaacatgttttcaaactactaaacgatatatttcgtatgaaacttatgtgtaaggtaactttcaaacatcagataaatctttcttaaaaatttaaaataattaaaactcaattaatcatgtgctaataacactctcgttttatatgtcgtgcttaatcttatctttagcggatgcaggctaacgggaccatatatagagacaccgacgtgcaatcccaaggcgcaacgggcacagattgtgactggatggatgacaattaagcgcaggaactgcctacaggaaccgtgcgcaaacatttggccatgagtaattttacggtttactattttttctgttataaatttaatagtaactcttagtatctacatactgtaatggtacctttaaaaaaccgtagaattgctctttggccattgcgcagccgtaaattcatttcatcagcgcggacttcaagaaataggccgtgtaccggccagactaattaatgctcagcgtgctgtggtgcagaggtccagagtttggtcttcggtgtgtgataaccgtcatgtaggcctcattttgatgggcctcaatttccaacccatctacgtgttcagactacagaggtagcaagcagcatacg

SEQ ID NO: 41286 - DNA, 912 bp, Oryza sativa
aagctagaaggtgtaacatcgtggggtaacgaatgcactgcgttgtgtccaccgctgcagcgaataaccggcgacggcgatgccaagcgcaagcggcgcggatcaaaatccggcggaagatgatgccacggcacctgtagacgatacggaagaaattctccaacatgtaagcaaggcaagaataagagatatcttttcacttatgcttaagtttattagccaaaaattaaatttaatttttaggatttcttttcatcgtagtctttatttttagattgttaagaatacgtatatacaagttttattcacatatttttttttttcatttacaaatatatgttgtttgcgctgacggctcgccgagccagtggtggatccagaaaattgattcgttggtgtcataacgtatctactggtgtcatagtatgctaattatgcttaaatcatagtgctataatatatggataagcaatttaactatacgttttgccaaaattcgtcggtgtcgcttgacaccggccgttacactgtagacccgcccctggccgagccgccgatgatgctatcgacctcgcaaatgtgtgataaattgacgatcaatgcaggtgaaggacgtgattgcgaggtgcctggaagcacggctgtccaagggacaaatgttccgacaatttcgcaggagcaagatcgatccggtaatctactacgctggtaggatgaacgttcacatctgcaaaatcgatcgagctagttgagataaactaaattcagttcatcctgaccgtgcgcacatgtatgtatgaaactatgaatgtagtgtacaaggagttacgttcgcaaaacgaggagttcttcgagctgttcatgttgaaagtgtcgctgaaaaggcagatcgaccgggtcaatcatcacctg

SEQ ID NO: 41287 - DNA, 706 bp, Oryza sativa
tcaaaagtgccacgactgatggctcccgtcacctcccataattttacagttcaattttccaagcataatgccgcattgagaattcaaatgctgaattgagacaacatccaagacactgtgagtcaaggataattcaaacatcaaacagatgacatattcggccaaactatggttcagtcaccactggagtgtccttgactcctgaacctcgtaactactaaggttcagctttgcacacatcacattgacatttcacaacagtataaaaagaaaaatacatcgaaacaacatagcaacaattgagtacttgtaaattgcatctcatttatcattattatcacaggaaagacacccagaattgtaactaagaaatacagctcgggcttttgcattatgtccttgattgtttttaacaaatgatatcaaggggcattatctcaaaaactttgaaaggtccaacagaaccacagttctaggaggggtaaaatcaggcaacacagaaaccaatttagttcactctacaaaatcaattgtctgatagcacgacatgagcaggtcttccagcatttatcaccttgggacagactgacccatctctatataaacacaaataaagcatacatcagaactttgaatatctcaattgcttcattataactttataagtgtggaagcatacagcattgatgtttatccctgacactac

SEQ ID NO: 41288 - DNA, 701 bp, Oryza sativa
ttcctcgcgcgctccgcgactaacgtttgcttcctctctagaaatcaaggggagggcaccgccaccggaagagggcaagaagaacggcgagaagatggcggccgccgccgcgatcccgatcccgatcccctgcgtcgcggagcccaccgcggcgtcccgcgtctcgccgggctcgtcccccgcccgctccgacgcctccgagggcgccgcgttctacgccgccgacaccgaggccgagccggaggcgtccgtcgggaggagcacgcagatgctgctcgcgatggccgccatgggcggccgcggggggccctacggccgccgcccggcgtcttcctacggcagctgcgccgcgtggagcgccgggtcgctcaccgaccaccgccccgcctcgccgtccccaatctgcagccccgtgagcagcaatggaggggagggctgccgcgacggtgatgacgcctcctcgttcgtcacgccacggctggttagtttccgtgttctttttccagggggaggcgcagtcctgaaggttcttgatttttttgctgcctttggtcttaatttcccattcttgcgtagcttgtaactattgaattgtggaaaacttcgccgacttcttgcgttagttctttggaggaaggtggtttcttggatgaggttgttcagtttcttgcatggtttacaggaacaaacgcctccagttt

SEQ ID NO: 41289 - DNA, 4706 bp, Oryza sativa
ttcgatcgatccgggcccctccacttcgtcccatcccaaagcgcgaacaatcacggcagttgtaattaaccttgttccggcacagacagagagagccagtcacttcctttctctctgcagccgcacggaaacaaaaacacaacggataattcgatctgcggcgtgtgcgagaaacgcacgaaagatgggggtgtagtacgctgaggcgtacgttgacgcggacggccatgcgtggcgccacgccccgcaccggccgggacacggacatgcaggcagcgtcgcagcgaggacagcggggtggttgcgcgcataaatatggccgggccgcgcggacagtgagacgacgggcgacgccgcgcgcgggggggataaggcgagatcccatcgcccaatcgatcgatcggtgaagccaacgcccctgtactcgcgaccctgatctccctccgtctccgcccatgtcgtaacgcattcgtcatttcgtcttgggcttgtttttagggatgcttcagctttataccagctcgagttttttttcccaaaattaaaagaatttttagatatatttgtgtgttcttagaattttaaactctttcaaacagaagcttggactcgtggtgcgtagctgtgtgactgtgttgatacatgcgcacgagcaagggcatggaggtgatgcggtgatgctgctactactgttctgggggaacggagggatgggagtcgttatttttcttcaaagggacctcgttttcatgtgatacgtactatacgcgcgcgcgtgcctactcttctggggggaacggagggatgggagtcaagatgggttgcttgtggtcatccgtgttaccggtagtgggaagttgggatccttgtttcaggggttaactccggtgagcccgttgtttgtttctccttgagaatgaagcttctaaaccgcgtgctttaattcgtgattttcattgtcatggctgattaggtacgattttcctgatttgaagtaaagccttgaatacacatcttatccatcatcatcatacacatcggtacggccttaaatacatgttttcgtgaggaatcatgaaaaccacccgtttgatttccacttttttttgttactctcaacaatttctttcatttttagtttgttactgatttccaattatcgttctatatttatttctctctcttcacatgtttatcttttcagcaaaaaagcaagtttgtttttttttcccaaagcagcccactccctacgtgatagccattcgccaaatccatcctacccataagcggcatccgtaatctcacttcgtgacaagaccatttgtacgtaaagttggcaaatttttaattgaattggctctgctgttcacacaaatcacaaccagtaataggcagctgtctgatccccattaccaggacaccccaaattatagatgaaaaaagcgtcttttttctgggtaattaattaggactgttagtaagatggacgtccaacaatccacatgtggatcacacccggagatgaagtgagttgtacacccgtacccttggcaccttcgccagcaccagagggttcaggtcactatcagccattaaacaaagcttttcttttcagtaagcttgaaagacacaataatgaacttgtctaccaacataacgtgttaggagtaatttgcttcacttctggcgatagcacaagaaatgtggagtatggcttccttggccaattttttttaaagtatacgcacacacatttaaagtattaaacatagattaataataaaataaattatagattccgcctgtaaactagaggcgaatttattaagcctaatttattcatcattagtaaatgcttattgtagcatcacattgtcaaatcatgacgtaattaggctcaaaagattcatctcataatttacatgcaaactgtgcaattggttttttttcgtccacgtttaatactttatatatgggtccaaacattcgatatgacgtttttggcaagaaaaaatattaaatctaaacacggcgtatggccttaataaatttaatcatccccacgacagttcatttaaagctttgtaaattgggtaaattacactttataccgggtaatgtgccttgttacctttttatcacatatatttcacttcacactagagtgtattgatttaactttcacttaacaccaggatacataatcatcacacacacacacacacacacacacacacacacacacacacacacacacacacacacacacacacacatatatatatatatatatatatatatatatatatatatatatgaaagggctttatgatatttcattattttaataaatccctttcaaatattgtctaaattcaaaagggttttgaaagttttacacatattttacaatattttcccttcaattatatgatacaacacctagtgtgaggtacaatttatttcaatgtaaaaatatgtattaaatccggtgcaaagcaaaccaaggttcactctatccagtgcaatatgcaatttacttaaaaaaaacctaccaatgcgtttcatatatcgtgttaaaataaataaattgataaagctaccttaacaaagctttggataaaatattttaaatgcccataagaaatctatggtttgatttaaattctactcatgcaccctactaccattagtggtagaaggtactgaagagtgttggtcaatttgaaagataactgtaaaagtgccaaaatagcttacagtatctcgaaattgaaactccaacaatttgaattgcgttgaattatctacttacacaattagtctggtttgtagaatattttttcttcacctggttttgtagaatttctagtgttgtgtagtacttctacaagaaaacacgatgcttgttctacgtagctccacctaccatgtgggcctcatggggccgggaacaatggtacgactcatatatgggctacaagtaacaaaggtctgcccaaacgtctttttgtagagaccctctttttagaacaataattttttctagagactagaggtgttatttgcacccgttgcaccggggccaaacatatgcgtggtgtacaactggacatctctcctaggcctccgagaagcatagccggtggcttgaggtgctgagctgagtctgaatagaatcactttcatttctttcattcttttcacgagatcacgattaaatccttcagcagccagcctagtagggtatgggtagacagaccagccgtacctccgtttgctagctgcagccgaggggtgagagaccaaggaatggccaaaagtgctcgtcatataatgtgtggcagatcgtatcgcaccattttatgatgagacggagtaggtgaccttcaataagtagctgcgcaacattacattttttttatgttttcgttcttttaaaaaaaacttatttatattatgtcgtgacattaggtcacgaataagtttggagataaacaggaaagtttcttttctcgcctatccaaagaaatgagctcaaatacaaaatacagaactttgatggctaatgtttctctagtagtattaaattatgtcttgtcttgctacatgcttttgatcggctatataccccacaatcgtacatgtgagattacaactttgcccccatgggcccttgtgagttaaaattatactcttgccatgtcagcaaccctagatgtattatggtacattgtagaggtcattatggtcttttggcactagctggcatgagtgtttgaaaactggtctctatggaatcttcttttggcatctttcttggttgagtagctttttctctcgagtcattaagttgagtcgtcttttccatctttgttcatatttttcaacatgagtcgttttttcatcttgggtcgtctttccatcttgagatttcaaacactccttctcacttatatggctctcggaatttactttttactggttagaaacacactcaaacgggacgagttgcttcaatagcataaaaccactcgaatagaactttccactcgatagtactttaccgttcgagtagtattatactgctctcaccgctaaaatagtattttaccatttgaacacttgaaaatctcaagaccttcttctctttagtgttttggctgaacagaaaggatggtgttagtcccctgcaagtacatattatataaatagatccctataaaaacttattataagatgagatcattttcttgaagtcaatgaccctagtattgaggttcaatgtcctagtgccaacaccctcacccctagaagccgagatgtaaaggagttggagacaaagatgttaacgtcgatgacctatttatattttttaaagaaaggttgaaatataacctttttatcacaaataagtcctcaaaggcaaagagactatcacatggtgtctatttataagaaaaaaaattagaatatctattattatattaaaggaatagaaaaatgagccaccacgttcactcttatggactagaaattctcacattaatcggagaaaaagaaaaggcagagtccatatagaaatacaatttaaaaatagcagaaattcggaataaaaaaaggaatattataagaggaaactaaagtccatatagaaatacaagtagaaaataatagaaattcggaattaaaaataaggaatatta

SEQ ID NO: 41290 - DNA, 1092 bp, Oryza sativa
agggtgacaaataagtaagaggtagcgataggtgtgattttcaaaaatataaaactagaaacatggagataataaggttaggttgatcaaattcctaagataataatatagctatttaacttttttttaaaaaaataattttgtatggaagctagccgcgcaattgcgcggtcacccagctagttatattattaaaagaatagaaaaaggagctcccacgttcgctctcatggcctaaaaattctcacattaatcagagaaaaaaaaagcagagtcaatatagaaatacaatttagaagtaactgaaattcgaaattaaaaattaaagaatattgaaagaagagtttagagtccatatagaaatacaattagaaataataaaaattcagaaataaaaataaataatattggaagaagagcctagagtctatatagaaatcctagagtctatatagaaatacaatttacagaaaattcggaattaaaaaaagaaaatattgaaagacaagtctagtccatataggaatatatataatttacaaataactaaaatttgatattaaaaataattaataactaacacgtatataaaatacaatatgaatattatacatttttattttcgtaaagttattgcaaaatttaaaattatgatgtcattttaatatatttgaataatataatgagaaaacatatatgctattatatgagagaaaatataatgatgctagccgcgcaatctgcgtgggctaccatgctaattatttttttaaaaaaatacaaataggtcgtcaatgctgacccccttcacatggtgtcggtattagtgagattggtgcggagacattaaacgtcagcaccgataaccttggcaccaagaaaaagagtaaatttccaaaaaaaaaaagttttttaaggtttatttgcaaaataaattttaaagaaggatcacaatgtaaaaatctagctgcgctgcacatgtgcaccttcagatacggcccggttgcggtccggtgtggtactggtacggtccaccgagccgtccgcttgcggtgcggtgaatacagataaaactccgtactgaacccgaag

SEQ ID NO: 41291 - DNA, 2622 bp, Oryza sativa
  unsure (1)..(2622): unsure at all n locations
attgatcatatgtgtttgctattttactctaagtctcttgtttgccgaaacaaactttggtcgttgatagttttttttatggaaattgtattttaagtgacgatggacgtcttaaaacttaactagcttcgctcatgagggaatctcctctcaattttcactcattataagtgagaatcacctataagcatttgatatccctaaagaaaaggtatgctccctctctttcaatataaatgcaacttagcatagacatgacatatctcagaaatacgaatctagacagtattgggacaaagggaggaggagggagtattgtctataagcatgcggacatgggctttgagcctttgaacaagggacaaatttctgatatcaaaatgcattatatgtacacaccaataaaggatggtgtttggaattttcctctatatccagagcaggtgccatattggaataagccaaatcccccttgcaaaaaaaaggactaacctaaaatccatgtatctcgtgcgtggaaaatagattcctagatgccaaaaccattctctattattaaaccccccacaacaatcaaaacaccaaacgggaatcatgatcaacttgcgaggtcaacacacccaatgatccatctcaggaaaataaagaatttagagcaaaaaaacaaagaaagcgtcggcagaggcagcagctttatcacaaatatgcatgtactacgtatatcagctatcttatcgccattcgccaataataatctcgttcgttattcccgtatttcccctcgttgttttctcggggaaacaggcgtcgtgcgcgcgtgggacgtgggcgccatctgcagcacccacccaccagcaggaagtcgtccaccggcgtggaacgctccaggtttcggctgggcgacgcacgccgcggagccaaaaaaaccaacgcgcgcgccgcgcgcctgctggggagtacggcggcaaggcgtgagaccacgcgcggggcgatgagaactttcggcccgggtttcggctgccgcgcgcggcgacgaacgggcgagtttagccggtagagcctgacccctgtcggtggacggtggtgaggcaccgggtacacgtgccggcgccagcgccaagatcggcggggagctactacccctgattattcctcgattcacggcttggacatgggctttgtcaaccgtcaacaagtgatgactcatgatcactggccttttttgagcttctagtaaattaaaaaggctcactgaggcgtgcgtaacagcgacagtgcaccgtgatttatagctttggctactgtggacgcgtgtgatttagatagaccgacttgcggcgatgtttggatcccatgtgcaattggtccggcattcgtattaagaacttcagtacagtagtaagttcagtagcgtctaggaatgcgagcaccatagcgcttcactttctgccaaaaacacactactccagattttagggagaaacgatcagataatatatgccgatggacgtcggtggccgggttcgagtccggngccgattaaatcaactgcaactaacgtgcttccgagtcagagattacggacggaggagaagtactactaatcagcgtgctccgacacgatcgaactgaagaaaagaagagagaacgcagaggagccccatgtgccactggttaaacaagcaggcgcccctacatacacgtgtctcggatcggacaccaactgacaaccccacggctagctccacgaggcacacgatcctgcccgtctactcgtcagagactagtaacgtgggccccacgccaacggtcaactaattaacggccggttcggttttctttactgtgtttgccacttgctcctgcgtgtgttcctcccttattttagcagaaagatcacctgctccagtaggataaaaagaagaggttcgattagaccctagacaggcatgattgatgattccaaccttgtttgccaataaaaaaactgcgtgattgcataaaagctagtagccaatttaatttcttggataaattgaacagtttagtttgtttaaaaccattgaaaaaaaatcaataattcctagtttcggtcactatgtgtttccaaatatcaaaagatagagatagccatttaggacgatgctagaaaaattgatagcctaagaacaaatcaatgtattttagttagacataattttctctctcacaaaatattcatataattttaaaggatttgaaggggatttttggagtcagcctaggactaagccctaatttccctagcttgtagctccacccttagagatcaccaaggaagatgtcgttgccttttcacatcctgcatttcagtgtcctcgctagtgttgaagtaaagaagacatggttttcatgttgctaagggctgatttagtttgaagacaaaacttgccataccaaaatattggcattttaaacgtaattttgttaatgtttagtttgctacgaatacttgtcaataccacacaaatgttgccaaaatattggcattggcaaaaaacttccacatgatttggcattgccaatagtttggtatggttgcaaactaaacaagccctaaatctctatcagtgtctaccgtat

SEQ ID NO: 41292 - DNA, 738 bp, Oryza sativa
gggaaattaagcaacgaatctagaccatcccttgtatgctggatggttagatgatggatactgctaaagttacatgatccgaatccatctacccctggcttctcatttcacacggcaaatgaaaacagtatatattattgtcctgtgcgtgcagcgtgcgtacgtgtctcactcttgttggtgtttatttaccggcgtccgtcgccctggtcccgacgtagtacgtggtgttatgttaacaggcggccgaatgtcgggggtgattcgtcccctaacctgccactgacaaacaacatggcagtagaatcgcagcaggtacactggtactggttacagcaacagttttttttttaacaaggctttccagtttccacatgcgtgtgtaacttctttgtaacatccagtgtgagtgccggcgcgtctttacatacatatacatacattatacatgcacatacgtacatatacgtgtcgtgaatgggcaggatctcttagggtgtgtttgaggagaagggaattgaggagattggggagttacgcaaaatgatgtgagccattagctcatgattaattgagtattaactattttaaattttaaaaatggattaatataataaagcaattttcatataaaattttttttataaaaatgcaccgtttagtagtttaaaaatcgtgcacgcggaaaacgagaatcaatctcccctatctcccgagacgaacagagccttaatttac

SEQ ID NO: 41293 - DNA, 1042 bp, Oryza sativa
cacattaattagagaaaaaaagaaatatctacaccgttagatcgtagtgggtccagattataatggtgcagattgatcaatgaatatatggaaagaatcatacagcaaattgatttttcgtatccgtgttgttgtactaattcgtatccgattaaccatcgaagaaaaaaaaaggacatgcactgccatatatatatatgcatgcctaaatagctagcctagcactcctggagaaaatatggatggcgtcccggagagaaagcacaccaaatgtcatgcatttttttcaatagattgatgactagcacggcaaattggaagggagtacctgtcgtcatatttttcatcaaataatagtaagcatgtatttacgttataagtccctaaaattatatatgtaattttaacgtatttagactataagtctcaaaattattacatatgtaaatcccaaacttatatatgcaagtgatgtaagtctcaaaattataaattattggcgactaagatatagggttttcgaagattaattggtaatcctaattagcaaataacgtaaaaagtatagaagaaattagaaaaaaaaaagagcggagtgatagacacgtcatgatgaatcccaaaatttgatctcaatacgaattcgtagaattcgacaaagttcaggtaggaatacaatttagaaattactgaaatttagaattaaaaataaagaatattagaagcagtgtccatctagaacacaacaaaatattttttaaaaattaaaatttaaaataaaatacaactccaaattggtttttaatatgaattcgaaagagttcaagtagtatctatttatcatattattgaattttaatattactaaaaaatatttgttagatgatatcatgttaaaattatagtggttaaatttaacacaaaaatcaaatagaatcccagtaatgattaagagaaggaatgatgggcaagctgttaagcagcacaatcacagtggttggcaagagttttagaaagtaaaaggtaaaccaaaatcataatc

SEQ ID NO: 41294 - DNA, 712 bp, Oryza sativa
atttcgatagatctttcatatttcttagttgtaggaatagagttgttattacttctcttgttgtatatataggccccgttcgtttcctctgaaaagaatggataaagttttggattttcgtggcacgtttttcaaactgctaaacggtgcgtttcgtgcgaaaattttctatatgaaagttgttctaaaatatcatattaatttattttcaagtttgtaataattaaaactcaattaatcacacgttattactacctcgttttgcgtgaaacacttgtttaggagattcaaacaccatcataatctatcatagtggaaaaagtaaaaaaaaataatcaaagtttgtaacgactaaatacgaacaggagcaattgaaacgagctactgcaactgccgccttttctgtaagaataccgcaactgctgtcgtcttccgtttagcaacaaccgttttaattcaaatttacctttttccgagaacagctcgaaagcacatagcgtatcggcggttgcttgatactcacaaagtcacaagtacagccacatttcggctacagaatctgatccaaaggcagatacagagcgtatgcacgtatgcgtgcatgtggcttggggtcgcctcaactactaagaaatcgaaaggtgtggatgattagagctctctccattattacaggattagctatttcatccactaattaattgctcttatt

SEQ ID NO: 41295 - DNA, 590 bp, Oryza sativa
attaaatcttcaaaacaagaccatagatggatatattccgacgaaaaaaaattaacttattattgattttttttaaatgttgctcgatgtttcaccaagtatatcggaattgtctcactaagtagatcgaaaatatttcactcgtttaaatcgggtgttgtttcaccttatataaaaacaatgttttagcaaataacgactatacatagtaaaacattatgactacactaggtgaaacatttttcggtggaacaaaaaataaaccaaattcccttaatagggggtttctaaaatatgtgggtttttttgttgtaatggaatatttcgctcactgcaacattagatctatacatagtgaaacattgtgagtacactaggtgaaacatttttgatggaacaaaaaataaaccaaatttccttaatagagagtttccaaaatatgtggttttttgttgcaaaaaagtattttaatttattgcaacattagatctataaatagtgaaacattgtaaatacactaggtgaaacatctttttatggaaaaagggggaagaagtaggtggacccacgtgggggaggggcgcgtgcgg

SEQ ID NO: 41296 - DNA, 677 bp, Oryza sativa
gctatcacctgaacaaatccgttgtcgcccacaattccacgtacgtacgccgtgctagcttttccatgtagtacgatagacctcgccaccctttgatggtcatctccaaaccactcccaaaatacaaataatgaaataatcactcacgcagcatgtcgtccggccgggacgtcgtcgccgtcgtacggccaaagcgcaaagccacaggggcagcgacaaacaaagggtagctagccacgcgaccaatacaaccgccgtggcgccgtcgattcgttttcggggcgcaaaagtctcgacgtgatcaaagctagtagtacgtataaggaaatggagaagatgatggagagatcgacgtcgatatgatgttccctttctcccctcaaggttcttcggtctttttttctgacgctgattcgcattcgcgcacacaccacacacagctcacaatctcacacatccatcgtcggatcagaccaatcaaagaattttttttttagaacaccaatcaaagaattactagtacattcttctaccaggcacgccgctgtgctgtgtccaacgaaacggatcgatcgagatcatcaaaaattaattaacgcagtgaattaattaagctgttcgtcgtcctggaccggggaccttcattcaatttggtggtacgctcgctcactgcgtat

SEQ ID NO: 41297 - DNA, 1321 bp, Oryza sativa
atgtaaaatgacatgttccaattgagaataaatgatacaaagtaataaacattctggagcacctgaagattgttaggtctcattcaggtgaacattaggatcttttttgcaatagatggagcaaaagttgaaaggactatgtaaatgacatgtcccaatagataatgatataacataataaattgttacagagcacatcagaattggttatatctttctcacctgaacattaggatctttttgcaataaactgatataacataataaattgttacagcgcacatcagaattggttatatctttctcacctgaacattaggatctttttgcaataaacggaaggcatccaaaacatttctatgttcccttgtcagaagagcagttgagttgagagcataggcagcaggttcaatccagtcatctgatcctgatgaattgccagatgacgaatgtactgaggtggacaatgctgattgctcctcagtttcataagaatgcgcacgaaaaggatcaccaaataccctgaatgcaaatggtagcctgatcagatggagcaaacaacacagactacatctaaatggctcatgttcagcatagatgattgacagtatattgtatgacagctccatctaaaacaatgttcttcttgtcttcaagattatatgagtacagtacggagattagtttattagtttagatccattttcaacaaaagatagcaaacttgatcttttgtgtagccataagcccatgaatatcatcggttatgacaagaacacagtttgttaggtcgcttctgaataatagaagaaacccaaagtgtataagaaactcagccatgggattggaaaaggctgcaagcaaatcttgaatgttactacttttccagtcataattctgtatgtaactacaggtatatatcttgaattttgataccctcaataggtggatccatgtattgtccaattttaatcctttaaaattccattcagaaatcacctactttctccgtcccaaaatatagctactgaattagacacaacctaccctctatcctgattcgtactaataggttgtgttaactgtgttgccatattttgggacggaggaggtatagtactacagcacatgccatggaacagtccaaattttcaagaaacgtatgccctttaacgaactcatgattgttcattcatgaactctgcacggcaagtgttccaaggtccgttggcatctgtccgtgcagatcacggaagtacacgatgcttccccaggctcacatccaattatggaggagaaaccaaaccaaccaattgcaaac

SEQ ID NO: 41298 - DNA, 1224 bp, Oryza sativa
ttaatatgatattttaacatttgggaagcgtgtgcgcggagaacgagagaaatctcctctctttctccattgatcaaaaatttttgttgatgaggaaactctcatcaaatagtaatctcataaagagtttgctcggttatgttttaccatgtccgcaatgcagttgcaatcgacaactacaattaccgacgtcaacaaatgaatttcaatacttggttgttgtagctgctataatggttttattgtaaatcgcataactaaactggattaaagatgatacatagatgcggtgagcgtaataagaaaaagaactgcacataatgctcttctctctctcatcacgcatacagagaaaccctccccaatattttctcctttattcaagagcatttttccacatagtgtttaaaaggtaaactcaaatgatatttataaaaaaagtatatcccagtagcatattttattcgtccactcgtttttggggtgaggaaaaaaaatcttgtattgtgctcgtcattgaaaatacgaaacagaaaaaaaaatcacctactcgaaattaattaaaatcttcttgtttggttccacgcattcagcttacgtggagcaaccattttccatgcccttggctcttcgttgcaccatgcttgatgcttcctggtcatagggtagaattcatccacgtcgctttgcaggcttgctgcacctgactgctacgtgcacccggagtactactcataaaacaggatttgtcagacacaggcacacagcgaacctaaacgacggaccttttcaggccccacccacgtgccattgctttcacggatcagatactctccgcgtctccacgacgagcagaaagcaccaactaatcagctacagcgtgcgcaaatctcaaactagcaccacgctaatttaaccttctcagtcgatttatcattacaaaaacatgcgcaaaaccaatcaaatttacgcacgggatcgatacgagacttggttcttgcttgtgacgaactcagaacgacgccagctagcggcctagcgcgcgtggctgctgtcttcacgccaccatgcaccgcgcctgtatcgaaaccgtaacgcgaccagctgacacgtacgcgtacgcgcggggaggggacgtgcggcgccgaaaccgcagccagccatgcccgaggcaattggatagcgtgcgacgatcgagaagagagggtgcggcggctcgacgag

SEQ ID NO: 41299 - DNA, 1369 bp, Oryza sativa
aattaacgccgtctgggcggatccgtccaaaaccaggctgttgcctttgcctgaactaattggcggatcccattgtgaacctccatcaaaaacagtaatgtaggatgaaattagatcacgttaatactataaatagataaaggtatattcatatttgtagtattacgatggatttctattgcatcttgtagttttcgctgtttcataacattttttttaagagcaatgctacacgtactaaatttttcttactaaatttttactaacaatcatctcaaccatttgatttaagtagatggaagttacaaaaaatctagatgcactcatagcatgacacatcagtgttagtaagaatttagtaagaaaaagttagtatgtatagccttttcctttttttaattatttgtacatcattgtaggataaagtttggtactactgtttgcaatatcgatggtcatttgtatatattttttgtgcgtctagaatgttacaaggtctactgctgtttatacatattaccattgccttgtaaccgataaagatctcatagcatttctaaaagtctcctcaaatcttgctcttcaaatatctatatatcaagatagccaaaacgatagatttctaaatttcatacgtactcaacagtttttccatattctactctccaaaattcataggtttcatatgttagtgtctcttgtcccctccttcactctcttttgttaggcatttgtaggcattctcatcctttggtaggtgtggagcccaccaagagccaaccactatgatttaccaagttcggccaacaagagaagacatttggcattttgacaagttaaatggtttatcaagcaatatgttttttttatttgctacaaatttagcaaagagagctaaatggtaaagctcttggagatgatcctagacatctatggtatgtgaaacatacacgaatgtaccatagctaaaattaatgctcaaggagacgggaaataatctctaaaaatgagaataaagtgataaacctaaatgaggttgaacgagtgggccggttaaaaattattccgttagataagccctttatctatccgcgcatactacttgggaataagtccacttactggctagcctcgagctcccgccgccatcgtcaaagctccacctcaaagctctaggaagtcctcccctccgcgtggtgacccatttgcttccccgttggtctcccctctttgcctcctggcgctccaccagcccttgtcgacgtatgacaccctacgaccctcatcgatgccatcggcccctctcaacgtcgtcacggcattggcatgccggctgccctcaccaagctccgactccaactccgttgtg

SEQ ID NO: 41300 - DNA, 738 bp, Oryza sativa
atgtatatcagggcacaagtggtttgtgtgcgccattgttgcgcgtggagtgatggagctctctgtcagctcgatcgactgtggtagaagaataaacagatccttcagctaagctatttgccacagttgggcacttgggcgttggctccggtccatgtaccgatcagccagcgtggtccggggctccgggccgtcgcgggggataacgcgacttgtgctggcttccgcggttccacctacgcacttcgttcggtggaaaaagtcctttttatttttctcaactaaagttttagtttgattcgcatccatggacagcaaaatcagatagagaggctaccttaacaatcaaaattgactcattttatcttttcgagtgatttaggtaacggttttttcctacatgacacattgaactagagaaatttaaaatgatctatgaaggaaatcatgacggccatggtggcagcgccacggcaatcgagctcgagataggagaaatgatgccacgggtggattgagtgtccaatggctgcgagtatgatacacgtcgaattattgtctttgttggagacctctagagagcgagctccgccccctcctagccgttggtcatctcgacgcttgagctcatccccctcgccatcagccagcctccccaactctttccttcccttcatgccgtagtagacttcgaggagcgctgctgtaggattgagcttgacaagaaggcagcggggt

SEQ ID NO: 41301 - DNA, 705 bp, Oryza sativa
aaagaaaaagcagccacttaggtcatcttgagttccgaataaggttttagatgtattgcatttgcttggttacaatactaaaataacctatatttaaaattagaaaaataatgattatcaaaactaagtgcatgccaactaacaaaatttccgagcgatccatatgatcatacaaattcggtgatgagcactgtaaaacatactcattgccaacaattaatctagcagtcatgtttacaaatacaaccaataaaatacgatgaaccataggtatgtaaccgtgtttttatcaaaatgcacatgattgttaagtttatgtatcagtttgcttattttacaattttttacattaaatcgcacccacctactagtttttgtaccgctggcgcaatttactctaagaataaactagttcgtccatggtactagagacatggcgactgcggaccggccgttgtttttgaatttacttttcaggactggatatttccatttatcaggatcaggcattgaaatattcctgatcatgcccaaaggtagtaatcacaaaccggttcacttccatccatctcgccgttgttccatcgcttccaacttcctccaactgaaaaattgtttctcggctcgtgccaggatatataccgtctcggcgaacgcgccgatcgaaccttcgcgagcacccatccatgcatcgatcagacgttg

SEQ ID NO: 41302 - DNA, 738 bp, Oryza sativa
caggtcttgaagagttcaagagctgcacgtggagacaactgcaacgtgcaagcgttcttctgcgcaggatatcctgcgcgcatcagttctctgaaaagagactgcttccttatccgatccagacgagacttgcgtggcgtggaatcaaccggtttccagaacgtccaagaacaaacaggcctgcggcgaagcagtgaagcacccgttctcgctgcctttgcctccgaagaggaaccacgcaggcagcgatgaggtagcgctgcagcattgcaaggcagagctagacctgacatgcaagaatatgtactgcactgcttccctagaaaaaaaatattgttccaatcagtccatattattcctgaaaaaaattcttgctccaatgaaattctgcattggtatagtagtacgtagtactccttgtatagctagcttaattagcaccatacattcatcatggctgatcacaccatttcattgcatgtgtctgtacgtacgtgccatggccgacgcatgggccgtactccgtacctcgcacattactcgcttggacaaattcaggcggtgcggcaggtgcatcgcaagaatcgatcgatcggcacacatgccgcagcagtggtcgcgacgacggccggcgcccacacggcgtgtacatgatacaccgtatctgcgtctgcactggcgcagttcaatggatctcggcggttgccgtacgtcttcatcgatcccctactccccctg

SEQ ID NO: 41303 - DNA, 750 bp, Oryza sativa
tacagtagctcatcatcttagaagtagcttccatcgtgaatgcccttatgcagttttcccgtccaatttctacactgaggtagtatatatagtaggggcaatttgcagggaaaatgatggaagacattgactagaaataaaacagattgttcttttttttttccatcaatagatgaatcacaaaagttggcatggtatgaaaaagtagagaaaaattaagcctctcattgtatgcttctcttatttgccgaatccaaaatttaaattttaaaacttaattttagagttatttataagtttctttgttcatactggcttttaaattgtgaattatttttgttagtttgttaattttttaaggacttatcaacccgtaactcagaccaatcaaaacctaataagtaatccgaaatctcttcaagtttactccttcgggagtccaataagaccggcatgcatcaacatgctactcatcggtcgcacctcgcagtagcgcaactgaaacggctgcctcctgtacgtgcatgcagatgcagccgcatgtcgtctttggccgtttttgcaggtgacgcagcggatcggcagaagcaaatgctccaatcggaacgtactaatgcccctggcccagccgtcgtcgcaccagtgccgcacggcgaggcgaaccatacacaaacgggcagtaaatagttagtgggggtaatcatgtgagtttgtccgctgggatcgggtcatatggtgacccacgaccag

SEQ ID NO: 41304 - DNA, 566 bp, Oryza sativa
atataacaaattacactcctctggtcaatggagggaatggagagaagtccccggaagcatctacaccgcaggtctgggagggaaataagctaatacctctgtcccaaaatataataagttatagacttggacacggttattaagaaaataggtaatactaaataataggatgttgtgattggttgagaagtgaaggtaggtgaaaaaattgagtggtgaagggttgtgattggttaagaagagaatgtttgtgaagaagttgttatattttgggatggagggagtaggaaaaaaaaagaagatggcagtcgtaggtactgcaactctaccagcactaccagctgcaagtcgtctcctcaaatactccatacgaaaatatgttgctgtagaagaacgagctttcatactactcatcaatcaaaaaagaaaacaacaattggataccactgtatataattttgactaactcctaacaaagcaaatacaacaatttttaaaaatgccgaaaaccccctaacttccgtataacctgaaaaatggtccataaaataatagtgttgtaatat

SEQ ID NO: 41305 - DNA, 761 bp, Oryza sativa
gagctattaaaagaaaagaaataagcagtgctatcgttactacgtgagcatgcatggtcattggctgtggcgattaaacatatggggctcactgtcattagacatgttaatcacataattatctccagacttcagtacacgtcgacggattggctcgtctctgcgtcggcttatcacgaagattagcacggggcgctggaaattcggaggccgtttccgtcaccgctgcctatataaggagcataacccatctagagctgggacgcggacgacgccacaggagacacccaaccaccattttcattcatcccattcctcttagtagattaggaaaatcaggagaggagattgaagccggccggtgatagcaaaccggcgccgctgcggagagaattaaacaccgcagccggcgttcttcgtcaagtcgattcatttataacatgccgccattcaggatatttgcgttggatggtgagcacattgaataaatattaattttctagattaaacacaatagatgttcggtctttattggcgatcggaacatctgcgtgttcttaatcgatcttgatcttgatgattaaagccagatcgatgagagccgaaacacggttatcatcaaactccatttatacaatcaatggtataagggtggtccggtcctcattggcgatcggattatccgaatactatttgatattttctatgctcaaaactagatgtccgaccctcattggagattggatcatctatttgttact

SEQ ID NO: 41306 - DNA, 682 bp, Oryza sativa
ttctcagtctggcaccccataatgaatcatgctatacaaaaggtaaagccgttgcccacgctggcttgtggttggcacggttaatgtttcacaacagtagctcacgaaccggtccttaattgtcatgagcacgaccttcaaaactatgtgctcacaacccgccattgtcaagttttaattgtcaattaattatcatagcacgattaaccatcgtgagctaccattaagtataaccataaataataatgtagtatgattcatcccattagtgagctaatgtttctaagcatggcaaagcaattatatatatatagcatttagctgaaccaaaccaatatataaggttctagctaatcaaattataacccataggaaaataaattcatcttcggccattaattaattgggaaaggctcaccacccgatgacattcgaaaataatgcataagttaaaataaaacattagctttagacgggttcaacatgctcaaagggttgtttgggatctgtgtgacttgcctagagcttcctcaaacgcttctgaacctttctcaacgaaaacgctctcctccggaacgtcggaaacttaagcgaaagaacaaaatcaacaaaacagtataaaaacaagtataaacagtacatgtggatatttttaacatgtagatatcgattttagatgaat

SEQ ID NO: 41307 - DNA, 758 bp, Oryza sativa
atatgttttgttaatggagtaggatagatttaagcttcacaaaaataagacctctgctagggagctacggttattttttttatgtaaatcaagcaaccaaaatgtgaaatatgttttgttaatggagtaggatagatttaagcttcacaaaaataagacctctgctagggatcatgcatgggttttcaagcttcatgtaaagtcatgagcagagatcaaaatacagtagatcagtatcctttccatatatttggtcaacaattaagagtcaaaatagcatacaggaccaagaagccacaaaatttatatcatttgtatttgtacatagataattgaagaaaagccattcgagaagccacaaagatttccaacttttgtatttctagagaagtaattaagaataaaatcagccatttgtgtacatcccttttgtatttctagagaagtaattaagaataaaatcagccatttgtgtacatcccaatttatacaggccattttgataatatattatctctaagaggtcatgatgttccctgacttcctgttattgttataaatagaacaatcaaaatgagctagcatgacatctgtattttattgtgatcctgctattctgcaatgacagaagacaatgggcaacccaaactttggaaggaatatgtgaaatcattccctaagtacttaattacataacaaaatgataatatgccaacgaagaagaagaaaaggataagatcttgatacaagctgatgaa

SEQ ID NO: 41308 - DNA, 756 bp, Oryza sativa
acagacatgtatataacacttccattttctagtaatcttattttccaaggacattttctgataatcttgaaaaatctaaggcttgataacatattgcatatccacagatgatttaacctgccatatttcattatcttggccctagcttatttgtattccacaaatttataaagtagaagcatatctgtatatctaacctcatagttcggaatatatacaaagataaatgcattcttcagtcttggtgagacaaaatgaacagttaagaagacagtacatatggtcaacatataaaatcactcacactttgttgtggcttggattaataatgtaatctgaaattatagtggaaggttcaagaaaattacaaggacaactggctttgcatagtataccataaaagtggccaaaaggaaagcgataactatttccccagtcgttaactcatgatggatcagcaagcaatatcactgaagtcttatatcttccaactcctatttttcggagaaaaaaaatagagtgtgcagggaactcatagagttgattttgtaacatgcaaatgagcaacattcagtcatcgtacatttgtcatacagtaaatagaaagaaattaagatttacagttgaagaagataaccttggacgaatcctattcaatcaaacaaatccaagaatcataattcagtcataacgaagccaagaaccctaattccccagtgtaccttggatatgagattgtcgtcagtggaggtgtga

SEQ ID NO: 41309 - DNA, 656 bp, Oryza sativa
gcccccatccagatcaatgcctcgtcaaccgccgtcgtcgcaggtcggccttgccccatccgaattgactcctcgcagagactgggtggtggtggcggcggcgggccattgacgggaggacgagggagatggactcgccgggaggagggtggagagagagagagagaggcatactagaaggacaacgtctccgcttgcatctgtgtctgctggccaccgcctgcctcctccgcgctcgacggccaccgccgccgcttccccttccgcttccacacccaccggctgcctcccgccgtcggccacttgcgcccgctacttgggcactcctcctcccctccgccccttgcgccgcccgcaccgctcctccgactgcgccgccacccgtgccgctcctccgaccacgccacccctccacctagctactcctccgactgcgccgtccctctgatcggccctcgtcctccccgtcgtctcggcggtagagaagagataaaggtggggggatttttttttagagtggtgaaaggtgagtataaatatgtggtagttgtaaaatattagtacaatataggatgttggtatatggaggatgcaatatggatgatctattggagtgaaaagtaaaatggagtaggaatctttttggatgactatct

SEQ ID NO: 41310 - DNA, 513 bp, Oryza sativa
cctccgcccccattgtgaatccgcccctggccaccgcgctcactgagatgaggcggctccgcgtggtgggcgtcaacgacggtgaggaagaaaccaagcaggaaggaaccaaacaaaagtctaggaccaagcaaagaaaatatatgtgatttctattggtcgcttcccacggattcgatcgtggaagccatgaacatggtctccaatctcttcaggcaaaaatagtaggggaaatatctgcttgccgagcctgtctacttctcatggatgcaactgggggtggatggatgaatgcgtagggatccggtgggctgaggggattggatccaaacatacagtgtgagaggagagaagtgaaaggaagaaggggatgacgaagataaatctagcaagtgggtccctcgtgcagatgatgaagaagatggaaaatatgatggcagcggcatggttttaattttgtaaaattttagtagcacagctacaaatagatgaattgtaatgacatttatctga

SEQ ID NO: 41311 - DNA, 1168 bp, Oryza sativa
ccgcctaccttggttccccgcgtcttcctcctcactcgaaacatcatatcctctgaggcacagctgccggtccacctactcgcccatatcgtctcctcttctcttggtagggctttctatcctcttcctttacgcgcaagtgggaggtggcagatctggttgcctagagctcaactaccgccacggtccacctccgagtccgcagcatctcctcctctcttggcaaggtaccctatccacttcctctttgtgggagaccggtgcacaagtgagaggccgacaaactcgtgggaggtggcagatctggccgcctatagctcaatggtgccttgatgagcaggcagtagtggcgagcatctggaggtcgaggaggatcaccagatctagttgcctagaactcaacagccgcttgatctggccgcaacaagcttggggttagccaaatctagatgatgcagtcggctcaatgatggacttcacccatggcaaggaggacgactagaaaccctagccttctgttcttcggcatccttctctctgtgtatattcttccattttggtgttgatatattgatgttgattttgtgattgtgttcttcgctattgattttgttgttgatataaatatcggttgggaagtcgatcgatctcggggcgatgggacttccatgattatgtatttttgttcttgattgatcgatctcagggcgatggggggcgcttgaaacatcagcttaatttgagccgatgaatggaggaagccttttcttttcatttctagaacatcaaaggtgttggtttctaaattggtacgtttgattatttccattagtgccgctaatggaatatcggttgagaaaattacacctatatagggttactaatcggcactcacgatgtgttctatactagtgagaacatcttatacgtgagcactttcaggatgggcgatggaagagggacatgaaaaattttaaatttcaacccaagctagtacattatgtttcagaacctcttccatttcttccagctgccccctcttcttcctccactcattctctagaatagttttgttaaattactaggctctgacaaaattcgatgctaatcatggtgacctcatgaaccatgggttatcgtgaaaatatgaatacccgttgcagacact

SEQ ID NO: 41312 - DNA, 788 bp, Oryza sativa
aagtaagtagtgagctctactattaatattaaacttgctcttatgaggagatagctaaccagcaaaatcaggaaaatgtatacggtagtactggtaagtgctgtgcggtcaactccaccctgtcgtcccggactggtgtttgtttattttacgtgctgacgtactcgtcattaccaactttaactaaacaaccatccttcggctatacacatcaattatttatccgcctgccttgagaagactaataaaatgtccgtatgcaccggcaccgtcgtctcgtctgcagaagaataatgcaacgaatgtaccagtacatcaatttataatatgctaattaattaatgactgagattgatcatatcaactataccatggttgatgagctgatatcacatagagtagtctcattaacctcagaaagtacaaatataactttcaggttttgttgaccccccaattcccctgatcctcctatctcttaaccaaggtaattaaagacgcatgataaaggatgtttttatctaacacaggtttgggacagtactaattaacactgatcagtctttttggtgtggtgcctaaggcagtcccaacactggttagtactcttgttttcttcttttatggtattgtgtacgattatgtcaaatttaattacattaattaggtaccataaaaagactgattcgccactgattggccattgggcagtcccaacccatgatgtacataagtagtgtctatagtaccatgtcaataagacatcataatagaaactacactctaca

SEQ ID NO: 41313 - DNA, 526 bp, Oryza sativa
ccctaaaaaagttacatttcaaaatagggacaatttgaaccatgccacacaaattgcaaaatttgtgatatgccaccctgacccacatgtcattgactcatgtgggtcctacatgtcattgagatacgggtggcatatctcaaattttacaaatatagggtggcatggttccaacaaacccttaaaaataaatctcttgcctagggtggcaatcaatgttgttaatgtagtgttattgtttatggtgtgagtggcgtgacaaaatgctagctagtccaccgttttcacctatatggtactgttgtcctatcattataaataattgcatgattaaaaggtttaaataaaattctagataatttatttttaaaattatattgaaaggtttgaaagtaaaaattggtgtaataatccactataaataaaagaaaatccagatcctctttatcattgtcttttcgcaacaattgtggcaagtgtaagcagcttgtctagaaactcctaattttacgaaccaattcaaatg

SEQ ID NO: 41314 - DNA, 607 bp, Oryza sativa
tccttgatatcagagcaataaacaaatgatatgtaggagccaaacatgcaggaaggaattaataaacaaaagctgcaaaacttggttgacagaacacatattattcagcacaagcattggtcgaatagtggaattatttggctgtctgactacctcatataggcacctggcaaaccagcctttcataagattcgctcagtgtcacgacatcatagactccaagcttcttcaaccacataatattgctggggcatggatgagcagagagcagaacatgctgatgaaccaaaagaaaagcgcacaattagagcagagcaaactgaaactctcaacgaatcgtgaaatcgaaacatcaacgttgcagggaaaatggtcccagccatccacacacaggtccaaaatctccaaaacactaaacgagacgaaactggaacaaatccacacacgacaaaagctatatgaagaaattctctccattatgcagtaggaagacctaaccctaaactgttggagcgcaaactgccatgattcctagcaactcctggaagaagatgcattataggatgaaggcgtcgccggcacgagatgaatgtggaagccacagcga

SEQ ID NO: 41315 - DNA, 728 bp, Oryza sativa
acggagagggaattcattcaatatatagagtcgtgggacagtgaagttagctgtcctacgtacataccaaactaatcttgacaaaaaactgcttttttattctatgctacgccacggaacgaaattaactacggagaggaacaaaattaactacggaaagagaattcattcaatatatagagtcatgggacaacgaagttagagtcatgggacagcgaagttagctgtcctatgtacataccaaactaatcttgacaaaaaactgcttttttattctatgctacgccacggaacgaaattaactacggagaggaacaaaattaactatggagagggaattcatttaatatatagagtcgtgggacgaagttagctgtcctatgtacataccaaactaatcttgacaaaaaaactgcttttttaatctatgctacgctacggaacgaaattaactacggagagggacttcattcaatatatagagccgtgggacagtgaagttagctgtcctacatacaaaactaatcttgacaaaaatgactccatgtgttgtggtctatggcttatcattcgatgccgtcccctctaaagaagccaaacattcatcctacctaaaaaaacattgtggtctatagctcctaattgtagctcataattttctaaaaaaaataatgaagcaaattcccacagtaaatttcatcctagctaaaccgtataacaataatagg

SEQ ID NO: 41316 - DNA, 694 bp, Oryza sativa
caacatcataattaatcatccattcagtacaataatattgtccggttgttcatgcagatgccaaaaatacttgcaaacaatcatcaaatcaattaaactatttttgcaattgcaaatccaatatttcagaatcgctaaagcaaaaggaaataaataaaatagctaaccacaacaatggcaaaggctaaaatatccaatcatctattctctggttaactgttaggcattctacgttaccatgatccataaaaatctaaatggccaatgtccaaaattcccatttactaggaccaataacattttcctcctattgtccgcttgtttatttagacaacatccaaaatcgttcctgtattgttaatccatatcctttgtccattttaacatatccctaaactcgtacaaaatacacagccatatcgatgagttaagatagcagttctctctaactggttttcactgtgtagagcaaagaaaaagcatttttagacaaccaaaccttataatcaggatgccctggtccagcttcctcgcccgttccctgagagcatgttgtccatggaacttgttgagcccaccctaatttgttccaagaaagaagaaaaacacccacatgcatcagcaaccacaacgcatcaaaaccaaatgaaaacgctatacgattcaccgaggaagagacgcgtaccttctttgg

SEQ ID NO: 41317 - DNA, 816 bp, Oryza sativa
  unsure (1)..(816): unsure at all n locations
catatactcggaaagtaatacattaccaaagtagtataaagaaaaatattctaataaagtacaagtcttacaaaagaaagcagagctactagaggcatagccgaatccttccgaagacttctcggacaaagactcctattctattcctattccactagctttagaacactactaaactagagagagagcttgattcttcttgcttgaagtgtgtgttgaaatggaggatgagagctccttttatagcctcccaatgacggttgtgacggttggaatagtcggaaataccctccaaccgtcattgggagctaatccacattgtccaggcaaaaccctcgatcggatggcgctgaggagggttggaaccagggtccggcccaatccagcccattttcggctggtggaccccttgacttcctctttccacagacttgtgaatttcgggctgtttgggtcatgtcaatttagtgttctcagcccaagcgtctgactgattgatcatccattttgctgtcgattctcctccattttgtgtttattctctgcaagaggttagaatcctagtgctagtggaatataacttattttaacataaatatgcattgcaagcataactagttctctcttattttggttatattgatggtgaaactgatcgataacaaccgtcaacaaaacccaccaagcttgaacctttgctcgtcccgagtaaaggactcacagaaaatctaaacttggttattgatcaggagttgctactatgctgtatatctcanatgtacagatgcagggtatgtgtactctctctcaagttaa

SEQ ID NO: 41318 - DNA, 743 bp, Oryza sativa
atcaatagtagagataaacttttggtctttagatgtgtagacttgagatgtataaaatttggtgcgtaaatctatatctacatctatatacctaactatacctaactaaaaaataagtaaagcttaactatacctaactaaaaaataaagcttccggtagggttttctcgtccgtcaattttttttcacacgcggtatttttctcacgcacggttttttatccgattccggtttttttacgtgcgttttttgcccagtttttttgtccgattgttttttagtgggcccggttttttaattaaaaaataagtaaggcttccagtagggttttttcgtccgtcaattttttttcacacgcgcggtttttttatccgattccggtttttttacgtgcggtttttgcccggttttttgtccgattgttttttggtgggcccagttttcccccaccgcgtccgattttttttgggcccggttttttatatacaaaagaaaaaaaaccacaggaatccatgttcaccaggttcacccacaaaaacacagtagtccaggttcacgcacaaaaaacacagaagtccaggtcacacacaaaatatagaaaaaccagagtccaggtttaccaggttcacgcaagaaaacaatatcgcatacgagtcaggttggttcgcccacaccgttttctgcttctgtttgcccagcccaagtcaggagttagattctatcccgagtcagattctatcccg

SEQ ID NO: 41319 - DNA, 948 bp, Oryza sativa
tgggtgagtacgacttacccctctagacctaaaaaccaaacatctttcacccttaactatcaataccagataaaaaaccaccacgggtagctttataagcgattttgatcctacgtggcagtccagtcaacaattcttctattaaaaagttgatagggcccacctttcagatctctctcctcattatctatttcgctcctcattatctatttcgcctctcagacccctctctcttgtcagatgccaaggaggagacgcgtcagcgactgcgtgcgtctcacggcggagggccaaggcagtggccagcgacagtgaggaggcaggagtggcagagcggggcaagtggcatggtcttagtcgagccatgtctcgaggtaggcgtgatgcaatatgtggctgcagggagggcggttcaccaccgcatccgcctcgaatcgcactaggcagacacggcagttcgtcgtcagcccgtccccatcggccgccgagagagatggaggtgaggggaggaataagaagagaggggattagggaaagagagtgagaggggaggagaaagagatagagagggtgagagactaataggtggggcccgctgattttttttaaaaagaaattactgattggactgacacgtaggatcaaaaccacttcggcttgagtgggggggggggtaatttccggtattaatagttgagggtaaaaaatatatggtttttgggtttaggggtacttcgtactcacccaatagtttagaggtgtaattcggacttttcgcaaaaaaataatgacatcaatttttatgattcagatgttccatcaactctcacgagtacaatgcatggaaaatcgaagtataagaaaatatgatttccttgtgtcatgaactcgaatgttccttttaagtcaattccattgatttttcgttaaagtactaaaaaatattaa

SEQ ID NO: 41320 - DNA, 739 bp, Oryza sativa
cacatcaatgccacgtcaggtgaagagcgactcaaattagccacgtaggcaccatgtcagctaaaactgtcgtccaaaccgccatggaacctatattgcaccggtattgacagttgagggacccgttctatctggttttccggttgtaagacgaaaatcgaattcgttgacaagttaagggacctcagatgaacttattccttcaggatatggtagccgatacataacagtttttccttgggcttaaatccaaactgctcgcctattaacttttcagaacttcattgcctcatttctttccttcttttttctcttttatttatcttgctttttttcaactacaaattgatgaagacatcccagctacacttggcgtaaacaagggtgatggtgtacgtcatacatcacataaagaaaatgaagatgacgtaaaccaagttgatggattacgtctcagtaagaacgatcaagcatatcatggtacaattatgcgcagccatgctaaggaaaatacaacaagaggtgaactcgctattttctcaacttaacccaaattttagtgagaattttatactgcctaaatgctctacctttgtattgctaaggtgcacgcccgaggacatcatcactacgataagaaggatgggttaagttgaggactacaagggttacgccgaggaggaatcagcccatgcccaaccagcagctgtttacgcaaacaagaagatggtttgcgctg

SEQ ID NO: 41321 - DNA, 693 bp, Oryza sativa
atattggccacataaaatttgctatttgaactctgcagcattacataattgttatggtgctggaagcatcttatacagattatgaaatggaaaattgattcggaaaataaaaagaaaaactgaacgtagacatatctcactttttttctttttggacagtaacctgcatgtcttctcctctgaactatatttcttaattgttataactgacaagaacttatctgaaatatgtcatctttggttctcaaaacaattgcacataaagcaggggaaccctgaaaacttttgtggactacacttctagcataaattgcaagatgaaaaataataactagaattggtcaactagattcaaggataaccacttatacatatgggtggaaaatatatttcaatagcatgacagttagtagtagtagagaaatagaaccatttacatggactagaaattaaatatataagggcgaaacgactcttaaatccacaaaccggtctgattatggtcgagtctagattttcttttggtccattggtgcaaaaatccaataaacattagcgtgaccaccctttttttagagtacttaaacttgtttttttagataatgaaagaacatcctgtctttgtttcagaagaaggtacaatcactacaaacatagagctgctaaaaattccaaacatggcgaaactgaaac

SEQ ID NO: 41322 - DNA, 651 bp, Oryza sativa
aaatcgaagcatagaattcacagcttggaaagcaaacatctaaatttcagacggcaaaacaaaaacagatacatctaaactttgtcatcaattttctacccaaggcacttgtgatttaggtacttgagtattaaatttccgcccccttggttacgcagccacaaaacctttccacaaggatgctaagcaaacgaagaatagatatacaaagaatgatatataccaattgggcacaaaagaactaatgcacagaaagttcaacagcctcactcgcgacgattacaatgacgcgatgggagatgtgtttcaactttgatgtaaaatactcggaaaacattaatgcaaaataaaatgcctgaacatgtcaactttaagaagggaaaaattgacctaaagaagggagatgatgttagatcatactatcagagggtagtattgcttgccccattattattcgttggttatatgtaacacctgatgcccaggaaatagcacaagcatattgaaatcatcaaagaataaaaacaaattatatgcaggaggcgtgccactggggctaattacatattgtactttctaatgcctaattacatgtatgttttcatcgcttcaagcatgaatttgtcacggttatccataggacaaaacatg

SEQ ID NO: 41323 - DNA, 1478 bp, Oryza sativa
cggagcttcgctagaccgtaattccgctgctggtttctcttttcttttgtaagtatgtaacgttgtattattgatgaatctgtatattaaattgtcagtttgggtacctcggctgattcctggacgaggatttaatgcacaaataagttcggaaattactagtgaatttctgggcgtgacaaaacacctctaagcttctatatgacattcttaaattaaagaaaatatttgaaatttcagaaaaaaaaactatccacactaaaagtcctttaaatatcctataaatactcctaagcagtcaagtgagatattacaaatgctccgtggtagccaagcgatactctaacccgaccatcgatttttttttttaaatcggtggattcgttcttttattttagaaggttagttattttttaaaaaaaaacatccgaaagcacaaaattaaaaaacacccccgtcacgtacgtactaacgagctatcttcatgagaaattaaaataaaaattatttttacattataaaaccacaaatagacttcaacttgctaggtctagcagctctcactctatcactttaaacatcctacgagcccttttaagctactacatggtgctattaaattagagctatcgattagttaatttttttaataggaaaaacacaaacctctctccctccctccccatccccgtgcggcgttaaaatcttaaacatcttataaacactctaagttgttattacattcttctattagagtaaaatcatagaaattttggaaaaaatatcctaccattggatttgacataaatcaatggacacataattttagtatcgattgacacattattttgggtcagtagatttattttttttaaaaaaaagaacaccccaaacctccttccctccctcctccttttgtggcatgtggtgttaaaagtccattacatgtcttataaacattcttaagatgttacacctttttcttaaataagataaaatcctaaaaactctgacaagaaaaccaaacatccgaccatcggttttgacataatcatttaacacatatttttggttgttaggttaaccatttagaaaaacatcccaaacctccctccctcccttcccatgtatagcatgcgccatcattttatctctgttttttttatctccgtgacaattaaaattaaaattatctatatgggcaaaaaaacacaaatgaacctccatctattacttatatcacgttaggcatctaacaactttctaccaacttcattaatttctctaaacatgcatatcagggctatgtacctatacaaattgaccttggtacttttaaaatgatcttttaatgaaataaataaatattcttaagaagttactaatcataacaactattcatctagcaatatagacaacaagtttaaaataaaggtgtggtcagttgaacatcataccgaataccgataagcatatgc

SEQ ID NO: 41324 - DNA, 2617 bp, Oryza sativa
aggtgctgcccggcgacccgaaacatcgccttcgcctcaactgctgtcgaccaccgttcgccacccatcgccatcaaccgccatggtgccgtcgtcttcctccatggtgtgtcaccaatctatgggctgggatggtggatccattcagattcagaaaaaaaaggaaaaaaatgaagtgggggtaagagtggttggctgggtacaagaaaaatagaatatatattggaagtagggaaattgtttttatcgaaggaaatcgtttacttcgataatggtgggagtggatgacggggcatggggtgggatcggaatcatggaagttcttttatcgaagtaaatcgtttactctgataacagcgagagcgggatgatgggacgtgaggtgaggtgggcctaagctgacagatgtttggcgttcaaaatacttggagtgagtgcgctcctagtagtatctataccctcaaaagagtatgtgatgtcaattcaccgaacagttaatgggggtgttattggaaaaaaaatgcattgcattagagcaaatttcaaggaaaagagtgattacactaacatgtcgccattacgagatcaaaggcacaaacatgatataaaacaccctgtgcatgcatggacaagaataaatcaacggacaaggaagactatgattagcattcacatccagttccacacttttagaaagtaacataagcaagtaacactcagctagtttgaggaaatccacacaaaagctagtaatgccaacattctgctccttgttgacacattgtcaatagttagaagaatttactcctattacaaaaatcaatggttttctagtgcttcattcacgttttagaggcgttgctttcagaggtcctttaattatcacaatcaaagtattgttaagctggagtatgatatagatcgtttgtagttgtaacttgctagggcaatgacagtttttttttccatgttattctcctttatttttacttttttaaatataattctagattgtgtgcatcataactatgtactaattgcttgactaataacgctagctttataaaaagggcgatactccgctctccactagtagtattatatgtattataagtagaaaacatttgtttcgttattaattaagtataaattagtaatttattaatatactcatggatgagcaggtcgatgacatcaggcccatgcatcgtgacttggctagttggatgtgggcctgtggcgctcggcgcatcgtccagagcgattccatcgagaaatcaaattggatcgcaagttatggcggctacgagtggcaagtcctccgcctggcggcatgtgttgatcccgccggcgaacgacacactccggtgtgtccctttcttctcctccaaccatccccggcagcccatgtgtgccgattttgcacgcatgagcatcgatagcgacctccgatccgttccaggcggcggcggcaacgcgtgggctactagcgattgtggatgtaaatgacaactatacccttccacacatattttttcctgaacaataataccctctacgattatactaccgttaagtgcggtatattttttcctaaacaataataccctccacgattatactaccgttaagtggggtggtagtagaccgttaggtatatagttcgctcttgggttggcgatgtggtttttcctttccctagacaaagttgcctgataactggagtattttataagtgacatgtatgtctttcctaattgatctctccagaatggaagtctgcggactcttcttctaatctctatcaattcaatcaatccaaccgttcctcctgaatccatagtctcatgctaaaggtgtatacgtggctcactgcggaaaggagtaaacattcttcgttcattacatgagataaggttgcacattcagtatgctctgttttttggtctcctctgtttttgccgcccgttgtcccctgttttgggctttagttctgttttcgtcaggcacacggctacaatttctggtcgtgtggcattttgttcacacgggagcgcgacgtgcggccaattatctggagcctaggatggcattcgcagctaaggatccatgactaaacatgcagccatcattcccaggtttatttgttttgcgacaataaaaggaagaatgaagaacaaaacgctgccggcgttacacggcaccaaaatttgtgatcgtgttcaatatttttcctctctcgcgttcatcaatcaagctttcgttcctgacagagaatgggttggattggcaaatatgcaaaggcaacagcagtctttcacatatgctgtgacgtgattcaacgaccagcatggaccctatgttgtgaacctgctgtcgagctagttcccataatcgaatatagcagtggtacacaagactaaaatattatctttatgccaggataaaactgcactcgactaatactatctctgttttgagatagaacgatttttcggttgtttaaccaagattaaggttgagaacaaaaactttactgccactcaataaatgaggagtgaatcagtgtgagagggtaggtggcgataagatgagaaaacttttgaatacaaactgt

SEQ ID NO: 41325 - DNA, 1395 bp, Oryza sativa
agaaactctacatactgagagatatgacaattgtcgtaataatatatggtaccccatgatatatcttaatgctaagaacagaatgatggcaccgaattttacactgaaaagatctcttgctacttgaggaccataaaagatctcttaataaatggtcagtgaattaaaggaagtttatctacaatactactccccgttgcactatttccagtgacattgttatacttagtgcctataagtacagtgcggagaaaaggagagagaaaacccaactagtggttgaaaacgttattgaggaaagtgcccaaaccatcattggtatgcatgactgttagtccatgattttcctctcagaccacagcaattgttccgctcttatcgtcacagctaagtgatgcctgcgcttcgctgttctcagaatatatttttcaacaatccagctagcagtaaacaagaaaaaaataatgaaacataagggttttattagtatttatcatgaaacaaataaatgatacccgtgctttaatgtgaaatatattcataggtatatgttaattatcataaaaatgatagatgtatttgttaaaataatgtgcaaattatgtgagaagtgatgattggatatgcttacatgatgatttgtagaattaaataaattgtagatgatgttgtatgcttacatgggtgatgatgtggcatgattgcatgttgagctttacaattagtgggctataaatttataaaaagtatagataccatcgatcaacataaggagtgaagacctttaattattggataaaatccttaattttttttgtaattgttcaggaaaagtatgtttgtttgtatttcgtattttctatttccgttgttcatagggaacgaaataccttgaaaatatgtgcttctgtaatattggatctagatatgtcctcctgtgatttgtgtaatacaaatcgaaatatgtccatattcctactagctagaggagggctaacttaataatcaactcttatagctagttaatatcaatgatggatgagttgttttgtagactgcgacctttgagtaatgcatcaatcatgcggctgatgttatttctgttttgattgggagattacaaaagacgataccactgtataacgaagcaattcaaacaactgatctagaccagtctgaatcagtactaacaacgttaattagtttagacgtgcaccgaacacatttcgtgtgtgcaatctaaatccgttcacagtatttttatatatttacatgggaaatttgccaaaaggaaaaaaacaccttataagttacttgcaatttaacattctatcccataaaattgtgttttgttgcaaacgtccacacagtactcacttttattaacaaacaact

SEQ ID NO: 41326 - DNA, 666 bp, Oryza sativa
ccgccgcggtcgcctggagggccttgacggtttcggcgagctgcgcgatggtggtcttgaggtcgtcggtgtcgctcatggcagcagcgcagcaagcggatgaagacgaggtaggggacgtcggcacggcgggcggtgtaggggaggtggtgcgggaaggagaggatcgccgggatcgttataccaggttggcaagtgcctcggcacccaacgacgccggaccgcgactacgtagctcgtagccgcgctccagtcctcaccgcgaggttttgcccctctgctagtggcttgtgattagtggagagagagattttgttgagttcgtgcggttttagacacgtagccagttgtcagggccaagaaaaagaacaaaaatgattgattatgctgtagcgctaatcgacgcgctgcgcgtggaatattaattcaagcgccgcacaatgctccatccttccggtttttcccttttttaccacctcacctttactccgcctcccacctttccttcactactagaaaaaagatttttccgggtggcccaaaaccattttcgtaggcgggggaaaggaccgccggtaccatctcgcctgcgaaaatagaccattttcgcaatcgggcctgtggcccgcctgtgaaattcatctcagaaaaataaaaaaaaaccac

SEQ ID NO: 41327 - DNA, 696 bp, Oryza sativa
atatgcacttctgcagtactgccttcaacttcctgtgatatttagtcctagatcatacatgtgcacaatgaggtacgacatacatataataacttcagaaagttaatgattaatctttaaccattagctccggtaatttcagtttggacatgtgcgtgatagtggatttgcatgccaaaattggttctgtaactcttgcagccttattttccttgcttgaaggctaactattcatagcgtggattagtgcccaatgcagagcactgccaataatgcatttctccctctcgcaggtaatggagctactaatagccttgcagtaatgtgcttttgttcttgcacttatggagaatttggatttttggaactcttagtttctgtttgtatgcaatgtaattagtcttcagtgtacttatcctagttgatcgtgctgatggatatgatgttaaaaatgagtaaatcaggtgttgcgaatgggtgaatgattggtctccattgacattttgattgacattttgttagcagctcaccttggaattataattatttttaggaaaatacacccacatttacgacaacttgtaagatgggtgtagtttagtcactcattttataaattgctcaaattaatcatttaatttgtttgagggtgcaaatctggtaaaaaaacatgtcacatattatttatgccaacgt

SEQ ID NO: 41328 - DNA, 659 bp, Oryza sativa
ttatataaaagagtcagcgggcagctatataaagcattactgtttggcaccttttaaaatgcaatgtaccaactcctaaaaagttgagtaactgcgatataaaaggattttaaggtattgggcacataatcacgcgcacttttgcctaagcaaaaagatgcctaagtccctaaaagaacgtgacaggccacacctgaaaatatgggctgcagacatattaggcctaggccaaaaaatatgccttcgacaccctttaaaggatgacgcatgtaacatgctcccgagtaataaatcttccgggtgatatagaccaagtatagctcatatgaatagcttctgatctgagtgattatcccttatgggatactccgaaatagatataataattgaatcccgactgacacaagtattcggttgataacccttatagggaataataaatagtccagtctttgagcatagaaaatagacccatgtttatgaattcatgttgcatgtatccagagcaagtccaaattgaaggtatgatacttgtgtttgagctaagcccctgagcatatagcttgtccttctgtcgtaatcacagttgtccattgatcgtagctgacgcagttggcatagagacaagacgaccaatatgtagataatattgtctacca

SEQ ID NO: 41329 - DNA, 688 bp, Oryza sativa
ttttatagtgtagagacactttaaaaagggtctagaaaacttttactctagagacactttagaaatatttttagcacattttattagattttatcttgtagacgcattctttcggcactttaaaatgtgcttaacatgtaaagacatttgcttgagacactttaaactatgtagagatacttcttagaataaaaatatatactaaatgactaaatatataagtaagttaaggcacaaacatacaatgaatgacatggggttgagttggttaatgccttgaagataagaatgatttgtttaacaggtcatgagttcaaggattggcaaaaacaagggaaactattttattctcatttttacattggtttcatatggttgtgatacaatttaatgtctctagaaaatgcctctaccatgttatagacattttataaaatgcatcttcgtttgtagagacaattcaccataaggcacttattgggcacttttaaaatgcctccacagtattgtaaaggaatttgaaaagtgtgtctatagtactcgaaaaatgtttctacaaagcatttttcttgtggtgcatggtgttcaacacacatgacatctttggtgcggtcccccagttgaggccaagatccaatttgggaaatggattaaatttatctgatgttacgtgtatatgcaatcaatg

SEQ ID NO: 41330 - DNA, 666 bp, Oryza sativa
tgtgccatgtcatcgttcatgtggcgtgccacgtaggcaagaccacggtcatacgcggctttagaccgggatgatacaataaattaaatttagggatctcgatatgcgctttgcaagttcgttgacctaagtgaaacctcgttacaagtttaaggaccgctagtgcaatttactcttccgcatataacggttgagtttggatagtgcccctcatcttctaaaaccactttaaatatatagtcccgccatatgcacactatatttcttctctatggattacatgtacgttgacccacttttttttgttgttgttgttttatcgtataagtttcacatagacgccacattagataaagaacaaatcaatatggcacgttgaaaccgtcttcgttgggactacatttcctctgttcggtaaagataaggattgcgttagtacattgtttcgcggttgagagactcgatcgaaactcaaccttagatgagagaccggcagtgaactttttccaaacgtggttcgtggcccatcaaaattccaggattccagcttatgttgggccttccagatctgcgtcgttgggccatatgggccagcgtgcttgttcgtccaagcacaccggcccacgggcaccgttcgattacacgttagtagttccccaggccaag

SEQ ID NO: 41331 - DNA, 681 bp, Oryza sativa
tgaagcgtagggtggagcgaagcacaagcagtgagcagagcgaggtggcatacatgattgacatggctgaaattttagctcaggtttgttaacttgcttgaagcttggctcaagctcaaaatgataaagatatcagagcatctgatcaagacatacatgatctccacaactcataaccgaactactcctagatagattgtgaccattactaggagtcaaaatttagcgcaccatccatcaagtgccgagcgcccccatcgcaatgaggtgaggttagcaagcagtgcatgttatctagttctcaaccacacacattaatcaagtggcgaggagacaccacctcttttaaaattgtaccactatctttgaactagaaaggtaataccgaagttcacatgcatacctcccacaaggtggacctttgagaattttattttaactactctccgtatgggccaaaagcccaaatacaattctagcatagtcaatgtcgctaaagaggatgactggatgatagctaaagaggatgactggatgacagaagaatggtggctcatggtttacaaaggtaagacgaggaatcaaagtactccctctccctttgttttatattataaaatgttctacccttttttattattaaactttttttaagttttgaccatgtttatagagaaaatg

SEQ ID NO: 41332 - DNA, 801 bp, Oryza sativa
agcaggcaattatgataacttcatagttaagattagcatgtcatgtttcaaatttgtgggcccaagtgcattgtcataatgccacttaaaacaactattaagtgaataattcagatagcatatttcctattaaatttctgtatagctaaggaataacattttccttctattagtctacaagtcggtgaaatatccactattttttgatgcgtccacagaggtcacgagggtaatttatattcagatgttcacaatgtgtgaataacttttttcttcctgtggtctcttactcccatgttgtggttggagcctggccatctaccttagctagtgtgccggtccaaccaatgtttgggaagtcggaattggtcaattgactagttgcacctagctgggaattcagggctgtgagacgtgattcgcatcttagccgaaacttgttgacctggcctggctgacttgacagatcaaatcagttcacgtcaatgatgtcttggccaaggatgcatgaggggatatctagaatgtagattcaccttttttaaggaggtacatatgttcgtgggtactccactgttaaggtggtcaattaacttggcattacttgaccattttacactaaaaagttaaaaatatgtcaataagttaaatgacttctgtaatctctacgtgactctaacatggttatttatatacttattggtcacatgatttcaaacaaactcctaccatttgtatctcatgtacttcctccgttccataatataaggcacaactacttttttttatgtcccataatat

SEQ ID NO: 41333 - DNA, 978 bp, Oryza sativa
ctgtcacggacagagtcctttcatttcttttcactctgtttttttttccttccttggggacaaaagaagcttctaatgattcttatgggactagaccacataatgcaacataggccaaggacatagcactcaaataggtattttccactatattttttttgacaccatattttccactgtatattagtatagctttaagcctttaaaggtggtttcaatcttctttgatactttctatttagccctcatagtttttcaatttatgtgaaagtccaaagtgttacactaaacacccagaacctagaaactaggccatgtttgggggagcttctagctgctgcagcttctcccaaaatcaaaagctcccccaaacagctcagcttttggtccagattctgagtagctgtagttgtagaatccaaaaaatgaactagaaaccagaagctaggaaacccagtttttccagattttcaaaagttggctaccaaccaattgtttctcagaatcttaagcttcccaaacagaccataaatctctcctctacccctccactctcccctctcttggaccctgcctcctatctcctctgccctctcccaccacctgacactagcagaatattttggttccatgatttcggtttaatatatagttaaaatattggattttggttttctgattaattttaccaccactagagtatatggttcaatgcagaaccatcgacaagctcgtgctggctgagtgaccgaataggacccaaaaaaaattaggggccccattttttctaattttaatctatcttaatgtgttccaacatgtttaaagctctttggttctatttttaaaaggcaaattttgctataggacataacgacttactgttttagctgtaggacaccgcacgaagtgagtattgggtaaagacaaatataaaaagaggaacttatggacttgaatcagacattgggttgacat

SEQ ID NO: 41334 - DNA, 986 bp, Oryza sativa
gcattctcgcgcccctcactccttcttgtatgactttgagagagagatagagataggagacctgatatgtgggtctagaggtattttagaattttcacgctatttctctcccctactctactagaaatgattattctaatgggcacgatgttcattagaaaatttccacgtttacaaagtaccttctcccaaaagtcattttatgtggtacctcaaagttacgatgaactctaacaaaatttgcctagaatataattatgtgagattgtattataaatattttattgcaatgaatgtaacggtgtgaattagatggtaaattagataagtattttaaagaaaaaatataagaaggaaaaacctacatacatgacctaacaaaaacactcaatcaaacattatcccatagcgcacatggctaccaatcaagcctcgtcttacaagactaaatattgtgtgtgtactactatttagattttgtgttaattgtagcatatgtatcaacttgcctgcagcccatttgtcgaatggttggttggcacgacacaacttttagacgggttacaccgcgacaaacgagggtgatgcgattgctcgcgtttgatcagttacgaagtgggatgcaaatgcaagcgataacgaaaagggagcatcgcttacgaaaatcgatcccaaccaatctgctgcgcgcgcgcgcgccgccaaggccactcgcaagtcgcaaaatcatataccttcatcggcgtacgtgagtgagctcgagcaacttagcaagcacaccgcacgccgcgtcgctccagacccggccgccggcaacggtgacatcggccgcaggggcaattactgctcgatcgttgctccactcctcgccatggcccagggatgccgatgccaatgccatcataggcagcgctggcgctgctactacacttgttaataaatggcccgcctgctggctaaggaggaagccaaattccactacgatg

SEQ ID NO: 41335 - DNA, 714 bp, Oryza sativa
ttttttagtttttaagcgtggcgtgattgtttttggatgtgttcctcttcctttgtaacttctcttaatgagatggcgtgcaattcttttgtgtattcaaggaaaaaataaattcattctgaattgaagatgcacaggaaaggaaagcaattaagttaatgtgaatcaaggaacacagtgcatttgaataaatttaagtattaagagtatatgtattggaacctcttaataattaccaaatgtttattgggttctgctcagcagtgttttctttgacaaaaagtttgtttttatacccacaatatataaattatgaagcttctgcaaaactctttagtattgagtaagctgttgcgaacagatagagcctcagccattattaaatgccctgtgcttatttgatcccgtgcatatatcaacataaggtgtttgtgttggtggtgtgttatatgtgatatttttacgagtaaatatgatcttcactagctgaaattcagttcaatctactgattaaagggtccatctttgggatcaaatttatgatttcttccggtttgaacattgtttttataaactcttgtagatggtactgtttggtcctcccacacttttagtgatttatgtcacagtgtgacctaactggccaaccaattacatcagaactggagggcattagtcgcgttcctccaccacccccatcaacaaccttcactg

SEQ ID NO: 41336 - DNA, 574 bp, Oryza sativa
cctccggttcagtttcaggttcctggagataaaatacttgaataaaaaaaatagaaaataatatttttctagtaagttgcttgtagaaagtgccttttatttataaaaccatttataaaaccattttttataaatttattttttatttgataatttcttcattaaattattacaatcattcaatcccatgtttttacctagctcatttatttcactgtagttgacatgacaacagctgcagactagcaacggtttatcgatgattcttatgttagagataatggaatatgtcaatatacttcaagaatcaatattgtctacctatggtaacatgagtaattagaccaaccatccacatgcttgcatttcactaaaatggtaaatctgcaaaacttttctgatgaatcaaacggaaaaggaaaagaaaaatcacaggagatcgaagaactggtggtaccttcttgtccccctgtgcttgcgtttacggctactgccgccatctccatgactgtttggatcatccatccttcgccgcagaagctcaaacttgtacagatcgattgcatcttgggca

SEQ ID NO: 41337 - DNA, 1280 bp, Oryza sativa
ctggtactgcctcaatgcatataattggatcgatatttaccaaacggctaaatctggatcttagctgccgtatggttcataactagcgatcattcaaccaaggttgcatacacacattcaacttggggtacgcgtgaaatagctgtacctttttactaccctgtcttgctctagacaattgcaatttgtcaccatagatggacactggacgaattgcagtcctgcagacgcaaaacatgatgcatgaatagtgatagtgacaatcaattagttgcaaaaatatgaaattattaataaaaaatatgcaattgtcgctaacaagaaaacttgtttatccgagaaatgcaactgaaccaaagggaaatttgaggcagcactggaaatccgtgatggtagccaagtttgtcataaaattagaaagctcaaaccacatgttttttaaatacttctcttacggttcatgtttcctacttctatgagtttttttttcatttgttatcaagattgggagctcagaaatattttgtaagacacttatatacagtttttcctacattaaaaccatagctatccagctaatggaatgtatgtcacatatttttttcgacctgaaattggtatattttgcactgtagtatttttataaaaaataggaagtagcacatcaaattggattaatcaagttgaagttggagaacgacatgcaaacaaaatcatttgcacgtgatgttcaaaaatattgctctcatacttcaaacagcatcgttacttccatcatcgtcattaattgctgtcccgcttgactgcccaacttctagcatttcatcatagaaatcgtatcttcatcttcattgaaaacttcaacatcatcctcactattgtcgctcagtgcaccaagagcctcttgatcataacttgcattatcaaattctggttgctgctgaggataaaatacatcaatttcagtgaagaaaacaaaaaacaaaaggcacaaagaaagcacagataaaaaaaaaaagctcttaccttatcttccttgtctattagagactgttgccactcaatccattcctgtaattgaggacagttcgtgataatacattactgaagctgctgttgaagtggttgtaaagggcactgcaggtttgggcaatcttttatttttagaagcttgagggattcaaggctgaacaatcctaccacagaaaatagcccccggcatccacttatagctagtgcctccaggattggtaggttcttattgtcaagttcaaggcaca

SEQ ID NO: 41338 - DNA, 1501 bp, Oryza sativa
cagatcaagcaagaaattaaataactaacacagatatgttgtattgtacatgttatataggctttttctgacattattgctatggaacaaaatagcaaaagatggaccttttgtcttgaacaacagccagaatgggaggtttaatttcagctttaattgaaaaaataaaataaaaatcaagtcatcagtagcaatatgtaacacagaataacactaccaattttcagtgcatagtagctctcacgggatgcatgatacatgctggctgtcacttttcatcagcatgtgcatggtttattctgcaagaaacagacaatgaaaatactctgttgatacatgagcataggctaccttcccatacattgaataatgaatagtagaactgtatggagtgggaaaaaaggatagcgtgcgctgcctgcagttaaatactgtgcagtacaaatccacatccaaagctaaattcacctatatgtgatttcacataatatcaagcaagcacattgcattggaatttggaataatcatatatctcattacaccgctgataatgaatcttgattgaaaaggttgtaactatcacattcttttctttactgagattcctatgtttaagcccatacaatggaatgcactgcaaaactgtggcagatggaagatttctattggtattcagagttactatgggatacttaaatggaaaagaaaacaatatacacaatatcaaaacaccacaaattaacatagagagattacaggttagttaacaataaaataatttagctacgtgtttatcgagcaccttaaatgcatgtatatctcagaaattaagagatactcccttcatccaaaaatctaaaaacatatttcttttatcaccatgaccaagaagtaattaactcatccacccagtgacaaaactaatgaactacacacatgcatgtgacaatactccctccgtcccaaaaaaaagacaaaccctaggtttgcgtgtccaactttgactgttcgtcttatatgaattttttttataatttgtatttttattgttgttagatgataaaacatgattaatactttgtgcgtgacttgtgtttttaatttttttcataattttatcaaataagacggacggtcaaaaattgggcacggaaaccggggtttgtctttttttgggacggagggagtaagtactaaaaggacgtcttggttccggtcaacaatttaatttagcatatagagattacaaataggccttagacttttggaaaaccaaagaatgaaataggtattagacttttggatagaggaagtatctaaaagctaaatgtaaggttcatatttagaaaaaaaattcaatccatgaatgaaacaacaattgacaaactataatctatgttgacaaatatatagcatacgaaaagattcatgggacttgagaggcatttctgatggatccagaacatgatgcttattaatttcggggttcttacaacaagaa

SEQ ID NO: 41339 - DNA, 1046 bp, Oryza sativa
gccgagctaataaaccgaacgcccacccctactggttgccatgcttcttcccatcgctcgccacctttatccaccggcaaatgcacgcgccaccatctcgtgtagggccatcgtgagggagagagattgtagagagaaggggtgagggagggaaagaagagttggccactgacatctggggcccatgtgggtcctgtgctaattaagatgggttgaccgtcttcatctcgtcatgtcagctaaaaccattatctctattgcctaaggatctcgtgtacacctatattgcaagttgagagatgcgttatactttgtattatggtttcaaggacgcaatttaatctcgtcgttaagatgatggacctaaagtgaacttatttctttatgtgaagtgttgggtgtaattgggttgtaagttttgcgtctagtgtttttggcccaatttatgccaaacacggccaagactactttcgatatcgaagccgactgatacctattctgtcttgacaatactagcgtcgaccttcaggaggccgagaagaatggggattagagaggatagataagagaagatgggagaatcaccgacaggtgagcctcactttagtttttaatttctctaattattgggctatccattggactccatgtggccaaaaccattctaaaaccactgagagagtatagttttgcatagtttaatagttggaggagtaaatatacccagttttatagttgaggaataacaatcggatctgatctttaaggagggagtataaatagcctttttcgaatcttgattacttgaatctgaatggaccaattaatcattaccagcgggctgacccacgcccatcccagattcccaggcccatataagtgtgacttttagcccaacaggagaaatgaatttcgggcttctgcgcctaaaaacgagagaaaaagaaaaacatatgctcacttttctggcttactgctgtgcagcgtcacccgcttatcatccacacaaacatttcccgacttcactctctcaccggcggcggagg

SEQ ID NO: 41340 - DNA, 642 bp, Oryza sativa
ctggatcagccttaaattttaaaattgaacactattcaactctaaagtatcgtcactttcaatcttgcatcagatttaacgtggccctgacatgcctttgtggcataaggctgaaaattcttttgaattttaaaatttagtaaatgaatttaaaaatttgcttacgcaattatcacttcttccatagtataaacaaaatttcgacttcaccgttcctatacacttttttgtggtgcgtagatttcatagactgcagtgcattagtgccagacaccgtttagcacggaccattccatggcccatcctctgtgatgggccatgttattattactctatcctgccaaaattcccaaaatttgatgttgggataactgacgtcacatttgatgatggagtatatcttttgagatgaatagaatttgatctttggcaaataaaggccgaagtagtaccaatgtaccgtgcagttgagtgccgcgctgggtttttcttaccgtcggttactgcggtaaccgggtttatcgtcgtggacttgtggtcgtgtaatgaaaacaatctgatatactaccttcatcccaaaaatgtaataacttttaactataaatctggacaaaatgtttatatttgagacgaagggaatat

SEQ ID NO: 41341 - DNA, 1136 bp, Oryza sativa
caatccatgcacaaattttattatccgagcattgcatttcaagtttgaaaataagttggaaatatgtttaaattcattatttttacaaaaagatttactgctgttacatcattgcttgttgaagcagttggtggtttgtccctgccgctctcgtcttctcacatgatcttctcttctgtctagttgaagcagttcgggggatccagaggccgaagggcttgttcgccaacctagctcacttagctgccaagctcggctctattggtaaggtggctgcttaattgccctcatgaatcacctactgcttatatttttgattccattcaccaacctctctgtgagtgttatgggtgagttaaggatataattattggggatcgctagaatgaaatgcctaggccataacgcataattctttgtcttatatcacagatacaccttacctttcaaaggtccaattgagttagtaaagtcagaaaaaaatattaaagaacttgaatcttttaaaagaaatttcatgttacatagctatattttactcacttaccttcaaaagaggaagcaggtttgaatgaggccatgttctgtttggaatttttataagtgcataaatagaattttctctattatgtttgctgctaaacatccaaatgaaaactgattgtctttgttttcataaaaaaaaattgtagataatgttgttttcataaaaatggaagctcaaaaaaacgtttctgtgtgttcttgattaattcatttactgaaaagagttcataattttacaaacatatagagaaaagtccaaacaggacatggcctcaatcaattgctactgccatgccctgttttcagtaaatgaattaatcattatgagctaataaaaaaattctggagaaaataagaaattctgtagactgcctaaaaagattctgaaaattctgaataccacatagaaagttctaaaatttgcttgatttttgtaagctatttcatttttgagagctatgcattttactcacctcacattcaaaagaggaaacagacttgagtgaggactgacatgccctgttcggaatttatactagggcataaatcaattgctctctatatgttagcgtagaaaggtgcggtctaca

SEQ ID NO: 41342 - DNA, 503 bp, Oryza sativa
acttttttaaaaaagctgtttgctagttgtcctctcacacccttcttttttttctcgtcaataatgtagaggtccccttccaaaatcgaaacttacatatcttttatggactaattcatgagaaacttatgcctctagcctattggagctccaccatatggcacataacctatacatagaaggtcaatccagcaagcttgcaagagataaattaaagaaaacagtgttgtagccaaactaaagaatgataaaataaaattccaaattaattaaccacaacattttttagaacaataataaccagcttgtcaacatcaaataggtaaatcgcctaaatccgatcctcaaatgtagaataattaaggacgtacacgtatggtaatctgacccacgaaagtgaagtagagaatgacaccaaatttgttctcaattgattggcttcgccaacggacaatttccatttcactttcttgggggaaaaagttatggccaggctgaaaagg

SEQ ID NO: 41343 - DNA, 757 bp, Oryza sativa
tataaaaggaggagctcattcactctctcaacacactcaagcaagctcaaatatctcttctacactttagtttagtattctagtgctaagtggagtagaatagaatagcatctcggagttctcggagtcttcggaggaatttcggtaaggttgtaatagcattcttcctttcttttgtaagacttttggaattaatgaaatattcttcttcatatgctctcgatactttagtttatctaagtattgtctttactttatgtctgtatcggtacagtcgtatagttagcctaccagagaggtgcagttgtgtgggtttaatgtctgattattcagttgctctatgtcatcttgagggatatagtgtagtatttataatgtacacatggtgtctagattattaggtatcattatctgtgtttatatgctacgagtcagtcgaggtgggccgctgatggtgacagctcagtacgatcctaaaaaactttcctggggagggtattcctccgtatttagcccccggatggacggccatgacaggttgtcgtaagaaactcggcaatccggggtggtctctagaagcaccaggagtgcactattaggggtattggctatatggttgtatactaacagatgtagactaaaattgagtgtatattataattataggaaatgacggtttttctatttcttcttatgcttagtctagaaatgattaaatgagatatatgagtgctttgcttcgtgtcactctacccaa

SEQ ID NO: 41344 - DNA, 865 bp, Oryza sativa
ttttgtccttgcaagacagtgacagcatacagtgactgcctttgatcttgttccatgattacttttccttatcttaccaagtagtactttaatgcctttatttccctttcgactttttttttctctctttctcactctgcatctgccgctttcctatactactacctaatctaatctgcagccaattcatgcttcctttttgttcttccatgattgccttgctcatcacctccaataacagtacgtcacattggtgtcatatgattcataggttaattgattatcataatcaagcaaatataaataggatcatatctaggataagagtactttttgggagattatctataggcacctatccaactagtgctgagcagaatcgatcaaaaattaattctgcgtaagttaatgaatcaactagttgagttggtaccaagaatcgaaatcgtgcaaaacaaaaaaactttcttgaaataatttcagttccttcatgagcaaatttttgacaaattgatgcccatcaagtctgaagatttttgcatcgtggggttgcattctgtactaatttcacttcaatttccaggtgacggcaaaccggaggtagagctcaaggacgacatcgagacactcttcgaccttatcataccggcgacgttcccggcggcggcgccggagcccgccgccgccgcgacggccgcctccgccgcgcccaaccactccagctccgtctcgcagcacagcagcgacgaccaggaccactccaacggcgccgacgtcctcgacctgcccatcctcaccggcggcggaggcggctcgtcggagcaggacgactggagcctcgacggcgccgcctgccagtgggaca

SEQ ID NO: 41345 - DNA, 1415 bp, Oryza sativa
ttgtgcggttgataagtgggtcccacgtcgatttttacacggtgttggcattagggatgaaaacggtcggaaacggtcggaaaaaccctctaccatttccattttcattttttttctcgaaaatggaatcggatcggtatactcggaaacggtaacgatatcggttatatcggtatctcggaaacggaaccgtcggaacgggaatataccgatatcggacggaagtcgaaaattcatgtcggaaacagcgagcttgtggtatcatcccgcatttaactatgtatgaagataaccttataatttcacccttgcatcatgcagctcctaccatacgctgttatatgatgattaataagtggacaattagattgatggataatataaataaagttcaatgatacttcaacatcaatgtggctaaagcatacaatgtggcttacatgataggattacagcataactaatattgtccgactttttttaggatatagatttgaagtcttcgagaacaccaagctcacaagctggcatggcttcagctgatcagctccttgtcaaacatcattcattatttcatcatcaattgacatagctatatcgtcgtcctacagtggcacattgcataagaacttttatgttgacactgtataactactgttgtaattaagtttcatgctaaactagactttttggtatttccaggtcgatcacagagaggagtcaagatggtggggcccgccagtggatcccacagtctttcttttcctctctttcttttattttttctctctctctcttatccttcccttctctcggttccttttcctgctctctcgatttcttctctgttttctctctcgttctcttctctgcctttggctccttcacgcgcgcccgagaggagagaggcgccggagatggcggcctggcgcagggcggcggtgggggaaggagagaggagaaaggggcggcatcggtggggaggaggaggctggggcggtgcggcggcgctcggtgcttggctcggtggcacggaagccggcgatggagcatgggggagggaaggtggccggctgcgacgaaggccgtcggggcgaaggaggttgcggccggcgtcggcgacctggtggcggcgcccaacatggcgcggcggtgccctagcgccgatgaagacgacgatgcggtcaggcctagttggcttctttattcggaatgggctgctccttaatgcctaatgggctcctcctcctgctagccaggcccagccgacttccttcttcggaattttgtcggaaatttgacggaaattaccgataaaaaacggttaccgacaaaacggtcggaaaaaaccccatatcatttccgctaccatttccgaaaaagattaccgtttccatttccgataccgacaatta

SEQ ID NO: 41346 - DNA, 654 bp, Oryza sativa
gaaacaacacccgtttttttggaaaccgtttgttttatacgttgtagcaaaatattccatgaggtgatttggttgtgtttcaacttttcaaacgattgaaacattttcatctacttagtgaaacaattctgatctacttgctgtaacagcgctcatttttttcaaacaaaaatcggacgcctgatttgtaggcacctcaagtttttagtaggggtagttaccacatctaattttgggccatttaccatacccccactgggtttggtagtagtgtataggggtgaaaacgatcggaaacggtcggaatcggtagcatctcttcggaagcgatgctcgatcggccggtgattgaccatatttattatttaaacaactcaatatcgacattaatatgatgtataaagaaattagaaaaagcaaaaatttaaaaatagccaaaacgttacggtcggaaatggtaccccttaaacagaaatggcgcccagtcgatcggaaatttccgtaaccgttttacccctagtagtgtagtactaggaatcaactctaaccacccattgctatgggtattttagacttttaattgattgacgtggaggggcagtttagtctatcgcgatgatcccgagaggcaagacagccttgcatgttgactcg

SEQ ID NO: 41347 - DNA, 1888 bp, Oryza sativa
aatgagtagatttatttctcttgccccatgtatcctcctcccaaaaattctcctgcagtctgatgatccctctacggctctaccccatcaatttgtattgatgtacatgaatcagtcatttcctccaatttccttcccaccaaactgcagcattttggtccaacaaaatgcattctaacaacatttatattcagtttgtttatactatcatctacttatatgcttcagtttccaaggtttcaataccacatactatgtggaacaataactcttctcaactacgttgcttggtcctacagttggtatcaacactcatcaatctgaaacccgccgtcgtatcgacagcctcatcttttcgcttatgcttatcagccaaaatttaaattttcaaccataaatttgaaattgattttaacgttttttcatcgaagtttatttttcagattttgcttttagatcgcttagaacacctatataaaagttttattcacaaattatttttttttataaatatgccatttggcttgttccatctaaaagacaaatgatgggggccggaatatagtacgccgcttcgccggaaatcaccggatgtcaagatcaccttggtgtttacttttattgggatgcatgctactttgcttggtcttgcgaggccttaatcgccaagatgaatgcaggccggatctgatcgcaccatatggtcacaactaggagtgaaaactgtacgaaaactttctagattccgaacctatttttgaaaacggaatctatcagtcagaatttttcggaaacggaaatgaattcagcaatattttctcggtaacggactaaaaaatgagatgggcagtttccatcggaactccagaattggtcagaaacttttcggaaattttctcggaattactgaatttttgtaactgaaataccctggattcttttttcttaagcattgaatattgaataccatggtgtttggctgttatttttttaaaaaatatttgttatgcaaatctaaaattacataagaatatttttttcctgcatttaggatttatcaacagcattactcttttaaagatagataatttattccatagattgtgttttgtgatgtaccgttgatacttaacaattggacttatatgattgtgttttatgatgaattgttgaccgttgagacttgacaattggatttatcagtttgaggggttttttccgataaattttcgttaccgtattcgcgccggttcgttttcggtttcgataatattcaattccgttttcgtatccggggtttctgattccgattccgaaaaaaaatatgaaaacgaaaccgataaaagatggtttccgtccatttccgtaccattttcacccctagtcacaactactgtagaagcatggttgctctttattttttcatcaaaaaggaattcaattcaataagatatatgtaaaaatgcgtaaatcagatgtatccaattcaactattatagaccccttccaacccaacccctcctccttgcagcccaacccaattgacccacaccacccatacagctgcttcttgctagaacttttttatatttatatttatttttaaaagatttacaaaaataaattaccgtttcaaatatttgcaaaaatatcctcctcccgccctctaatagagagcgatttatgtgatgtagcagcacggggttcaaaaatatttgcatttaaatccttctcaccctctaaatgtaaaattttctgcaacacatagcatgaagtatttgtatgattgtaaaattctcgtatgatgtcggatgaagttaaagttacatgaaaattatatagctcgacaagatctacaactttgtagttgattaatttttcattaaaa

SEQ ID NO: 41348 - DNA, 3469 bp, Oryza sativa
tttaggcccttctctccctctattagggtgggcgggaggagtatatttttgccaaactttaaaatggtaatttattttttaaatatttttaaaaataaatataaatataaaaaaaaattccttcttgctacaccaagagataactcgtaccactaccaagccaaattgtatatactaatgtccattcgtgtcgattttggtctttctgctagttctagaaaaacacatagcaatcctccgtcaacctaaaagaatggaaaactcactctctctatctatatatatctttattcaagtatcgatcttattttcccataattaaagagttctccatagagcatattaaatatatagaaaagagagaaaccacaaataaaacatgaattatcaacgacgacagctagtgacactactatacaaatgatttttgtgaatgagacccctttaaattgcaagtggaccataattaaccgtgtcatgtacggctccttaaaatgcatgtatgcaaaaatcaattttcgcaagcggacctcttaacttactcacataaaaaaatgagcatattttcacatgtggatcttttaaaggaccgcatgagaaaatatattttggtgggcaggcctcttaaggggatccgctagaattctaacttgccttcttttccctctcaacactacaattttttccaagtcccttattatctcccctcctctccaacctcctctccctcattcacacctcctctctctatctctctcatttctcattcctcccctctctcattccaaagcggcggcgacgactcggtagtgggtagcggctggtggctcggtagcgggcgacgcccgggctcggtggtgtcatcgcccactcggatttggcgacggtggctgtcccccacctagcctcgcacggatccagcggcggtggaaggagcggggccccacgcgaactcggtgatggcgatagcttgcggcagtggacgacgatcggctcgacagcaggcgacgggctcggcgggggctgtccctcacctggctccgcacggatctggcagtgacgacgagaggagcctaaccccacacatactcggcgacagtgacggcgggcggcagcaccgacgacaacgagcgtcgacggcaagatgttttgatttttgagatttttgtttttttttggttttttgtttttgcgtgaggacgacataagcacccacacgcgaaaatcaaattaccgcatgcggttgcgccacctgcatgaaaaaatagcgatttttgcagacattttagggcagatgagcggctcaaccacacgcaaaaataggaaccgaccgtttggaaaaatggttttttaagtagtgtgaggagttaacgtgcagctcttttgctctacaagggcttcgaggagtctaaaatttgaaattaataaaaattgaattgtttcgtgtttggagactcaattatagagttggcattatttaataaaaaaattgttaataatacgtagttgtacgcggttttggggtcccaattacatcatttttcttgttttaataattttataaaattgaaaattgtaattattttgttctacttcagtatagactatcagttacagatttttttttatgttttatagttcatagttaatatatgccaacttgtcataattaagcccatagcttataatagatgagctctaaattacccaacattcagaacagttgggtttttaatatgcagaacgatgttaaatgcaaatctacagccataacaatacaattcatccaaggtcttccggtcttattatgtgtgagataataccaagtgcataattagaatagttatttacttgtgcgaagtcaatagcaaggccgtatatatgatacgtggaatttcagtaacatggcatacgttagtttaattttgaaataatggagtattacttatcataagagggaccaatctttttaggagcacacacaggttggggggggggagggggggattagaatgaaaagagctcaaaaaatattttattatgcagaaaaatataataaaagcatcccaaaacacataattaagatagatacatgctcccaccggtcacaaatattaatttaacatttgtaataagatttttttcaaattttgaccgtcaccaataagtactgttgtaatctcataaacttattagatcttataatatttatctaatataaaattatgatttaagccatgcattggaccttgaaaaaaaaaatctaacttcatatattatctgctagaggaagtacttggttcagagagatcagtgtaacttattgttgaggatgcaaccagcacaaatttatagatttaaacaaatcctccttccagtaggtaaagtatagtagttcctaattaatgaatacctgaagagatgttattagtaagcaaaccagaaactacatcttgaaataagccatgcatcagacctacaacttggatggaaaatgtcagaagactcaggatcgcaagataaatatatatataattatatagctatatatattcaacttaattccttccgcaaacctataaaaacactccagcatggaaaaaattgcagatttaactgtgaacatcatgcacaatacatagtactacttctaaagcagctagtctgtgtgactcgtgaaccccagaaaagatgaagcatatatatatatatatatatatatatatatatatatatatatatatatataggacactcatatggggcaccatggtgccgggcaccatggtatttaatgcacaaaatcactcaaattttttaaaattttcaaattgtgagtatatacctagttataataatttgattcatacctatacttatcaacaaaacaactcaaatttaactttatttcacaatacatgattacatacctaactaattatatgtatggatgctatatacctagaatcaaaatctaacaaaaacaagttcaaattcagttcaaacttgctttaaactagttagtaaagtagttaatgttaatacctaggtaattgaaaaagtttcatactcatttaattgggtatatactcaatttcaacaatggtgcccgggcaccatggagcaccaaacaaatttactatatatatatatatatatatatatatatatataacacctttaatttgggaactgatccgacgaactccacgaggtaggaagatcggagaggggacatatgcttgagcatgacacactacatgaagtaaggaagcaaggagagatattgacgcggctcaatccaagaaacatggctgcatgcgctagatcggtcgaggtgcctgtaatcagccatgccttcggattgaggcacgccaatacctctttttacccaagcaaaaagaccgcaacaagcctagcagctctctttcttcctcttacaagcttactggtcatcgccctctcgata

SEQ ID NO: 41349 - DNA, 565 bp, Oryza sativa
aagtagcctattcatgcaatagttacctatgattatatactacaccattaatatccgatcccacctctcatacacacataacgtcttggggtccgtgttacagctggctataaattagtagccctcttttttctctctcttctcttttcttcttgttatgtggttatagctagcttatagcctgctattgtacttgctctagagagtttatttctagaggttgctagacaaattagtactcgctcaatccaaaagtcttgagcatatttcattttctacttctttttttcaaatgaggatggatatatttatagtatttatgcatctgaggctgcgttcgaaaccttgtgttcccaactaccacttctcgctttttcacgagtacgcttttcaaactgctaaacggtgtattttttaaaaaagtttctatacgaaagttgctttaaaaaaatcataatgatccatttttataacaaaattagtaaataattaattaatcatgcgctaatggaccgttatgttttccgtgcgcccagtatatcttgggaacaatgggtgaaaccct

SEQ ID NO: 41350 - DNA, 565 bp, Oryza sativa
tgtcacaccagtaagcacggagaggaagtgtggtggcagcgagaaaggggaggagtctatagagacaaagagagtgcaatggatcggaaaaaaaattggtgcagtccgggtgcaaaccacattgcctgcagccccacttcggatgtccgacgcgtggataatataccaatccaacagcttgccttgtttggcactatccaacaaggctgcacatggcatgccttggcccggctcccaaaaggggattgtgcagatgtggaacgggacgactcgccttcaggcatgaccaaatcgctagcgactacatcgctggtgactacaaccaccatgaaaagagaaacctttgtggacaacgcagcagaagaagcacccggcgtcacaaggaagatggacatagcagaaaacgaggatctgtggtagaaaaaaacaaagatccatctgcgacgccagtggcaccaccatcgtaggagtgcgaccaccttggtcatgggagaacatgctgaagtggccactgcccatgtcccaaacggcgtacttcttggtgcgcgctgtggtgtcggcaccc

SEQ ID NO: 41351 - DNA, 687 bp, Oryza sativa
ttctaatcattgatcttagtgattctatacggtcaagtaatgcagtttatactaaccaagcctcattgaaatgcccaaagaattttgtcgccttcttactgacaactggaaggacttaattctgtcatcttgcggtaatattcaaattaaaatgatgaactaaacaaggaattataagaaatcatacatacatattaggagacagaaactttggcatgggaacactatgttcttaagaagtggtccagccttcagaagagctctgatatttcgagttttcaggtaatgcttctttcccactacacctgaacatcaacggtgtgttgtagctgcttcaatcttcagacttttgtatgaagtttcatggtaaacatgtatctagctttcgttccagctgtgcacctctaaagctgtactctgcaaaacatgcatctactcattatattactttgcattgattttcatcaagtgcatgtgctactttaaaatattttctgttaagtcaactgatacgtaaatatccgtgtgaaactataatactctagagtctagtgggaaatattttgtagttaatgtataggtatcagttccaaggggctattactaagttgtatgtattgtgatactctagtagcacctctaggtcctgggcccaactctctatagaagcgaatttcaggtctagtt

SEQ ID NO: 41352 - DNA, 686 bp, Oryza sativa
ggaggggggcgatagacccaaaattttgaaaatttcagtccgtaattttgaacctgcttattacatatatagtacgttaatttaatcatgttattacaagcttcccgatccttgtgtatccgatcataaattaatttatcacttggtcatttttgatatgaatggtgcattgcagctgagaaccttgggttggcgacatctccaccgtacctcgccatatcgtcaagcagcagtgctaactacgtgaatggcgtcaactttgcttcaggtggcgccggagttttcaactctacaaacaaggtagttctaattagtttcaactcgtacacgtaattgcaataacaaacttttctcatagattaccaggacgtaggattatatgtatgcatgttagtcgtcaacgcactatatataaagttcattttttttaaaaaaataatacaaatggtttacatatttctgtcgacagtgatatagtcaatttgttttcaacttgttttagagttgaaaattggttttaattacttgtgttaaacattaatgcaggatcagtgcatcagcttcgacaagcagatcgagtactactccaaggtgcaggcgtcgctggtgcagagcctcggcgaggcccaggcggcgagccacctggcgaaatccctcttcgccatcaccatcggcagcaacgacat

SEQ ID NO: 41353 - DNA, 694 bp, Oryza sativa
ctgccatatcggataaaaccggtcaaaactatctagagtgacttggttttgtaacaccgtgtttagttgtaatttttttaaaaaaaaattccaacttttccatcacatcaaaacttttctacgcacataaaaacttccaacttttctgttacatcgctccaatttcaaccaaacttccaattttagcgtgaactaaacacaccctaagttgagggatgactttgtaatccgatgtaaaaataagggacctagtatgcattttttttcaggagaagagtggaggggtataagaagtggacgcttttgcacgggctgaaagagtaagagctttgggtcagattcggcccaaagagaaggagaggattatatttaggtttatcatttttataaactcggaaattggtttttgttgctttaaaactattaagtttgcttcgaaaattcaagtaaaaattgggaagcatgaagaatttaagaaaaatagcagaatggcgcattttagtatgcatacatattggcacattgttcctgcatggtagtgatggtaaactttcttccggatactacaattttcaatttgctatttctcttttagagaaaaatgtttctgaaggagtagggaaggaatgcctatttgcctattctcttttaccatttgtgctctgaatttaagcactctgataaggttgtctat

SEQ ID NO: 41354 - DNA, 2253 bp, Oryza sativa
gaacgttgtaggctccggtggtgtacatgaacatggcctaggcttccttcttgcgggtgggattcttgttcgagttgacaccacaaggggaggccatgccgctgcagtaggtccaatggaagatgaggaaggcataggagaacacgtgaggaaggggattgtggagagagtcgatgggcctgggagccgagccaaggaaccgcgcatcctcgtcccaccgcttggtaccgagcagataaagtcgttggatcgttataatgtccatgtgtcaaccatctgtggtagggttgcaaaggtaatgctttgcatccatgctacaccaatttttttccccaatagatggtcggtgtcggagcatgagcccttctagcgggaaggcacgatacgctccctttgagattcagcaatggtgcaggtgttgagctcaggtgtagtggaatagcattttagataggtttaagctacttgggagtgtaatactctactcttgtgttcttgcttagatcacttggtttaagggtgttcttcaaggtctttttcccagtggctaacagaggtggtctcctcttgtcataggtacagaacccatctttttggtggcattagtctctattttataatagtaaggggataccccaatgcctggacaaacaagcgcgacccaatgtatagtagttgacgttgataaccgaatttgaaaaatatcggagctttccggtgaaggtttgtttgaccgcttaatgtggtcggtcagaccgtatgtctgagcggtcagatcttcagcacaaggttcgagtctaatttagatatttctcgtgtttccttttttagactaggatttatcgagacctagttgatttttaagcctaattagacatgtgaaagaccttaagaagagtccacccctcctataaatataagggggctaagatcgactgaagaaacaaccaatcatcgtcaaattcaatttagtatccaaaccctctatattctacatctccctccttgctacctatcccaagtctattctcctcaagtccccaattgctcgtcatctctcgtatctatggtgttagaggacgtcctagctggcctgccaagcctaggacaaaccgatgtatgttcaccctaacggggtccctcccagttgttcgttcagtggcatctatcactccctacagtggcgtgtctctgagtgccaccgtgggctgcatataacgtgctcaaggtttgcggcgtgattctacatcagcaactggtaatcttgatcttgcattggcccatcttgaggggccccgttgatgcgaacaccttctcctccttctgacgcatggtgtaggatgatcaaggtaggtgtcctggacatcgttgggcccatttgttagcctttgaggctggctagggggtcattaaccggcgggcgagacatgtagcatagtacgaagccacactgtcaccacttatccaggggtggcattggcaagtggagggaggtacgccctatcgtccacgacggcccacaattctccacagcagccacaccatttgtcattaatgcagaatgacacagtaagggagcgtgtatggtcaggtcatacctccttaattgttggggcgtatctgatataggcctctagccccgaggatgacctcggggtcctagcccattaactaccggtcaaagaacgtcggagctgacactatctttaggcatccttcctacctcagggctacctacaggctaacacacactggcgtcatacctttggagttcggggtattcatgtggcactacatggagggcacatactcaccatgatgggtcctaatgtgccccgagtattcatgaacagtagccccctggcctcgtcaccgaaccgaggtctgccatggggcttgcttccgaagcaagggaacacagcatggtgtgggccacctgcggcccccaggagacgtgacagggctctgctttaatgtctccctccttgcaaccgcttatggcttccaaaaggttagccatgattagacgtggtctttgattattgggtggtttgtgaaaaacatgtcgattcagtacttgatgcaaaaccacgcgtcatgctgtggcacttcactaagcctacctagggcacatgcgttgttctaccatggacattggctcaatcagccaccgcatcatggagctgaccgccataagaacggcttgtcgggctgcctgctcatgtacatgaggtggcgtcctcaaggtggtcg

SEQ ID NO: 41355 - DNA, 792 bp, Oryza sativa
ctagatgtttaatatggcccgaggagtttgataagatgtgtgacagaattcaaaaatatatttcaatagaatttttgttgtcacctctaaataaaagaataatgttctaaatgataactatattatgttgaatcatctctaaagagttccttctgtttttgttcccactggttccatttacatggtcatgaagcagtttgcttgctggaccttttgcgtcgcttacatggctcctcccattatatctggcttttaggtaaagactattcatttctttgattgttggataactaagccagggtgatgtgaattgctgattgctgattctactgtatttaatacaaatttttcctatctttttaacagtgcttcagagggcaatgaattcttctgaagttttccattgttacctgttttcagtttcagtaaaaaactaagctcttcaatgtaaatgggacaacaatttgaatagttactataagatcttttgggatcaaaagatttacttgttgcaggcttaactttcatttacattgcagaaacttatcattggtagataaggatgtgttaaaaggggcttgcttagtacaactcaaggcgaggctaatactatggtgggtatgaatttaaaattacaatatctgagttcaaattatttggtataagattgtagtttaagatgttgactgctaataattttaaagttgtaattgcatagctcactggccaaccacgtgctataatgaaatatttttttaaaaaaaaattgtaagcaagtactattaaattgaa

SEQ ID NO: 41356 - DNA, 787 bp, Oryza sativa
ttattaaaaatgtaaaagtttgtcgcatgagactattgtagttatgagtttttttgtgcgatacattatttatcacaaaatttagttttagataataaaataaaaaaatatgtatttatttttaaaaatcataaaaatgaggagcattcatacaaagataggaccaccaatgctcacaatattttttttatgaatgctcccgataaaaaaaaatcaattgtcctattaaaatttcaaataaatattttaatctattacatttgttttattttcaaaatttatgtaaaaatttcctgcactaattatttagtctcattagtttcataaaatgcacatactgtgcattcaaacaaaattttcaatcatttttcaagtttatattcaaatctaaagtatcaagggaaaaaatgatatttgcaaccaaacgtaatactgaaatgaaggaaaatgtaatagtagggacacggaagggatcaagttgaaattttaggggtatagaagggatcggataaatttcaagggtatgaaagggattgagtaagttttcatgggtgcacagggaattcacttaaaaaaaagatggacaatattgcgactaaacagtacatgtacaccaattagtttaacctgctaccattcttatatatctgaaaataaatgatatgcatgcatcatctctctcccacgtgggagtatgcaagaatgcaacagctcctaatagataagtttcaaataaaatcttcttgtaaatcattcatccgattatactactatattagttgtaatt

SEQ ID NO: 41357 - DNA, 1689 bp, Oryza sativa
attaaatcatcgtatgcctatattctcaacagtgcaagctaagggagaggatcacatggcttgatcgatcgatcgattatattcgctcttcagcagatatacgcaagactgaatttgtgcgtagcttagctcgtgtgtcgatgttgaattgggtggacggatcactcactgtaactccgatggaaacatgcacgtaattgttgagtgcggtaaaggtaatttaattagtttatcccgttagttgataagcagcatatataacgagaatcagatacatatcttgcacaaaattaaagattggccttacaaggatccaaatatacttccttgtgggtttataaaaaaaacatatcatatcgggaacaccaccgcgttgcaattttggagcggattcttcatgcatgttatatgcaaatgaaatggtggtgaaaagaaatataccatctattactagctagggtcatatcagaaactgaaagagaaacaacatacgagaaaagagaaattttatagttattaagaaagtatctagaggtatcaagattttacattaaaagttttggtacttcaattttattcaagaaaatatggtacctccggtaccttcttagggatagtaaaattacccatgagaatatagagaagttaggaacatgggatgtgtaccatatattttaaacaattaatgttagcttggtatttattaattttttttagattattagatcataaaaatattatgattgagattccaaaatgactataacttggtattcattaatttggaattttagaattgttaaatcatgaaaaaactacttgataattaggcataaggtataatgttatcaatcgtcctacttaatttcaaatttaaatattacttgtgtgaagagaaacataaaactagttttttttaaaaaaaagtcgtagataccaaatattcagcacaaaaatagctgatctgatagattaaaaaaaatctagtaatactaaatattagtttttaataagatatagaagaaatacatttacaacctcccaccacatatataagctacacacagcataattaaagaggtgttatcctgctgaatgattcccaaaccaaatgtggcaagctcttctccacttgtatggcctttcaattcggataccacgtggacaaccgcttaaaagcacgcaataattatataaatttctagtgcatggcggtgagctccaattgcaggaaagggaatagtcatgctcatatgataaaaagaagagaatcctctagctaatttatacagttttactttcctggaaatgaaattagtgcccatcagtcgtaggaaagcaagaaccttcctctatatgtacattttcaggaaaagatgctctgcattcataaatgcctgcttttgcagtactccctcccttagatcaagtttaatattagagctaactgagttgatctggagtggagttgtggagcagcttaaaaactccacaactctagttcattttgtgagagagctctacccagctccactcccagttttggtggagctgaaactgtttagctgagctctagctccagaaggggtggagctggagttagagctgtaccgaacatgccctaggcctgtttggcacagctccaactcctaaatataactccagaagttgagtctggagtggagttgt

SEQ ID NO: 41358 - DNA, 1788 bp, Oryza sativa
caagcatcctttatagctcgtttccaaaatgagccaagcccgagctggctcacgagctgcttgcgagcttcgttggctcagtacaatagagtcatacaaaattttgcaccttttcttactatttatttgttgaaaatgataactttgattgtcatattatctattttatgtgttgtgatgacatgttaaagaaaaatatcactttattacacattctatatggtaaaatgttgctcgatttctcttagaccctacttaagatttacttgatgccaggttcgcgagccagctcgagttggctcgagcccattaacgagccaatccgagctacagttttaactcgttgtttgtagcgagccaagccaagctgagcttcccttacaccaagctttcacgagccgagccagctcggctcattacctatacatggatatactaccggctctgttccactggatataaaaccagcccgacatcatatatgcaagcaaacacaaaagaacgtcatagaagatccaaacacaataatgactgagtcaatatttgttaatggggtgcaaccaaagtctacgtccccgaagtactgattaagtgcgctagttcccaatctagcataattacagcgtaacaagatatctaccactatcgactggcaaggtcataggccggtcatccctcacttatactactatcatcacatggttataacatgtgtgtttctctatttaagagagaccctaagacgaaatccgactcaactattgttttatacctattacaactctaagtcctaattcgtaagtcctaattcgtaaccggttatgtatcgtatcattttttcatcatgtccacgtggcacattgcgcaatgacaattatctgagcctcgattgtcactgttccataaatctatactttctatatagttgatacccactaacaactattagaagctaaaactcaacatgcaagcatgccacatcatcacccactagcaattactattctatctcatttaaaatcctatgcaaacaacatgccacatcttcacttactagcaattactaactgtagcatattgtaaatcccatgcaagcatgagtgcatgacacatcatctataatatactccctccgtcccataaaatcacgattcctagaagcccaaggtgactttagcagcagtgacaaaagactagtatgctctcaccaaagtacaaagtacaaccattaattaacggtaaaaaaaagacaagcatgaatttccttgtggctgtccttcccatcgtcaatccccttccaccataatagctgcatccgagcaagccacatccatcagcatgcaaagcaagcatcggccacataccagcataccacacgcatgcaaggctccaccgccgccgtcgcgtagcaaagccttcaacacaatggagggaggtgtggggaggtggactggtggagcctcacagctgtcaatgaagaacagagccaagaatagagaaaaaaagatactacaagaactagcaacaaccctaacgaatgaactagcaagaaccccgacgaggccgtgtccgctcgtcgccgccgccgccgtgttcgccggtcgccgccgccgacgaggccgcgtccgcttgtcggcgacaatgccttgtccgctcgtcaccgctgccgccgaggccacatgtacgcaagaacaccggcgtccgctcgtcgcctcccccgccagccgccgccggcgcgttgagcaggagggatgtgcggggaggaaggcagggatggagtgaggggga

SEQ ID NO: 41359 - DNA, 1675 bp, Oryza sativa
atcacctactagttaggatgatcatgccttcaaccaatcgtaacgacgcctctgtggatttttttttcttttaagggagcgtgtgttgatttcttgtgatggacaaacttgatgatcacttcagctgtcatatcttcctcccactgctgatgtgttaaaaaacgatgataattggtacgaactaacagtaaagcttcacatcatacgattattgttcctactggcggtgcaggtgctgcatcatcagagctaggttacgtccctgttgccggatgctagtagtcgttgtaatacctccattccaaaataagtgttgccatagatatccgtgttcagtgttttaaccattcgtcttatttgaaaaatttatagaaaatattaaacaaattagtcacatataaagtactattcatgttttatcatctaataacaataaaaatactaatcataatcttttttcaaataagacgaacggtcaaatattggatataaatagtgctaaaactgtacttattttgggacggagagagtattactcgcttgcatatcagcaagagcaaacagaggaaataattgccgcgacgttagctcgtgttccacaccaccgtgcacttaattacgcgacggcgtacgtggcgttgccgaaatgccgttctcctaggctcctagcctcgtacgaaatcggaccatcaaatgcatgcttttcccagaatgatatgattaaaatggaataagatagtgcaatcatcatgtgtagcgctctcatctccgttgtgccggagcagggagatgattagttcagatatgcgaacttataatccttactcggtatggtcgcttggttattttactccactacttaaaaaaacacatatagatcgacactataggtgacggaactattaaaaccggtacctataaatccttttcacacctctatggcatcgaaagcaaaaaaaaaaaacattcaatccactcggagggctacatgtggtttttaagctggcgttaccgctttcaggggagtgtagtatggctcggccccttcccactgtttagagttagggtttagccgtcgtagttttctaagcttcggttttttattttgccttttctcccttcccctggcataggccgatctggttgattgcgttgtgtaactaaaactcttttcttctaatatattgacgtgtaatccttttgcgcgtaagcgaaaaaaagccaagataaaccgacacatttaagcgacttaggtgtcgcttctatagaaaaaccgatcccaatactataggtgttggtttttaaaaccaacgcctttaatttatcataggtgccagcaatttaaaaagcaatacctataatatatataggtgccggttttttaaaagaccaacacccgtaaaaattgagccatgagccgagttgtgagcggtgaggagcggtcgagaggataaggctggggagtggggaggagcggtcgcctctatcaactcgcggtctctctctctctcttctttattttacctctctttgggtgcttctctctcggtctctctcttgaggcaccccacgggcagcgacggctccccagggcaacgacagcggactccccatggcagctctctcctcgccaaatctggcaggaggggaggtggcgggttccctacaacgcaac

SEQ ID NO: 41360 - DNA, 6819 bp, Oryza sativa
acacacccttttgctttgccccatagggtcctctgccggagtctagggtgttagtcaatggatcaatttaatatagcttagctgactgatattaaagccaatctccaagcatcaaagtgcctaatcccgtacgaatatatatatcatggtccagctattttatattttagttaaccagtttgttgtaaccaccaagcatattaagatacgctgatcgacatggatatatatgtaagttcccattgcagtataatttacaacaaatgctgtagtatcactgtctgaaggcgcccatatatagggtccaaattaaagatgaactcactaccttggggtccactgtcatgcagaaatagtgagatatgaacactttttaccatgtaaaccttggatttaccaatcggtggcatgttgaagctactacattttactccaacttacaaagcaatatgcgcaagtaattacggccttagatctggttgtgcagcttttgaagtttgcatgtcttattttaaagcaagtaaaaaaatgttataaccttcaatttgatcttatcttattgatgcaaattgatcccacgttatatgaaactttttctcgaaaagaagagtattgatgccaacgctgtcgtcttctatatcaaagataactttctccaaattaacggcagataattttcaacaagtgcgacatctcggcaggacttcagtaccactccttttggtttttttttagtgtgggttggtgttcttggctaagtgtgctttatgcacaagttggatgattcaatgaaatgtaaatctcaactggatttgacactgggcctgtgttagtggaaaaactgtctgatcatgactcatgagacctacagtacacacctaaaaaagaagataaatattgtttgcaagggtgatctttcaaaggaaaaaaagaaggaaaaatgaaaggatgaattgataccgaaataaccatgaaattggaccatgatatcgtcccagataataacgtcattccagccaacctctactgatcccctgcatatgcatatcgatcgattgatcgactactcaatctgtcaactatcaaataatttaaaacctgattaaaaactactagatgtgcctttcactgttgattagcaaatcaaatcgtgccaacataatcccagttgtcatgtccgtgggattcgatccatggctgggcttatgctcattttcaaatagattattgtgcgaattgtgctgtggattatctaagttgattactaaaataagttaaatattttgataaataaacgtaataaattattacttaaaacaaatggtctgaataactaacacaattgagagaaagatttatttttttaagggtggagccatacaatgagtttatttttctaagggtggagtaaataatctattttaacaatataaataatgatgaaaaaaactaagcctagtggttaagctcaacaaaccaagacagggacacactgtcgtccatggatggacgtactactgtttatacttagtaggagtatgtagtactagtacaatatgctgtgtagatttgcccatcgttctccttcacctaaccccgtgaaaccgtcacaagggtcgtacaaccaatttcacgcaagtccactgtgactagttttctatgttatcactagatccaattgacaatcctatgattaattcgagttcacttaacttatgttaaatggaaaaaaaaagcgtctcatttccattgcctctttgaaaatctatgggccatgaaccgccgaacggcaatctacttattcctaggactatgttatgtttggagagctcatgggtagctataactattcatataatcttcaattttctcaaacagtttagtttttttttttacatacttcaaatctcagtaggtacaaaatccaaaaagaaatttagtagttataagctgaaaaacccaggttctttaaatctttattagatatttcctgcaatcttcagcttcccaaaccaagccataaaaatatttgtttgtgtaattttaaccacaataattgttcaggactatgttttaggcttatagaaatagtataggccaggtgtatcataatttgtaaaagtattataatattatatttgtttaaacttttcttttttatttgaaaggacttatccaatcaaagtcaccctttgttgaaactttgaaacatccaagaccaagggaagcacaagtgttgtgttggtggagtagctccattttcacaggaatttaaatcctgatatccacaaatattacctagcacggtatcaatatgaatttagtgatgtcatatatagatttgtaatcgactttcgttgctgagtgtgtgaatgtggtgtgtgtatgcattttctatgtaataaaaaaaagcaattggaaaccatatccttttatatcagaaggggtacatgttgtcgaagaagaagaaaaagaagaaagatacatgcttttttccaaggataattaaggtgacttttgctactttccgttgtttttaagacacgttgaatttagatcatgctttgatagtggacgtgatgagtaaacgctgagggaaggcagtacggctgcaatgaagcatagtatttagtacaaccccactgctccaacaaaaacagtttaaatataattaaataacatggcacataggataaacgatgcttcgtctgtgtcaagttagttaaatgagaaattatgaggaaactctaggtcttacatgcatgagacttggtcatttatacaatattcaagactacttgaatatgtaatgtgaaatgaatggtattaaattagcatatatattgaattaaagtttgtgtatttcagagtttagtatacttgtactaattaatttctagacaggtggcgtgaagggatatgaaaactgccgcgccggtagcatatcttgcactacagcacctttaagagcatcttgaacggtctctccaaatcccactctccaaatatctacttagctaactctttatttaatttggcaagttaaattcgttgtttattccaacagcttttctattcatcatctctattctgagtctatgatagtgggacccacctgtcagcctctataccactttcttcctcgttatcctgctccccctcttccccaagccctttttttcttgcggcagtggtggccgtgcgccgcgacggtggggtggcggtctttgtgcgcgggccagcggtcttcatgcccgacgacgacggggcggtagtggccgggcgcggcaacgacggggcggcgatgcggcgacgacggggcggcggtggccgtgcgcggcgacgacggggcggcgccgccctcgctactcctcatctgactccagcgatggaggccacaggtgcgtgccttgtggagagagagggggaaacaggcgtgggtctcacagatggctagccgactttggctggccaaggttggctagcgagggaggcaatttggctagctggacttggccattcgaatagcaagtctgttggagtataattaattttagcctaaaattgctaaaatttagtttggagagtgggatagcaagactcttgagatgctctaaggccttgatcctcgcatctgcacacactagtgcggaacaactcatctgtgtcggcgagaggcttctcgttacgaactaatgattagtgatatgaaaagtcattttttcgagtcgatcaccgtcactgatgactattatctttataaggccacaacatatataagtccatcacggataaatatcattggtgatgggctcggactaaaggtctatagaaattattggtaaatgtaaatctttgtcggtgtttattccacctgttaaaggtgtcgacggtgtgacggatcgcgagttcccgacatagataaactgtccacgataaaaaaaaactgtttattaatttttaattgtactaattattaatttcaccaccttgctatcccagttgattcctctgtatattcacgcacatgcatggttcacttttgtaatatatattatatcacgtgttgtgtttaatacacagcacgtacagttactaacttgcgataagagacaaaattaaccaccaaatgattgtaattaagatactaattaagatgtgctgaactgatatggatgcccaatccggcccagtcgccatcagtgatgtacaggttgtcggttattttgattttgcaccggttcatttgtatatgttccttatagaaatatggctgtaataaagaaatgacacaacgcaaaaaatagggcacgttaaaaatctttagagacggcgattaattatgacatcgatacgatcttcaatactcatgttctatcactaatatttactacacccttcgtccccgaataccttaaagcttttaatttggatgggttaataaagaactggtgtacaaggtaaaagaatatcccccattatattaaagccctttttgtttaggtttataacccaacttataagccgaaaagtctaagcctaaacaaataagcggctttttcgtttggcttttctaaaactataagccactctaacactattaagccaaaagctaagtttgagaagcttttttttggcttatgtgaggtagatgcataactccaccattaaacttaggacattaaatctaccggcttataaatcatataagccaataagctgacttaaaagtctaagccaataaacctatgcctaatcaaagagggcctaagtaggtgcagggctactctcgttgagatagcatagaccattaagggtagaagaggaagttttgtgcaaaaattcatctctttaggttgttgtatttgtgacaaatttaaatatattttgtaacatagggaatacttatataatagaggtttttagaaaaaataaacatatatagatatttttacgacagacgtaataattaatgtcattttcatgtattggtgagttaaaatttattagatttaattatatatgctctcagcattatctgttttttttatctccactttatctgttttagtatggatcggagcaaatatgctacaagaacctttcccagagtgagttaaagctcagctcccaccttggttaaaagcaaggtcaaagaaaaatgcccacatggccacaaacacccgcatagtatatcgtaaattaaatcacgtgcttactactccttccgtcttaaaaaagacaaatcctgagtttccgtgtccaacgtttaactgtccgtcttatatgaatttttttataattagtatttttattgttgttagatgataaaacatgattaatactttatgcgtgacttgtctttttaattttttttcataattttttcaaataagacggacggtcaaacgttggacacggaaacccagggtttgtcttttttttgggacggagggagtactctctaactctcactggtctttattttttttccttaagtaatactagtgttattgctaacagcgcaaatcttatactaccttcgtctcaaaatataagaaattttattcatttaacaataacattttaaaaaaatcagagctagggattttgccaacattttttaaaaaagagcggagctaggaattctgccaacattttaaaaaagagcggagctaatgatgcgtgctaccttaatttggttgtgttagtgttgctaatgatattgaatctaatcacctgaaaacaaaaatacaattaatgtgagatatatggaactccctcggtccatatatatatatatatatatatatatatatatatatatatatatatatatatatatatatatatatatatatatatatatatatatagtaaatttgtttggtgctccatggtgcccgggcaccattgttgaaattgagtatatacccaattcaaatgagcatgaaactttttcaattatttaggtattaatattaactactttactaactagttgaaagcaagtttgaactgaatttgaacttgtttttgttagattttgattctaggtatatagcatccatacatataattagttaggtatgtaatcatggattgtgaaataaagttaaatttaagttgttttgttgataggtataggtatgaatcgaattcttataactaggtatatactcacaatttgaaaattttgaaaaatttgagtgattttgtgcatttgaaaccatggtgtccgggcaccatggtgccccatatgaatgtcctatatatatatatatatatatatatatatatatatataaagaaattttaggttttaggttctaaatttgttctttgttcttagtttgtccataaatatatagacatttggagtattattttcccgattcatccaaacactagctgtactatcttaattaatttgtccataaatagacattatgttcttaatatatctctctatcttagcataaactatatatagagttaaatcattcatattatctattatatagcttgaacttgaatcagtcaaagattgaatcattcttaacagacaagcatatataacaaacagtcgtcccgacataagcacataattatgaattgatcgatggggatgactttgctgcaggcctcacacatcgtagcactaattaagattaagaaaatgcatgcaagtgactactactaagcacaaaaatattatatcacacgctatcggtaccatgttgtcctacttgcatatgtaactttatcttcttgatatcatgaaaaaggcattttgcgacttaccacttattatttata

SEQ ID NO: 41361 - DNA, 1785 bp, Oryza sativa
gatgtggttgattctaattatttaggtttggtagaaatgagattaagagttgaaggcattaccgctctatttggctcatattacgcaaaacatgcgtgagtgctggtaccattcagccagaaagaactcagaacatatttgccacgtgaaggttcagtagacaccactttgtttggagatggattctaatctctcgggacatgtccacccgtttcttgcatgccacttaaatgattatgaaaaaatttcaaaaaaaattagaaaataggttaatatgtaatatatcatttcacaaacatgtaagttcaaatttgacttctacaagttgtaaaaaaaataacaaattaaactctaactagtatacgtatattcacagtcaaatttgttatttttgttacaatttgtagaagtcgaatttgaacttgcatgtttgtgagatgatatatcacatattaacctatcatgtcaatttttttgaaaatttttcataaccatttagatgacatgtaagaaacaggtggacgtccacccgagtgtatttggaggaattccacatcaaagaacaatagtttggacgaaattgatggtggccaatgaaccagagatatatctcaagttctcaacaggtttcagcctctttcattaaaacagtccattacctggttccattgcaagaagagaagcacggtgttcggtaaatgtgccaataaagagtagactgacaagtagacaaccatacgggtacacttcaaactctacgatgaaatactttttttttctcttaatctctagctaatataatatactttttaaaaggctttgttaagttatactacaagagatatatcaacatgggatcccctgatactgataagaatgaaatgccaagaaaaatttagtttctttgcgttccatagtgtcgaccactaaattgctatcaagtgttaaacaaaacatgcgcaagagtaaggagcaaaaaacgaggttcagagtgttaatcaggattcaggagataattaagtaattagtactccagtttagtgctactactaagaagcgacagttgctgccagatgcgaagctcgatcagcgagcgaatcgaatcgaaggaacctgcgcgcggttgtcggagctggcgagggcggaggccatgcatgtgcggcttcaagttcagaaactgaagaaattgagtcttggtttttcctcatgaatcatgagggaaaaaaccagttgtgattgtgtttgcttatggtattactgtgttcaaaaacaccatgaacattccgattttagatcctgtgaggtctcgagatgttgtgatgcatggtcatcaatcaatttcgcagttctgaaaagtttgacgatattcggcttggcggcggcgatgccaccgtctagcaccgtggccggaggcaacatggacgggcaagggctagcaggattgatcatggtcatgcattggcctcgtgaggacatggaactggaagagatgggggcattggaggaaccagatcctctaacgtagaggattctacgttagagggacgtagaaagcagcagcgccgtttattacgcatccgacgaccgtgctcgttttcctttgatcagtccagaagcgcaatgcttcgcggcccagttgcgaacaaaatgaaggggagaaacgacgatcggagaaagaaaacgaagctgccactagtcggccatggccaccggccactcgctgtcgctcgtcgtctcccttgaacgcgtaacatactaacatgtgtgcaagccggcgtgggaacg

SEQ ID NO: 41362 - DNA, 1215 bp, Oryza sativa
tatgcccatatacttcatcgagtcctagttaattttgggtcttggagattgcatttgtgtcatgagctaaaccatagggagtgtgtgagtgtaaagagcacactccccatggcttagttcacacacacacacatagccatcatcatatagagttggcttttgtttagattattccgccacttgtaattttgctgttattttggattgtttgtagtatttttagatttcttctcctacttccttgtttgtattcttagtattcgcttatactaggagcctttagattatcaacgtcaagtccaccacaatcggtttatcaatatctttcagaagatcgggatcatggctaatcacatttcctcgaggaatcaaaattaaaattcccctatcctcatatattgaggactccctccatcccagaataaatttaattttcaccatctcacacatcccaataaaaaaagattaaaatacccccactttatcaaatcctgatgtgtttattcctcactttatctacttcgaatgcatttatccccaactttcaaaaactcagatgcaacaattattaaaaaataaacttattttaggacagatgggagcaacaaaaaataaacttattctaggatggaagaagtagcattttagtttaatttcttagtctacacatgaatgggtcaaagtcaaagctgagtcctcccaaaaccacaagttcctcggtgggaggaactagctggcttaccgtacaatttgcttgaagttattttgttttacccctatttccatttattcttgtatgtatgacttagcgtgtaacttgacttctactgaaaaactacgcatgattagttctaacaattagcatgttcaagaataaaataaatcgaactccctgcgatatagttttaggttataacggctgataatgacaagtcaatgccggatatttagcaaactataatttcggagtatgtgcaagggattgacaaattagcattataaattgaattatctgcaacttcagcctggaagaggtgatgtttggagctttatttggggaacagatatgtacacagcgaaaatattttataagcttaattactcctcgttgcatcctcctatacccatgatttggctgtggaaaaccaaatgtgtcatgaagataaaggtgtttgcatggcttttgttttgtgatagacttaacacaagggatat

SEQ ID NO: 41363 - DNA, 637 bp, Oryza sativa
ttacggcaacgacgacgatggcggcaaccacgaggagggcggcggcgggcgacggctagagttagggttttgattttattttttgggttctttttgttgcgtgtgggcgacgtaagccacctgcactcgaaaatctgattttcgcgcgcaggtgttaaaagtgaaatttggtaagccacggagtcatcatcgacctaaagtcagtatcggcttcatagtcctgaaatcggccaatgagagtcatcaagtcaccaatagtcaaattcctgctatattcggttaaggaaattaatcaattaaagaaagtttatccagaagtgaccgagatcaaggagtagtatgttagtttccttttaactttaggaaagtgtgtttagtgtcctacaaggagtagtatctacccatggatataaatatgtacgtcaggggtcattgtaatttatctcacagatcaatacaactactctcggtgcatcgccaccctctttaccgaggtttttacttatcatccgacggagcttggcatctgacgcgggtctacatcggttttcgatctccaggaaggggtaagtcctacgtttcgttggccctggcaattatattggctacattggcgtcgttcaaggctgcatcagta

SEQ ID NO: 41364 - DNA, 2798 bp, Oryza sativa
gtgtcggggatgtcaacgatctcggagcccatggacacagaaccaaagcaatctgataccaagttgtcacgggctagggaattggaaggaggattgctgcaccagccaatcgcatctctcgcagtgagaggtcgcggaaagttgggacccaagttctatgggccatatcagattatcgagtgcatcagctctgtggcatatcgccgttgtcttcctccgggagctcatctccatgatgtttttcatgtgggattgtggaagccgtttacaggagtgccaccggaggtcgtgccgtctttgcctccgacgcatcatggccaagtttgccttcagctggaaactgtttcgcagagtcgtttggctcatggtctacgtgaagttcttgttcaatggaaaaataagccggtggctaactttcagctcgaggacgaactacttctcagggggagagatgtcacgtggggattgcagtattcacgccgccgcaacaggaagcccgcgacaaccatgtgatgcgcaatccccaaataggaaaatttcctaaaggatttgaatcctatgaaatttaaatccaaaggggctcttactctgttgcagaaatcattctgtgacaactgagctatgcaggacagaagctccagattttgtgacatgcaggtttataatacacaatattacaaactgtcatagtgcaagcaaatacaacttcgaagtaccaaaattgaacatgtttatgaaataaaggaaggtctctaatcccgaagtcaagacaaaacaagcagtcctacgaattcaaaatctgagggcctttttgatttgtaggaaaagtgtaggaaatttgaaggatttcaatcctatggaaaaaatttctatgaaagcttttgaaacaaaggattgaatcctatactatcctttaaaattcctatggaatggataatcctatagagattttggaggaaagttagcgagaggtccaaccttttggaaaaattcctttgagtctatctctctcatctgattcctgcgtttttcctgtggtccaatcaaacggtcattcatgtgtttttcctgtattttccaatcctctgttttacacctgcattcctgtcagaatcctgcgtttttccattcctgcaattcaaaggggccctcaaaatgagaatcttacagatcgaatgaccaatagccatcacatcatttttttttcctcattgttttatctggtaatgaaaattttcagaagttagtaaaagcaagatattgcaagattacagaattacttaaacatggatttagaaaatgtagttatctactgacaatgcacatgtgcagtacaatgaagtgagtaaaagcaagtgagattacgtggggatattaaaaaattcttaacataagaaaatcaagtgggtcaattattaaatacttaacagtatggtatgaaatctaatgccacagggatcaatcaattcaaaaaaaaaagccagaataatgtaagccataatcatcgataattagttcaatgacttactctgccatccatgagcccatgatcatcgtattgttgcactgcatcatctttctgttgtcattacaaaaaaagccactactgaagcatcaactcaattccaccaaacttggtcctaaagtgcatcactcgactcagtgcacagaacagcagtaaggcaagaatttggcaacctcttaccaagtacgatttctagaacttgacagtatccttttctgaaacgcccttctgatttccaccttggatccaaactccaaagatagctcaagcaatgccttgaaatccttttgttcttgccacttccacaaacaatgcctaggcttccaggaagctccataacactgcaatataagaaattcaacagaaaaataacattaagcatctataattgtaacacacatttttttagttctgattagcaaataattagaaattctgtacaattaattcagacaattagaaaaaatgtttgttacagctgggaaataaattaaagtatctaattacatcctcgctactgcgggaaaaaaacattccttttattctttaaacagtgagataatacataaatttaacatcaatcatcatatttctaagtcctacatttcttctccgcattttggtacttagggaagggaagacgagtcatatactccctccgtcccaaaatatagcaacctaggacccattcccatcctaggttgctatattttgggacggagggagtagtagtttacaaataaatcaaaacaactaaccctatatccagaattatccaacattttattgctgatatgaatattgcatgatcgtaatatgctgcaaattattatgcatgagcatccaaagctttgttggtccaaaaatttgatagaacaaaatacggaagtacttgattgaggagctgataggttcccttttgttcttatgctgcttgcagcctcccacttcaattccatcgggcttgcagtggcacgatggtggtcacccttcttggtggtgctgctgccaacttccccatgctgtgcgcctgtgcccctgctgctgatgggctcggccttgtgattccttgttatatatatccaggagtactgatcgttatatccaagagtactgactacattgatccagctaatccaggtggcttgtatacacacctctctttcatcaaaaccctcaccttgtcagcatcatcccatttccctgcctccacacagatgtttgacagcaagacataatttgaggccttgcaaggttccaattcaaataactt

SEQ ID NO: 41365 - DNA, 704 bp, Oryza sativa
  unsure (1)..(704): unsure at all n locations
gctgacgtgcgggccccacatggcagtgacccgaggagggcgctccacggcggaccaggtccacggaccgggggagaagcggcgtaccacgtggcgcacacgtggcaccgacgcggcggtcacgcggcagccgaaccgacggccccgatctacccaagggtagatcggacggcgggtgtggctcgcggccggcgcgcgcaggcacggctcaagctggcccggcggccatggcgcatggcggcgcggcgcgcatgcggcggtggcgcgagacggcgaccgacggcggagagcggcgtcgtgggtggctaagcggcggcgcggcggctagcggcacgggagagagagagggaggggaaggggaggcctcaccgacggcgagcaacggagggcggcggcgacggcgggacgatctccggaatcacctaagaaatcgaaatggagggattagagggagagaggcaaaagggagagggcgagggcgccggccgaaggtnnnnnnnnnnnnnnnnnnnnnnngcgcacggcgcggagtggattccgacggcggattccggtggggaaggggtggacgggatggcccgcacgacggcgaacgcgacggcgtcgatagcgcagctcggcacggcggctagcggcgaccggagcggcggcggcggcggctgaaaagagggccaccgcgctaaggcgctagaaggcatgggaga

SEQ ID NO: 41366 - DNA, 1430 bp, Oryza sativa
cttctccaacgagctccccctttgcaacaacgcttgtcatgcaactaggcaatgcatcgaggtggacatgtctcttcttcggtgatgtgctccccgacatagcggcgaggcaaggcggaggaggccttctccaaccaacttgccactgctaggccttggtacaccgtcttactttcacatctctcttcaccaacatcgattgtgttggtcccccttcactcttgatggcgaactataggtgcgacatgctcttcctccttgcacgacggttctccccaacaataagcaacaagctagagtttgatggcttttatcagtgcttgtaagaagacaattttgtctggtacatttatgaattatgtgccgaagcgaggaaggactccaaaagagggagagtgccatcggtggttggaggaactgtatcgggaaggggggctcctgatccctagcagcggcggcagcaaccagcttcttgctcaagcgacgagaaaaggtaaggagagaacgatgcgagatttgataaacagaagggcgatcgatccattatgtattcaaggggcacaagcacaatggtatttttttggcttgctaatctttgtagaaaataataaaagaaattaaagttgggttaatccgttcaaagtggtaatcatcttatcatagtctatttatctatttattagagtgcaaatcgttgatttacatcttctaccaaatgaggcactgaatagcaatggatctatcaagattggttagggccggccggctgttccgttttcaacatttagcaatcctacctgactctgatttgggtccacctagggtgctatagggctactcatatctcgcccaatttagcacgaactaatcagctaccttgatttgggcacgttgggttgggccgaattggcctagacaacgttccccttacctggctcggcacagactcatctggtcaggtactcaggtcgtccacatatgctcctctcccagaaacattcccccgaaacagtagtgtagctagccaggacaagctgcaacaacaacaacaacaccaccactcacgcggtcgatttcgagttggcaacgcacgcacggaagggccgagacggtgaaacgccacgggttttacacgccaaatctaccccgtttttttcgcccgtctccccgtcaggtttccgcccgtgacgagcagcagcagcagctagtagcacaccgagcgcacaagcgtacgtatacgtgcgtacacggactgacgaacacatgggaacaagcggttaatccaaggtccaaacacacgctctggcccactacgcctcggcccatccacccccacccccatatccgtccccctgccaccggccaccgccacggccacggccacgccgcatctccccctccccctccaccaccaccccaccccgtgtcca

SEQ ID NO: 41367 - DNA, 2138 bp, Oryza sativa
tggccaccacagccgcagccgtcgccggccgtcgtcgcggcgccgccctcctcctctcccgcctcgccccgctgagctccgggccggccaccgcccttcaccgccggagttgcgatcaccgttgcctcgctggctcgccgcgcctcgcaagggaggaagagagagacaagaaaagaggggaaacagaaaagatgaagtgtcatactgacatgtggggcccacgtgggcccacgctgactcagctgccacgtaagacaaaactagggtcaaaactgccgagggacctattttgaccggttttgtatagttaagggaccctatatatctggttttgtggttggaggacgattttgtattcggatgacaagttgagggaccttcggtgtactttttccaacttaggagaacgtagtttacgtgcgtgcggtgtttgttgggccagatatgtgctgcgacatccgtatgggccatcatcaatttcatcactgcatgggccagtgggctgagcttagatgcgacatcgcaagtcgcctgtcgggccgtaacttccatgcacgaatgcatcgagctcagctgtggcctggaaatctgaattgatcgaatttgatcatctcactactccctccatcctctaatataagagattttcacattttacttgcactgttttaccattcgtcttatttaaaatattttaaaattattatttattttttacttactttattattcaaagtcttttaagcacaacttttcgtcttttatatttgcacaatttttttttaagtaagacgagtgatcaaatagtgtaagtaaaatgttaaaatcccttatattagggatggatggagtagtacagtaggtttcatggcgtgtgcattcgttttacgcatgacatgccttgatgcggaatgtgatgtgtgtctgtactgcagagtgtagttctttttgggccctgtttagttttcaaaaagtttttctcaaaaacatcacatcgaatttttggacacttccataaaacattaaatatagataaaaataaaaactaattgcatagttagagaggaaattgcgagacgaatcttttgagtctaattagttcatgattagccataagtgttacagtaacccacatgcgctaatgacgaattaattaggctcaaaagattcgtctcgcggtttctaggcaagttatgaaattagttttttcattcgtgtctgaaaactccttccgatatccggtcaaacgtccgatgtgacactcaacaattttcatttcgcgaactaaacggggccttggtgcggggtgcagactgcagtgtgtagtttagagaaggtttgctttgccctcctggactctcctatccacgcacatcatcatcattcatcatgcgcgaaccggaacaacgagagggtgaaaaaacgtgcggagcccatgccacgggagcactagtgcgatgcagctcatcgtctacggcggcggagcggaaatacttggaccctggagatcaaaacgccggagattcctgcgtgcgctgcgctcgccggattacacgagccacaattctatcgttcgcggtgactgacacacctgctcacatgcttgtcccgtcaagccttactttaaacttgaacattactatagtatttcaaaagaatgctactcctatttataaccacgtttcaaaagttaaaaaaaaatcgctatagtattattgtatttgtgctcctcgaaatttgaaaaaaacgagatgacaatggtgcatgtctaaatatctggctatttaatttgtagatgtatgcgcagccttcctgtgcttggccgcttgggccctgtcggtttgctcaccagctttggtccactccacccatcgtgcctggcagcgtttatgcgtagtagtacgtgcgcacacagttttgtgacacgagactgcgtgcgcagatgtctgggaggcgaattacaacatgtgtgtgcacataacgtaggggctggtgattggtaaatgctgacgacgcaaaataaatgacccgaaccacattctagacaatcaagtggggggtatagggtgtacgcactggtggagaagtgctttttagtcccggttcgtaaccccctgtagtcccggtatccgggacta

SEQ ID NO: 41368 - DNA, 3118 bp, Oryza sativa
aatccaacgacctatcatcttaatgattttctcgaatttaatgcgtgactctccattcttccatacatgattggctacataggcattgagaaatgtaaatattaattaatcgcttgtttacgaggaatgactagtagcatatttaaatggatgataagtacaattacttatccttggtctgtgtgtcaagataaaatatgactattaaaagtagatggagggagtataaatcaataattcaacatggaagagaaaaagttaatactagtgaccatcttgagggatccggctgatgctaccgatcaagcaagttggtaccgcacgattcactcctcagtttgccatgaacaacttgcacgtaaaaggttgctttcgatcgagcacaagtgaaaaggattaacgaatatatgatctataattctgtatcctgcctaagtagctaggttaggtctgtggttaatttcctttcttcaataatactagccacttaaagtcatgcaaacgcgctgacatgagatgtcatctttattaaaaatcctaaaattgttttgtctttataattatagtggtcttttcactaaatgttacttattgcgaagtagtccatatgttacatatagtactactacgcgatattattccttttttttttggcacaacaatcattcttatttcatgtctcaaaattaatcagcaatagactacttagtgcagcccattaagtgcccaattagtaaatgggatctaaatagcaagaatttgtagtattttggcttgatttttcaatcaaatgccctttgacacatccagatagaataaaaatagagagagctggcattcccctctccacagaactttaaatcgaaatataaaaatggccaaactgcgctaaaaaaaattccaaaatacaacagagaaaacatcactaaaatttatccttacccatttttaacgaattggtacagagtgtgtcaatttgattgacaaaagcaggagaaaatcgagttgtacaggtataaaagggaaacttcacacaacgaaaaaggttaagctataagctctgaaagatgttttgctccctcaaggcctatattttggcctgaaagatgttttgctccctcaaggtctagattttggcctgctccttgatctttgtgctcaccgctattgctgagagttctttatgttagaatattcttcggttttcctctttagagatttcccacgccgtaagaaggatgagagtgtgcaccctttttttaaggcctcagcccgtggccagcatcacccaccattcatagattgccgtggttgcgctccatattttcaggttgatttgctcacgtgatgtccaagtgaaatcttgtttgagattttcctcatatacatacactctgtaagtatgtggaaggatgtttctttggtgtattggcagagtgtgcaataaatattatttggccaaccacatattgttaatttatcaaacatctatactctgttttgcaccattaacatatgaaaacacactatatcttttgttcgatattctctataaattttcttataatcatttgcatgcattactagaactaactatattccataccgcttcttctactagggaatagcctgaaactagtagggaaactagttccctatgttttttcatagggaaccctttcatggggaaagatttctggggtaatagaagtgccctaccgttatagctctaaaagcgtaggaaaatttcatagggtttgaaatggtacggaactttgcttacatagcattgtatccagtatgtatagtaactttccttaggtttctaaaactgcaaggatatttttatttaatatattttcctgctcatgatacctcaattatttcccttcaaaacgttaaaatagtaggttcacacttacatcagggtttacacttccatgctattagttcaaacattctaaaatcaaaatgggataagatctttcaaaggaggggagtagtttccaccagcatggctagatgcattaacatacctagagaaattctggccaaagtactttctgaattctcttttttctaatagtggatgggcggggatgatggtgaagaaataatttgagctacaaagcatgattttttggtgaaaagtttagggattatatggagggcggccatgggaaccagggataaccagaagtgatggcatgtgtgaagcatgtcccctaatttcacctgactagggagagatttgttagaggcagctagagtttttctctatggaataggctttgttcggaagtcccctttctcaactttttctttttttttgcgcgcacgattttaaactgctagataaagtgtttttttataaaaaaaaagttgctttaaaaatcatatcaatctattttaaagtattttttaactaatatacttaattaatcatgcattaaaatatcgctccgttataagtgcaagtgatggagccatggaagttgctaacccatgcaaacgaaagcagccttaggcaggagcttgtatggagaggagagagatatatcaacggaaatatgctattggaaaataattggattgacctatgacatggaggaaaatgaaaaaagaactagtgagaacactaatattttggacactaatacggtaagtttggtgggccgtttgttccttacgaatattgtaaaactgggagagaagaaaaatctccctacattcctagaatggtttgagggctgctacaaaacgggatcccgttgcaacgggatagacatattaactattttcttgcacaggtatcgtgtaccatgtagctggtatcataacaggtatcaggtactgtctcataaaaggatatctcgttccaacggaataccgttgtctaggttttctgaatggtttagtacgtgaatttctatttccctttacctacacacactctaataggcaaataattaatcggtaaggaacacggcgatttttaccaccgttgtggcggaaaatgtgggttacccgaagtaaaaagcggagtgcccggaagccggagcaccctattctgttgctcccgggagccacttaaatgccccctctcggagcatgctgg

SEQ ID NO: 41369 - DNA, 1808 bp, Oryza sativa
agagctccacccagatctactcctattttaggtggagctaaaattgtttggctgagctctagctctagaagaggtagagctgaagttaaagctgtgccaattagacactacattcaaataattaacatcggctatatgcatgcacaaaaagttgaatgactattgctaactctattttttaatccgtttttcttctaaaagtatttacgcaaatggacaaacatacctagatattctgaatgttacttctaatgctagatctattggtgcatttttcactttaagaattaattcattatatttttggtcaacatttgagaaaaaagtcaattacatcttatattaaagaaaggagatatacagtacacatctatatcaacattttatctcgtacttgggtaaatatttggaagataagcatatatctaacgttaataaatatctagccaactcacatactcatttctcatttgctctaacgcaaaaaagggaagcatttaggctcaagtttagtcctaaaaaaaatagtttcatatcatcctcacttcagttcattctgcagatcatttttttagaaggcaattactatttctattaactaatataataccgagtagaaggaaaagacctaatataggggtggtcgtgacacgtgatcagtctgatcgacgcaaatgcgcctcccctagctcttggctcccctttccacatgcacttttaaaaattcaaatcaattcaaaaaataagtttcaagaaaaagagaaacaaaatagaaaaatatctacagcacgtaaaaaaatccgtgtatataaattttacatatagaaatatatgcattgcaaactttatacatataaactttatgtataaccccaaaaaaaaactttatgtatagaaacattctcagtaaaaagtattttaatttaaattcaaatttaaatttaaatcaggtatatgaacttttgaatataaactttatgtgtataattgtgtggcatatattgactaatacaatatgtatataatgaattaattcctattaaaatgaaacattgaaacgatagctcccagcggttagatctccctcattagcgattcctagaagtagagcatgcagatagctcgcttgtcatcattatccacagcatgcgattaacgtgacctagtggctaattatgggtagtttagtggctaattaagtgatgaaggtgggggccccactacgtggcgtgttacagttgtcctgagaggtgtggatcttatccgttacgtggacgctgcttccgtgggtcaaacacccctccgcttctcctgccccggggagcccagctcgctcctccgatcggctcgccccagctcagctcatgtctcggctcagtttcaatctggtactccatccgtcctaaaacgttgtactagatgtaagatgtccagatttaccgtattgaaatattacattctgaattgcaacattttagaaaggaggaggtaactcgtaggggtgaaaatggaacgagtattcataagccgtccgactgatctaaggctcacagtctcacacggaggatataggagagagaaaagaatactcggtacaatgcaagtttaaatttgaattcactacaaattatgtgataggatataaaataagtgtatctttgcttatgttccgtattatcaaacgtgtagtaaatatattataaagttaaaatattgactagtcactattttaattatgagctcacatgtatactgcatattatctttttttttcttggtgtatcgttttactccctccgtttcactat

SEQ ID NO: 41370 - DNA, 644 bp, Oryza sativa
cctcgccctcccctcccccagatccggccggaggggaagtggcgagatgggtggccagctggcggcgggatgggaggccggccggtgagtcgattttttttttgattttttttaatttgtggtttggatgttttgatctgtgaatgaatttatgaatcgatattgtgaatgaatctgtgatgttgtgaatgagtatgtgactcgatgttgtcaatgaacctttgaatcaatattgtgaatatatttgtgatgttgtgaatgaatatgtgaatggatattgtgaatgaatttgtggtgaatctgttaatcgtgctgtggagttgtgatgtggatttggggtttgatttgatgatatgcataccactcgattcgggagaaaataaaaaagaaaaaaggactagctgatggactgccgctaccctctctttagtcccggataccgggactacagggggttacgacccgggactaaaaagcacttctccaccagtgcgtacaccctataccccccacttgattgtctagaatgtggttcgggtcatttattttgcgtcgtcagcatttaccaatcaccagcccctacgttatgtgcacacacatgttgtaattcgccttccagacatctgcgcacgcagtctcgtgtc

SEQ ID NO: 41371 - DNA, 709 bp, Oryza sativa
ttaaatttaactcatggtgacgtagacgaatcttagacgtccatttctcgatccagtggtagtttctaaattttcactacatatgtgatttgcactacatattttctctgtttgtacgagttaatttatacatgagtttggtgattctcaccgacgtactatggccgattgagttggactatccatgtaactttcaatatatatatcagatatttgaatcaataactatatatatgtccctagtgtatgatccaaatttttttcattacagtttcagcgacacctaatgtttactatagttaatttatacatgggtttagtaatttctcacggactacggccaatcgattgtgttggatgattccatgtatagttttcacgatgatgctagtaggtgtcgagcctgcatggcggctacccctctttcctggctatcgaggtacttgtgcctctaatgataaaataattcacaaaaaaaatggtacttatatatttttcaataaagtgaatagtcaatcataatgtttaaatgtaaacaattataccgtatattaaaaatagaggtaatattaagtttattctgacgtctcttgccattctacatatatatatatatatatatatatatatatatatatatatatatatatatatatatatatatatatatatatatatatatatatatatatatacgcacatataaaca

SEQ ID NO: 41372 - DNA, 1760 bp, Oryza sativa
acctcaccatagctcaccctcgttctgtggaggctcaccaaaaaaaggtgacttgcctgaatgtgcacattacacatgtgtcacatgagcatgaatgtgcacattacacatgtgtcacatgagcatgaatgtgcacattacccatatgtatgccttgtatatatatctcacaatgtgagagctgattttggagtatttcaacatagttctcttttttaattagcttttaagttgctactaagaaaaactattgcttcaataggcagcttgaagtatcatgcattagtttggtgctatatacctaaggttagccacaatgtggccataaggggctataacctaatacattgtggagattttaagataggctcaggttagaggcaatttatagaccagtcatacaaaacttctctctcctacactctggcttctctctatgttgggaggttgaaaagggtaaacattttattttgttatgggacctaccttaacaccaactttagcgttatacattgtagagatcacaacatatttagtgtggaccaccttgtggtcatgttaggccatatacgttgagaattctctaagaaataataaatctcaaaatgttactttgtgcaaagaacggaacaacacacatgcatcgataagagcatcatgagcttagccgtccaaattcaacaacttgactcaggataataaggggacctacgagttcaataggctaacgaagtggtcatgctaggctcgatcaagatacatcaagagtcatgacacaaactaaatgtgtagtatttgttagaattttaggtaatttcttagctaaatatatgagtgttaagaaaaaaaaaatagaaaaacgtctcaattgtaagctcactatctaacaattttcaccatgtcaagtggcttggcatatctgctcatgtattaataacaagattcttatcccaccatcgctaaagccgttatgacggttgagcatgttttgtcattcacatcatatttatagaatgtaagcttcgatctctcgtatgccgagaacttttccacgaagagatcaatgttgcgtaacgacaaattagttgttgacttatcacaccctaccccatctcactacaagataagagcgcagagtgcatgtatcgtcggcttatatggatttattacactttcaataaatataatttatttcaattcataacatccatgacgtcatggtcaaaaatttaaaccaatagagacatctcgcgccatttactattgtatgtgaaatttatattctatacccacgatggtatccccataggcccatactccatacaatactgtatattttcacacactctttgttttagttgattttgtactcctaaaatttacagtcattctttacatcataataaactcttaatttagaagcagctattatctctaaaacagaaaagtgataaattcgatatatatatttattattttcagtttttgttgtcccatttttccttagaggagaaaataggggaaaaagaaaagaaaatccatcctcattgagattgagagccgtttggtggcctcctcggaaaccctaattcttctcctcttctcccctctcgatgccgccaccgccgccgatgatgcccaccggcggctaccccggccaccgcggctgcggcggcgaccgctgcggctccgggcgcgacgcctggcccctccacaacgtccggcaccagggcgtcttctgccgcctctgctcctcctgc

SEQ ID NO: 41373 - DNA, 1710 bp, Oryza sativa
ggcgcgcgaggaggcggaccgcgccgcccgggaggcggccgtggcgcggaagcacgcgcgcgagctgctcgacgccgcgtgccggcggcggagccggaggccttggaagccaagaagaaggccgaggcccccgttgcgcccgcggccgcgccgccaccgccgccgccgcagcccaagaagaaggcacccccgaagagcagcgaggcgagcagagacagggacaacaagccgctcaagctcaccgccacgcagcagccggcgctggcgttcgccgcggccgccgctgccgcagccagctcgatgccattgtcaatgccgtcacccatggaggtggacgagaagccggtgatagaggagttgcaaggtgagcagaacactgaaccagccaccacattgatcgaattgggagataattgttctgtacaatgattggtatataattcttcatcgaatttgggagctaattgttctttacaatgattggtcttcatcaaaattgggagctaattgttctttacaatgattgatatgtaacagtcttgcaggttcaggagacgggtcgttgatatatgatcgtggctcgctgttcgggaccttgcaacggtgagatttgggcgccgaatcctgcttcttcttccatggcattatgcatcgctgtagcgcattcgatcctagaagagaagggcactcaagttcagtggtacaaggattgcaatgtgattgaatccccatttttgagtgttcttgctgtaaattctagtcttgacttggtacatgatccttccatcaactgtagctcgcctgcatcttatataccctgtttgttatttgtagtacagcgaaatgtgttgctggtggatgaatcgcatatggttttggttttttcttaaatgaaatgaactagattcagaattcatgaatacataatttctttgctggttgtgggacctgttgcgaatcgaagacagtccttctgcttatttgtgtgttcttccatttttgttgtctgtcatggtatggcagtggtgagttcaatcaaagttgatggtgaggctgacaatgctggagaaatgctgcaaccatgtcattgctaatgccttctaccattttcatcagatatctgttgtcagtggtgttcatgtccaaaacaaaacttttgcagctctccattttgttgttttcgtctattttcactgtagatttgcaagtttgagcagtccctgtgtctgtgatgttggcattggtcttggttggttggatcgtccaactagttcagaacagatcttctaatcatccaatgtgataacagattaacagtgatgctgcagttgtttctcctgggctgttaatcttcattacctaaattttcgaagctttgcttgataacaagaacaaaacaatgctggatacagaggttgattagctgctggagctggaggtacacactcctctgctttagctggaagcagagtttcgctggttctggggtttgctcctccttttcgtctctcaaacaagtttacgcaatcttgtagtacgccttcggcaaagcttctttggaagctgtctcaggtgggcgcctttcaccacagaaaacgtaatttgccacacatctagcaccaatggctccgttcattgttccacagcaggtacggttgctgcagccgcaacgcagccacaagtagcacaaacgaacagccacaatttttc

SEQ ID NO: 41374 - DNA, 2033 bp, Oryza sativa
agtgggcagcaggtttacagcacacgtaaaaagtccacagagaaaagatggaagatgccgggctgtgtctgcaactgcaaaccacaaccacaaggttttgctcttgctgctaatcttgcattaatctgctatgtctccccatccccaagttggagtaaaagcagacgtttctagaattcgtgtcgtcgtgtccgtggttaattacatacactatttactatagtagtagtacttatcttccagggatgtggataattacatgttcacatcgatcctgtggtgtaaacatgtctctacatccattgattcatggcgcacacatcacacacagcggcaatgtatctcctaacatatgttttttttttctaaaagaaaagatggagaccagcgacatatttataatatcactaaaatcatattgaaattttgcttgtgtgtgtaatatttgtggatatcagaatttgaatcctgataaatggagtcatgcacttatgatttcaccatcataccaccgatgcttcttctccggtgttttagtattttttttagtacttgcatgcttgtattttatttatggatatgggagtaaaatacaatgccaaaaaaaaaatgcttatttgtaccattaagatatggacataacttaattggtaaggtttgttttggtatgacctgtctatccaaatctgagtctctccaacttaccacggtagatgacttaagttgtgtttgattgttgatagcaatggacctcgaggcacactaatgatttatgattttgtaaatctttaggtatgccggttcaacctttcagacatcttcatagtggtagaaaattagtatgcttataagggttagtgtgtacacatgtatataaacgtatgcgattgtactgtatttttcatagaaagtttcaataattaaagatatatctcttttgtaccgtgttttatgagaggtttcaatagttaaagacatctccatgtattcaagagcaatcacaccaatgcctaggtattattctctatctaaaataaattaaattttgcatataaatctggatataacctatatctacattcatatataaaattttattttaaaacggataaagtagagtgctgcaacttaaatttcaggtctcactgtgtgcttgttggcttacaactgtagccaaattttagtttctttatcatggtctatcgtcagccttcgcttttaaatcgctaataatacaggtataaaaaatatattttactcttaaattatctttgattcattcgtttaattctctatggtttattattagcgcaccatttcttgcataggatttgttaacacatatattcttgtaaaatatttttactctacaacatatggtcacacatgcaaaaaaaaaaaacatgttttttcagaaaaaaaacacacatgagataagtcgttgtaggattgtaggacacattgtgggtgcacttaacccatgaatgctgacgtcacggacagcgtctggcccacggtgggccctaggtgccacgtggcccaatcatgcttacccaaacagccccaaaccaatgtttcccgtgggagaaaagggtaacttttctggccttgtcaatctcaatcactttcacacccacgctaagcatgatcttgtgggctgaaatctctttcaaatgactaatctacccctcaatggcaccatcacatgcttgtttaaccacaagttgagacattttaggaaagtataatttgggaaatcagagcactgaaatgatatatgtggctgttgataattagcagaagctagcaagttgagacctttttggtgggcaattttgggaaattgatcagagcccagaaataatgtggctgaggataattagctaatctagcaaagagattaaagtgggcaaggaggataagactgtgtgcctggacaagcacaagcacagacaactggacaagagggcattatataatattatattacagattaaattattgggagcatccaaaaattaattaaaaaaact

SEQ ID NO: 41375 - DNA, 2712 bp, Oryza sativa
tggtggggccaccagttgcttgtgttgagaggtttgggatcctgcaaggctccaccatgtcaaccccccaaaaccatggggatcacattgattccttcatccattattcttaatcccgccacttggcggcgccacgtggcggattaatccaataagtctatgcatggggggtgagtcattaggtgaccacgtaggacccggtccaagtgtccagaaagtgacaattgaaggacatgatgcattgcatcatcacgttgctggggacaatccatatgcatgtgcatatgatcagagagtatgctagctaggaattgctgcttgtgcttgataatccgaatcaattgagggtgtgtttagttcacatcaaaattagaagtttgattgaaattggaacgatgtgacggaaaagttggatgtttatgtgtaggaaagttttgatgtgataaaaaagttaggagtttgaaaaaaaaagtttggaagtaaactcggcctgagtgtccgtatgatgtatgtgcgtatgactgattgataattctgttgaatgcagacgtgtgttcatatgcctgcatatctgttttgtcggtacaacattagtatggaaatttccctttttcctttccctatatgtcgagggttgagttttgtatttatccctagcttgtcggtgtaggcacaactatagtgtgcaacaatatccccttcattcaaaaataattagtttttaatttgaggagctacctctaaccaataatattttttataattaaattatgtgctcccccattttaaattacttgtgcgcttctagctttgtcctaaatcaatcttttctatctttgacgttaaacaatttctatctttaacattgatggtcaaaatgtcaaatatgatgttaaacatattgtctctttaaacatatatagattgtgtaaaaaaatgtatgtatgtttgttttggaaaataattttgtggtatcttcatttattgggatttcgcaaaatactttgaaacaaaaattactagtcaatgctaaattctgatgtccaaaacaatataatatgtttttatggacgggagagagtagcaatgctgttgtcaaattgtgttgataagtctaaatgcattgaattcaaatatatattttttaaaaaagctggacactaatagcaggtacaatagcaagctataagccagctataaccacatatcgagaagaaaagagaagagagagaagaaagcggactacagatttatagccggctgcaacacggactccaagacgaagaaagcggactacagatttatagccggctgcaacacggactccaagacgttatgtgtgtatgagaggtaggacagagtattaatggtgtagtatatttttatagataactattgtataaataagctattagattagctatagatgatttaaagccagtagttggctatactattgaacttgctctaaggaaggatccgatgtagaatttattaagaaagagggtgagtatgttccaccaaagtcgaacgcgggtcacagaaagcacaacgctacaccatgccatctgcgctacgtgcagcctcaattcaaatattcattacttttccttgttttagagatgaacacttgaatttaataaatatatcatcggacatcaacaggacataggatacaagagcacaaaaaaaacattagttctggctttaaaaaaaaacaagcaagagaggtttcttgcgatttgacaatccaacgaaattgatcgatcttgcgacgtacacgcgtacgagattacttaactcaccacgagtttgatcgcatatgtgccccgatctttgattctagaaaaccgataaattaacacgcacgctacttgtcttgatcatccaatttaggaattaaaaattcgataatcttgacgtttggtgactgatcacgcccccaacaacttttgatccacaatgcaaaaagtacagttctttatatttttcaaattgattccatgcaaatatagatttaatattttaaggagatactgagttgaaattcatagtacgtgcggaacaaattttcaaatgagggagaatcaataaaaagtgacatggtgtccgtcttctatacagtacggcaagatttgagggttttgaaatcgatttatattttttcctataatttatctttgtcttcttttcatgatcgatttcggtggcatgggtttctctaatgactatgctatgattgagtcgttgagactatactccatgtgcaccgatgagattgaataattaatccatcaatcttgttaaacaattaaagattaattaaacagagggaaagatatcaaggaggagagaagggaagggaagggaatgatatgacaagcgaaggaaaaagagacgacgagtacttaaatatgttagaaaacacttcgaaagattcatgtagttaattttgttatttatttcttggtgtgatttggctattgggtctaatttgggtaggaagtgatctctaagacaattcgagcacacaactcacggatgtctccatccatcgtgtctaccgctggcttcccattcgtcacatatagcacatggtttgtctagccgattaggtaacatttatgactgttgatatgtgggtatatatatatatatatatatatatatatatatatatatatatatatatatatatatatatatatatat

SEQ ID NO: 41376 - DNA, 756 bp, Oryza sativa
ccggcctcgccggacgcccatgctccggcctcgccggagccgatgaacgccgcggcgagcgtggcggcgccggctagcgcctcgccgtggccagcgcgccgcagaggacggccacgccggacgcccacactccggcctcgccggagccgatgaacgccgcgcatctcctcctccagctcttgggtccagcagttcccggccatggcagtggctcgctggcccgcgcgctactactactgcttcttcttggtcggctgccaccatcgggcgggctcgacgaccttggggaacttgtcgagcatggcggggaggagaggcagcgggtaggcggcatcgagcgcgagcacccggtccatggcgtccagggagatgaggacggagcgggagcgacaaggtctagggagaaggagaagaagaagagggcgacgacgccgccgccgccgccgtccgccggccgccgtcgcggcgccgccgctcagcaccgctcgccgcccagccgtctcggtctgctccctacccatcggcccggcctgcgcgagagagagagagagtagagagggaaggaagagagagaagaggggaaagagagatgacgtgtacacctggcatgtggggcccacgtgggtcccacgctgattcagctgccacgtagactaaaaccggggtcaaaaccaccaagggaccttgggtgaccggttttatatagttggaggaccccgagtgtctgtggtattacggttcaaggacgttttttat

SEQ ID NO: 41377 - DNA, 536 bp, Oryza sativa
gtcttaatcggttgattacatctcatatttcatcggtttagctcgctctgttaagatttctcacctcctcttggatgtattattcatgtatatgttgtgtggtctggctaagtttttggtctgtcctgataaatgctgtttaaggattctttctttgttctttttttttatggacaaaatataatctttgtgccttactgtgaattgagtctgttggctatatcgttcccggtttattggactatagatgaacatgtaaccctatatgcggttgtgttttctccttacaaagatcagtagtacctaattcagctagttagaagtggtaccaaggctgtaaatttccatctttttctctgtgaggttcatttcccttttaatctctgtttcgtgagaaataccccactgtttgacttccagtaaatctgttctctatttctagttcagttaacctgctattattgattctacaatttaagcataataaagattaatgtctattagttttctcaattgatcatgtggcacgtatttta

SEQ ID NO: 41378 - DNA, 511 bp, Oryza sativa
ggggggggggggggggggggggggggggggggggggggggggggggggggggggggggggggggggggggggggggggggggggggggggggggggggggggggggggggggggggggggggggggggggggggggggggggggggggggggggggggggggggggggggggggggggggggggggggggggggggggggggggggggggggggggggggggggggggggggggggggggggggggggggggggggggggggggggggggggggggggggggggggggggggggggggggggggggggggggggggggggggggggggggggggggggggggggggggggggggggggggggggggggggggggggggggggggggggggggggggggggggggggggggggggggggggggggcgggggggggggggggggggggggggggggggggggggggggggggggggggggggggggggggggggggggggggggggggggggg

SEQ ID NO: 41379 - DNA, 685 bp, Oryza sativa
ttaaaaagaagaaaaagattggcataaatactcctacagtagagcaagaaacaggtggagaaaaaagaaaaaactgaaggcgaaagcaacaggttggtgtgcagctgtggctactggatatttctctcgtcttctcgcagggatgcaggtcgtctgcagtactgcactcactgacatgtgggccccacagcccccgggcccacatgtcagtgagcagtactgcaggatctcaattgttctcgcaggctcagctcagctacccagtacccaccatggcgactgattgactggtgagaggatgggccacgtggaccaatggcggaggactccatggatggacggtttaagcttcatggcccatgagattaatttccttcaggaaggaaggcccagcccaactgtacagggcccatttgtgtccaaaactgacgatccagttctacatgctaaaatcatcctccatatcgacctcatttccagacaagaaaacatgaaaccatcacagattgcatttccaacatgaaacattcatctcttctggatcaacatacatagggttcatatgttacatcaactttagcaggggcgtgattataccatacttttttgctgtaatactactattgctcagtacacatcatcatatgtaaggcaaaggttgggctagttgttcaccatgcccagg

SEQ ID NO: 41380 - DNA, 1974 bp, Oryza sativa
agttaaatttaaaacggtttgactttgaccaaagtcaaaacgtcttataacctaaaacgaagggagtagcaacaattcagacaacttgccaaatgttgaccatggccaaatattttcatagccagaataattggtaaggctaatactggcatagaaccaaacaggctcttactctagtattcacttctttcatctaccactgttcctccgggtacaaaagcaaaatcaagaatggtagggtagcatcttatcttggcgactataattttagtcatatagcattgaaagttattggtttcagtatttttcttctcatctttgtcacattgaagccagattctattagccataatgcccttattttgctcgcattggaggcgtcagcaatgatagtgagggtgatggataaggcaaggagccacacacatgtttgaactctttctccattgcctttgacaggctgcctgccagccctagcaatccatcaagattgagctaaaatggacagagagggcaatgttagtaatgtgcatattgatttttggacaaaaaaatcggaggaaatctaacggttgtttggacggaatgttataagagggagcaaagacaactttagctgctaataatgtaaatccatgtccttcagtgtctcaatagaagttcaagtataattctttgaaagtatagaccataagtatcctgcttacattggtaacaacagaatgtacataaaactgttaccagtttagccatatgcccatatacgactaaaggcaataaccagaatttgtattcagacccaactcagctaacagctctattgatacaaagagatagaaactcgaaaaacactcttaaaggagactagtagactactgtttttacacaagatctattgatgcatatttttcacatccatgacccatgggcaccagatatgtctagaagcaaaaacaagaagaaaacaccttttttcacagctcttcaacaatgcaatccagcttattgagctcactcgtctggtccaatggcttccattgctgcataaaagattggatcttgttgtataaaatcgcaatgcagaggaggtaacattgtactgaacacacaattttcctgagttacaatatttgcagtaaaaacgataggattcctatccagttctacgagcgaaatgattcaactacaggaaagcgcattcgaaaacacccaaagtttgacaaaacataataggttaggtgacttgatctgtcttcaaagcatgcttccaacccattttctcttatagccaatttggttttccgaatgactctagttacagaataatatcaaaatgaatatctgaaattttcatctgcattttttttgtgacccatagatctttcatttaaacttctaccatccctccaaaagttagacttggtaacatgctactgtactaaaagcatatttttagtttttctgtagacaatctccactttctacgcaacgaaatgctgaaaagacttctaacatagctacatgcttgtagaaactttaacaaattatactgtaagaaaacagaaattgacataaagcaacaaactttcatgtatcttctttaaatgtggacatccataaaactacatttagttataacataaaagaataacacgctataattatgaatgcatcagtctaacaaaaaagtgaacagaaagcaagttaaattggtcagccaacagattaaaatcacagtaaggacattccaacaactaagtacatggaaataattagatctttttatgctaatgttacataaaaacaaggaactacctgcagtgtagaaacttgtgaagggatgacagcgggtgacgacattgcaatcaaaaagtttcttggactgcattgagtcaactcggaacatgtagaaatccgtatccaccactaaaataaacgcattaggatcctcggaatatcccacgatatctgttt

SEQ ID NO: 41381 - DNA, 686 bp, Oryza sativa
ctgcaccccgtgtgggtgtggcgaaaggtctcttcggctacagcccttgacgccatagcttattggtactatggcgaagggcgtgggtgggcgaaacctgttcgcccacagcccttgacgccgtaccttattggtactatggcgaagggcgtgggcgggcgaaacctgttcgctcgcagcccttgacgccgtgccttattggctctatggcgaagggcgtgggcgggcgaaacctattcccccgcagcccttgacgccgtgccttattggcactatggcgaagggcgtgggcgggcgaaacctgttcgcccgcagcccttgacgccatgccttattggtaatatggcgaagagcgtggcgtgtggcgaaacctagtcgcccgcagcccttgacgccgtaccttattggtactatggcgaagggcgtgggtgggcgaaacctattcgcccgcagcctttaacgccttgccttattggcactatggcgaatggcgtgggcgggcgaaacctatcgcccgcagcccttgacgctgtgccttattggcactatggcgaagggcgtcggcgggcgaaacctgttcgcccgcaacccttgacaccgtgccttattggtactatggcgaagggcgtggcgtgtggcgaaacctattcgcccgcagcccttgaccgccggcctttttagtacta

SEQ ID NO: 41382 - DNA, 690 bp, Oryza sativa
tcacatatacgctacccctccgactccgagcacctccgccggcggccaccgctccgaatcgacgacctgaccacgaccaagcagaagcaggcagtcagtcagtcaaacctccattaccacatccaacaaatcgagggaaagaaagagacgatcgatcggtgctcacaagtagagagctacaaaagagaatttgcaaaacaaatttgacacagatgataagtggcaatgtgaaaagaggggaggagattgaacttgaatccggaggaggaagaagaagaagaagacaaagaggaaacttgcagcaattggggggaaaaacaaccgagagtccaggctggccatcccgactacatccaatacaacaactatataataataataataatttaaataaacacggaaagaaggaaattttaaaaaagaagagacacaacaacacaaggggcgcgtcgggatggtccaagtcagcggctggcacgcattggggaatcaaattgacggctacgaaccacgcaccatcgcaaaaatgacacaggacgaacatttcacatcaaaaaccgataatttttcattccaaatcatcgactttggatccccggaaaatccaattgcaacccccagtcagtttcatgggggatcaaaaatctcaaatttcccaagtgaagcaagaaaaggaaacagcttgcgggg

SEQ ID NO: 41383 - DNA, 633 bp, Oryza sativa
agctccgactgggtcggattcggctgcccagtgcccacgcagcagagagctttcccgacggcgctaacgcagtgttacattaatgggctaaattttattgactcgcatgaagtgctatgagtaataataccaccttaaaagtaaagaggtctcaacttaaatatgaagctagtggatagactttgttgaccggttgagaaaatacggtaactgattctgtatcggtaatattaacgagcacgtcgcttactgaattaagcacacggttgatggtcccgaatgttactcttgcgcatcgcttactgaattaagcacgcgcggttgatggtcccaaacggtaataaacacagtaattgattctgttttaatgagcatattggttattgggaattctctctgcggttgatggtcccgaacagtaataaacatggtaattgattctgttttaatgatgggaattctctctcgttttgtaacggacgataatattaacgagcacgcggttgatggtcctgaacggtaataaacacagtaatcgagcgcatcggctaccgaattaagcacgcggataatggtcccgaacgttactcttgcagttgatggttccgaacgttactcttgtgcacgcatata

SEQ ID NO: 41384 - DNA, 663 bp, Oryza sativa
ggaagaaaatataaaattgcaacatcaagaggccagtgaacaggaaacagattcagagctactagctcaagaaacatgtcagagaactcacaaattcagcagaggtactagctcaagaacatgcaagagaactcacagattcagcagagccacaaacactaataatgctaaatgacctgacaagtgattaacaacatcaaactggtacataaggatgttagtattaacatgtgttcaacacttcatttttcaatgacataacaagtatagtccaagccagtcctggcctgctaaccattcttagcgacttgatccaaaaccaaatctcacccaaatgcttattatttaatctgaagttcttattcaataatccaaatgagtagaaatcacttctcatcaaacaaatcccctgctgcttgaagaacaaacaaatcttgaaggaggaaaaacaattgaccggccgtcgtcgctgcggcacaaggtgtggccggccaattggaactgcagccctcttccatggcagctcgaagttacctgctcccagtctcccaggccgatggagccagtgatgggtagagagttggaggcagcagcacgggtagcgtagcaggctcgccccgaacacacgtgggggttggggatggctgctgcggcgtcgtctcg

SEQ ID NO: 41385 - DNA, 1800 bp, Oryza sativa
gaggacggccagtgtgtgatggctgcgcagcgggaggtgatgtcggtggaggtggagcccggtgaggtggtggcatgtggggactggccgggggagggcgtcggtgcagtgtgcccacgcaccggcggaggtctagatggtggtggagcattggtgtatctgtggtagattggcaggtggtggacggcgggtgaaaacccagctcgtccttgctcggaccgacaacgatggtgctcgagtgtcattccccctcctgagggcgttgtcgtgccgtctcacccctcaagggtggttgccgggcgaaaggtcattctctgcccttttgagaccttggtggatggcggcggcggtgttccgtcgcttatctccttggagacgttgtctaggcatcccctcgccgaaaccacccgagcaattggtgcaagcacgctctagattctcatcctcttgtggtggcgtcttagtttttagaagttggccacgtcggagggcttaggggaagaggtgttccatcttctctctcaccccctctccctatatccttaagacttggatagagttggactttgcgttggttgtaagggtcaagttttgggcgatcttggctgtgttccgttgttggcctagcggcggttagtcacgcttagcggcggccggtccggtgctagcctgctcctggacttgtatgttgacactatcggtgtgtgggtggtagtatattttttcgtttttcctggttacgatcttccatggttgtaattatgtaattttttcctgctttatcaatagaacttcgcccgtctcgtgcgagtcgttaaaaaaaaaaactttatgccatggttcgatgtgttcaaaacagtcttacttttaaaaacagtcttgcttctacagcacactcttgctttgcctgagagctcttgcttctgctacatgaacaagcatcaactatatatgcaacaagcagctggatgcagcttgttagctctggcctgtgaggcgtgcacacagcaagcaagcggtgaggcgtccaaatgcagcgctcaccttcctggagtggagctgcagcatctaggtgccatcaatgcatggaggaggaagaaagaggtctccaagtaaccagaggaggcagcgaggacaaagccgttgccgttcccaggccatcaaaggctcacctcccacgtcgcacggatctggagcctggcgtctttcactcctccgcggtggcacggagcactgtcgacactgcactgggctgaccacagcatacgatacgaacaatctgacggcacggatggaccgcgcgtccctgttcctctacaccacggatgccgcctcgctcctcacttaaccgcccgtggtggggctgcgtcagaactaggcggcctggatgtggaagccgccaaactcgctgttccccgagccgccgccgcatgcaattggttggccctcccatctcgtccgatgcggcgatggcgccagcaagaggtaaggactgagcaactcctgtcgtcgctcaatctggccgtcaccgatcaacatccctggtgcagaacgaaccaccacgccggcacccctcgtcgttaggaacggctcctcgtgcgccggcgaatctccgagcgcgcgcgcggtagggtggagaagggaggttgcagccggatccgagacgccgccaccatcgtctcctcgctgacgccgatcacttctccccgtaccaacaccagatccgcataaatcggaataaataaataaagaaaatgaaaactaggatttatgatgcactggtaaataggtgatgaaatg

SEQ ID NO: 41386 - DNA, 676 bp, Oryza sativa
ggccccactcccgtggacccggtccgcgcgccctctcccctcggctgacgcaataaatccattttaaattaaaatttaaatgaagaaattcgcaaatattcatttaaagagcatataaccttcaaatggccataacttggccatttgaactcggaattggaccgttcaagtctctaatttttccttaagaagtcaagaacccatttttgtgctttgtttctacttgttatatggagtttattagagtaaaagccttttcttttccgttggtcgtgtagacgctgcagcttcggaagatccgctcttcgtggaagttgaagctgacgtttgggaaagcgagcaaggcaagtcacatcatccttgaacatattgaatcccagtttataaaattatgttgctttaaattattgcattatcgctttatttaaattcccgcgttatcactgttttatctagccatgcctatttacctttgttatgaccttattattattgttattgttattattaccttgttcaccctagattaaacaaaaccccaactagtggacactctactcatggtaccactagtatgattttaggtagatgcttcgctgtttaattaggtaacattaggtgattttacaactctagactttgggatgttcatatcacctggacactatggaatggt

SEQ ID NO: 41387 - DNA, 2145 bp, Oryza sativa
accagatccgcataaatcggaataaataaataaagaaaatgaaaactaggatttatgatgcactggtaaataggtgatgaaatgcaatggtaaaaagggactgtccaggcatcactatggtgaattttttttttagttacactcaaatttcttgccgtacgatggagaaacgtgcacgatctccctatcccgaacgagaccctccccgatcgcctcctgcacagtgcgtgcggaactataagtttgtaacccatcattattgcgtgctcgttttgttttgagaaaaagccccgtagatttgcaggttcgatttactgagcccagattgcattggcccacattgcaggaacaaactggacctagatttgtagggaaataagttcacttggactcccatagctagtgaccgaatctgattcgtatctctgaaccacaataccggatatctcgatcactcaattatcaaaacaggtgcaatttgactccctcgacggttttggaacgcagtttcactgatgtgccatctacgtggcggtgttgacttggttttcatcatacgtggcgcttaggtggtattagaattaaaaaatatatgtggaacctatttttcattcaaaaaaagtattgtgggacccacatatcccatatgtcagcctcgctctttaaccccccctctctctctctctctcttccccttgagccgtggcgacaacagagtggtggcggcgggcactggagcggtggcggcggttggcgggcgagggaattgcagcagcgagcggtggcctgcttatcgtcgtgccattggactgaaagggggccgccaatgcccatcaaggtcctcgtgaccttgatgagaataagaagaagccccctcccggtgccgctgccgccgccggcagccccttcgctactccatcgaccatcggctgacccctttgcttacaaaactaacaaaactaggtataggtggtagctctgaagtaagcactgttagctaacaaaactaatctccatcgactgaaatctgctaggtactaacaaaactataaaaaagtaggaattttacaaacaaaactataaaaaactactaatctctattgactgaagttttgtaggcacaaacaaaactaaaaaaaggtaggaattttgcaaacaaaactaaaaaaatactaatctatattgactgaaatttgttaggtactaacagaacttaaaaaatgtagtacaaaactagtactatgtattcattggtgaggcccctcctccccttcctctctctcccgcgccgcttagccgccgcgccgtcgcctagccactcagccgccgctagcgccgcccgcgtcgccgccgatctccgccgccggtcggtcgccgccttgcgccgccgctgcgtcgagccgcgccgccgcgcaccatggccgccgggccggcttgagccaggcccgtgcgcgccgactgcgtgccgccccctccgccgtccgattcaccccgagtggatcggggctgcccgttccgccgccagcgtggtcacctgcgtggctgctgcgtcggtgccacatcggcgccacgtgtgtgccacgtggtgcacctcctttccccgggccgtggacccgatgcaccatgagctggcgcccaaagccactgccatgtggggcccgcatgtcggcaccacccgtctctccctccagggtttaataattgcacaataaatcaattaaggatttttctgtttatagtaaaaacacagtgaatcttctaaaattcatagaaaattcatccgagctccgtttaagcccattcaaggctcagtaaatcaagaaaaatacaaagaatccgttaaaaatggttttgttctctgtttcagtagccttatagcctgtctgcattgtttgccttgtatgtcgtgtagaatccggctctcccgacgctccggtgtacttcgaagttgtagccgaggtcccttcaacagcggagcaaggcaagtcatgcttgtcacttggacatgttgatcgtatattgcaaatgccctattgttttcctttaaatactgcattattttacaatgctaccatgagatgattacctactgtctcagccatactatttgttaccttgttcctttgttagcttggggatataaca

SEQ ID NO: 41388 - DNA, 1144 bp, Oryza sativa
  unsure (1)..(1144): unsure at all n locations
attatcctcaatttttacacatatttatgtttttttccattttttttagcattggtctgttcagctacacaactcacggttaccgtgtcaaaccgtgcggtaaccacgatcaaaccgtgaaaccgctattttttgaattcaaatgtttgctgacgaaattcccatggtttaggcggntaccacntggctatcgtggtaaccgccttaccgtggggatgtaataacccccctccaaacggtaagagaaaccatcacagatagaagtggaaacgagccaagccgagcctggcttggctcgtgaaagcttggtacaagggaagcttggcttggcttggctcgctacaagcaacgagctaaaactgcagcttggcttggcttgataatgggctcgaaccagctcgagctggctcgcgagcctggcatcaagtaaatctccagcacgtctaagagaaatcgagcaacataataccatatagaatgcgtaataaagttatatttttctttaatatatcatcacaacacgataaatagataatatgacaatcaaagttatcattttcaaccaataaatagttcaaaaatgtgcaatttttttgtatatgacctattctattgagtcaaaagagctcacgagcggctcgtgagccagctcgggcttggcttgtttcggaaacgagctaggaagcagtcttgggcttggcttgtttggctttcgagccgagccgacctatgcgagcctgaaccaagcttgagccgagctcacaaggccaaactttttgtccacccctaattacagatggcctgtcaaggatgaccgaatttgtagcagtgatggtgcacaccatctatatttatatttatggggtagtctgcgttgcagagattgggacatcaatcttttgcatataattacagctttaaaaccatctataacctattggaacttatatattcaaattcaatagctattcgaccaataacaacttctctcttcgtcccaaaatataacacttttacgatttagaatttgtcacaaaatataattacgtatccaccaatattttcttcttgatcaatcacaaccctccaccatttaattttcccatttaccttcacttctcatccaatcacaacattcccctat

SEQ ID NO: 41389 - DNA, 660 bp, Oryza sativa
tccggatgtatatatgttgtcaataggattgcgaatagatagatttcacccctcctagatatgctgactagctggtgcattttaacttggttctaatgcttcctctttcatacataacatgatatcttccattcaaacatgtttaaccgtccaacaaatgtaaatagttaacagggaatctactacctccgttctcaagtagattacgtcttgagatcttaaattttaatatgctaaaaaatatttggatttgatatgtgaaaatggtattaataaatttataatgaaaaatactttcatatatttatgtttcaattttttgtaaatatatagttgaaaaaggtagcaatggaacatgcgcatcagggactgttgatgtgcaaaatgtctagtaaaaaacgaacatttgcttcaccgaaacaaccaacattgcatatatactgctcctactttgtgacaacagagttgctcctgcactgtctgtcttgaactcgctagggtttggaaaaccagtgttctctggagccttatcctgtttggtctctatttgcttggctggttttctatttatttagatctgcttgtatttgcagtttgacctgaataggcattatatcacctgttttttaagattatatattatatcactttttgccttcc

SEQ ID NO: 41390 - DNA, 675 bp, Oryza sativa
tactgattgtaccctccctggctgtgttggatggtaacatttgcagctaaaatctccacaactttcaggcattgttgtctccgaagatcataagatcgttccaagggggctgtgcaagtgtaccatgatagaaccatggcacgtcagtcctcacgtataccgtgagatatattctatatggtcgcaattatgtaaagtcttggacatagacaccgtcttctaaggactccttcggaacaaaggggaaatggaggacttttcaaggattgaattcttaggggaaataattcttatgtgactgttttgaagaaaagaataactctgaaaagtctctttagaatttctatggaatgggccatttgatgggatttttggagaaatcctaaggctgtgtttagatccaggggtgtaaagttttggcatgtcacatcagatatacggatacatatttgaagtattaaatgtaatctaataacaaaacaaattacagaattcgcctgtaaaccgcgagacgaatttattaaacctaattaatccgtcattagtaaatgtgtattgtagcaccacattgtcaaatcatagcgcaattaggcttaaaagattcgtctcgcaaattagtcgcaaactgtgcaattagttatttttttaagtctataattaattttgggtgcagga

SEQ ID NO: 41391 - DNA, 866 bp, Oryza sativa
taaagtaatcttatattaaaaatcaaataatattacatgctaagactaaaatagtcatgtatgctaagtgtttcgtgcgtatatgctaagtctaattaagactacaatagtcaattgctacttgtcgcaccacttccgtagtcaataattacatactaagtctaattacaaataaagtaatcttatattaaaactcaaataatattacatgctaagactaaaatagtcatgtatgctaagtgtttcgtgcgtatatgctaagtctaattaagactacaatagtcaattgctaggagtcgcaccaattccgtagtcaataatgtcatactaagtctaatttgcaataaaataattttatattaaaactcaaataatattagaacactacacaatcttatatgataagtctaattacaggtctaataatcttaattaattgcattacaaatataacaatcatttatattattacgtcacttgcctgctccaattccttctagggctagctcttccactcaggcttgacggacgactccgacaacacgtcttttctacaagatacaaaaagatgtattaggataaatgcgaagtaacatatatatatatatatatatatattgcatttcacgttaacgttcgtcctcgttcgttcgctcgttctcgttcatgttcgttcgcttgttctcgttcacgttcgttccctcgttctcgcttgtcttcgttcgatcgttctcgttctcgctctcgttcgttcgatcgttctcgttcttgttcacgttctcgcggcaacgtacgttgacgtgttcgttctcgctctcgttcgttcgatcgttctcgttctcgttcacgttctcgcggcaacgtac

SEQ ID NO: 41392 - DNA, 1695 bp, Oryza sativa
caggtggtgaggtcggctggccggccatccgcgcggcgcggtggtcgttttattcttagccaataaagaaactaaaattctgcttcacaatttttaattttggtagcggctgagaggcaaacttcgatgtgactttgtataaatttagtttattttgcttattttttatatactctctcatcctagaatatagcagtctataactaaatgtaacttacactactatgtaaatctagacaggaaaaaaaagtacaagagtactctccatcttatattaagtgcagttgtagaatttaattaaaaaccaaattagtaggacaaacgaattacctaaatgcccggatgggattgagagtgggatggcatgtaatttaaatgatgaatgataaaatgggaaggaattaatttaaatcaaaagtggttgaaacagaaaaaatgtgaataggttgccacttattatgtgatgaagtttgcatactaggaggtgtttagatacaggggtgtaaagttttggcgtgtcacatcaggtattatatagggtgtcgcatggggtgttcaggcactaataaaagaactaattacagtatccgttagtaaaccacgagacgaatttattataagcataattaatctgtcattagcacatgtttattgtaacaccatattgtcaaatcatggagcaattaggcttaaaagatccgtctcgcaaattagtcgcaatatgtgctattagctatttctttagcctatatttaatactccacgcatgtgtttaaacgttcgatatgacagagtttaaaattttggggtgagatctaggcaacttatcctatgcacacacctatcttggtgtactcatgcactcgaccactatcagctcttgtattctaatccaaaggctaaaaacctaagtgtggcgtttttgtaagagaaaccacgaggtaagacttcatgttagttttcctcaaaaaaaaaattccatcaaatggcccattccgtaggaattctgaagatgcttttcagagtcattcttttattcaaaacaatcacataagaattatttcccctaagaattcaatctttgataattcctccatttcccctttgttccgaaggagcccatagaagacagtgtcgatgtccaagactttacataattgcgaccacatagaataatctcacagtacacgtggaggctgacgtgccatggtcctatcatggtacactttcacagcccacttggcacgatcttatgaccttccaagacaataacgcccaaaagttgtggagattttagctgcaaatgttgccatccaacacaaccagggagggtacagtcagtagaaaatgtacaatcgagtggagcaagcggccttgccaagttgccacggcctacatcccagcatttgttgtcaaaacatgagtgacccatcttgttgtgttcgtcctccaaacgacaaaccgcaaaacatcatcgaacatatgcctagaccacccaagtttctgctgttcgctagtactgttggatccacaagaattaatactctgctagagacagacagagatgcccctaggtggtattggcacatgtacaatgctactatagtttgcaatgccatgacatgaaagatatcataaaacgagaactaaagaaaatggtataaaaggtacaatatgaccaatacaataaacctg

SEQ ID NO: 41393 - DNA, 1038 bp, Oryza sativa
cagccggggtggttgttcagaatggttgggcctatacaacagggtatgttgtatagcgttggattaatattgtttaattacttaactgttttatcaaattctcaaatgtttgctaaatgctgcttttgcaaatacaaccatattatgccatcctttgttatcctgtgcacttgcatatttgctgcgtggcttgctgagtatgtcatatactcaccttgcaatcattcatcagaagaagagttctacaatgaggctgatggtgtggaggattaggtgtagccttggtcaagctacctgtggagtggagccgtctgcgccgtttatttaatttccgctgcttagaactttattgattgagaggaactatctacctctgtaatgacattttattcgcttattaattagagtattatttgtactctattatcaatttgttattgtgtgcctcggctgattcctggacgagggttcacacacatgtaagcgtttggaattttggatagaaattccgggcgtgacaccattccatagtgtccaggtgatatgaacatcccaaagtctagagttgtaaaatcacctaatgttacctaattaaacagcgaagcatctacctaaaatcatactagtggtaccatgagtagagtgtccactagttggggttttgtttaatctagggtgaacaaggtaataataacaataacaataataataaggtcataacaaaggtaaataggcatggctagataaaacagtgataacgcgggaatttaaataaagcgataatgcaataatttaaagcaacataattttataaactgggattcaatatgttcaaggatgatgtgacttgccttgctcgctttcccaaacgtcagcttcaacttccacgaagagcggatcttccgaagctgcagcgtctacacgaccaacggaaaagaaaaggcttttactctaataaactccatataacaagtagaaacaaagcacaaaaatgggttcttgacttcttaaggaaaaattagagactcgaacggtcca

SEQ ID NO: 41394 - DNA, 671 bp, Oryza sativa
aattcctgcagcccttatggaacgaagaacctgacaacgatcaccacacctgcgtcttggatgggcttcccatggagggagtgccgtagttagcacccgctagtcgctctgttgttcacgacattgtcgttcataagccgcttttctctgtaagtattgctcagtactttcggatgcgaataccagcgaccttcttgtaaacaagtggttaggtcgagaacgggattttctgtatcaacccactcgatgtatgcgcaagctgtagtgcgggtctgccgaatagagtagtgttacgaagaataaagcgattgcccatacgaaatgaataagcatatgtagataataaaatacctcacgttcatagttagggcacctaaaaaagcgccttcctcgaatatcagtattcctcgaagccattagttggcatcgatcaccgcataggcagagaggacgctggcaccatggtggtagtaggtatacataaggatcgctacgccagtttggatcctcaacaccccggcgtctagccattgatgaatgccggtcagatttgtaatgaagcaagtggggaagagagtactgaatgtgactgagttctgaaagattgtgaggcctcactcgttaaggcgacttatataggcgcaaaaaattgagtgatacccctgacatgt

SEQ ID NO: 41395 - DNA, 1767 bp, Oryza sativa
ggctgccagggctttgatatgccacattgtagattgcatgtgctccacttaggtgcaaaccaaaaaagcctggtttgtagtcctgtttgctcagtctgttggcaattagttgttgccctattcaatttttctgtttcctgttgatatttgtttaaaacaatgatgtgctaactggtaaatgcatactgtacgcgttttcactcatgaggtcaggttgctcttcaatggattatgccagaatactagtgtaaccataacttatccctaatgtccatggcctaatgtacttgaatacattcttcttcaattgggatcatcaactcatggacacatgaatacttttcaggtacaaaggtggaccagaactctcaagaagagtaatttgtagtagtccaacttccagaagttacattgtggatgtctatcccctccgtctgaaattatttgatggaagagacagcttggagagaattatcagaattagtagaaaggtatggtatatttgatttatattgtgacattgtgcttcatatgtaattaaccgtcaataatgcgactgatgctccttgaaacttccctggtttcataatgtttggcatttcttttgggatgtagtccctccatagttatccattgatgatgaaatcaatagtgtagttattacaatgatgattccactatccagccctaatttattgcttcaaagaggttgtgtggttaacatttggttgtatttcacattagcttatcttagccatcatgcctccttgatctgtgcttattgtgtgggacaaatcggagcatttcttatatttgataggttagatgatcagtttaggcattctttataccttgatcacattgttggagagtcacatttgtcaaataaaaaccagtgcttacacatttgcattatatgaaataaagcaatgaggattccctctttgtgatgaagtgtcaaagaaatcgcatctgttcatcacctgcttgttgcgatcttctactttggtatgctgagcccttgaatttcagaatttgatctgatatttttggttgactattaccagaaggaaaaaaatgttacaaatttgatgcgcaatggcaaatactttgaatgctggttttactaactgcttgaactaatagcacttttactaaaaaagtagaaagatgaactttctactatcttctttcttagatactcttttgttgaacagtaaatttgttaactttctattatcttctttcttggatactctagtttcttgtgcaattgacttgacttattttttgacgtttgtatttggtgctttcaggccaaagttagtgagctctatagcttggtttgctcacttttgtccgtcgaacagtctaaggtacaagcatcatcatttattcatctaatatctctatctgtagtgtcagttatggttatgtatatgattctttgctccatctactttaatgcttcagatcgacatctgggatttttaccaaaagacaaagggaaaaaaactgataaatcttaatgagacggttgaggaagctcaactgatgatggaccaggaggtattatgcactatgcaattcccattcacatatctattgttttatctgctgaaacctatgattgtttcctttattctggcagcgagatggtcgctggctttttgttgttattgttgctatgcgcccttttcatctatggtctgctgtctgccttaggatgtcaccttgcacatggataatgactttgtcataaattgt

SEQ ID NO: 41396 - DNA, 571 bp, Oryza sativa
agtcaacagcgtcatatattaaaaaacagaggtagtatgttgtttggtttttagtcaatacaagcaagccagctcctaaatatgtgagaaatactacatagatgttttaggccaaaagagaacaaacatatattcaaagaaaattagcaaaattaacagtggaagaatagatgctagaaaatttcattatgcatacaaaggcatcatattttactaccattgcaattccttcacactaaattgtctttggcaagaactacttaaaataccacataaaaatctttattttaaaaggtatctttaatttctgctcaaccttgttcctctctatgtttccattgatattgatataaatatagtaactaggaataatcctaggaagatcccctttcgaatgcaagatttttttctttgtccattgatatgaaacttgagctgattcttttaaaaatgacgaggaattccacattcaaataggccataaacacctttttagacagtaaaggatcttttccattccaaaatctagctaaagacctgaggggctcctccagttatatattaggtgcct

SEQ ID NO: 41397 - DNA, 1778 bp, Oryza sativa
atttattaaaaatacccacaagccaatttgacataaatcttggtgaattttagttgttggaggctcttttaggcttttaaaatttctagaaatgcattacagcacgatttaaatttagggcaatttttagggcgttacaatatccgtgtgcttgtagattttatctgtgatcgtaaaaaataccaacacccacctctcatccgccgcatataaccccaaataatgatatcccgtaatctagacaccacgcctaaactatcagatactactctaatatcatcgtcctgacatagagtaattgcatatgcaaacattatacccgcaccgaagcatctcccagataagctagcagtataatcagtataacatgaacataatgtaaagttggcattcatatactcggaaagtatttcaataccataaatgtataaagaagagtattctaaataaagtacatagcttacaaaagagaagagaagagttactatagccatacccgaactcttccgaaggcttccggactcctgatttctactctattcctattccactagcttaagaacattaaactaacttgagagaatataagagagctcttgcttgaggtgtgtgttgaagtgaagagagtgaagtccttatatagaggtagttatgacggttgtggaagcagaattatccgaagtgccctccaaccgtcattgggatgcaatcctggacgtccacgccgaaccctgcatccaacagcatcaggatgggttcggccaaaccatgggctgggccatcccggcccatcttcggctggtggcctcctctattgctcctttatgcagacttgtgaattttggcccaattcatcgtgtcaattctgagttcttagcccattcatgcataagtctgattctcgacatcgtccgaatgatttatcgtcttagttgatgccgattctcctccatttaatgatcattctctgcaaaaggttagtgaacctaatactggcggaatattattattctaacatgtatatgcattgatgcattgcaagcataattagttctcctctattttggtaatattgatggtcgaaactgatcgataacgaccgtcaaaaaacccccccaagcttgaacctttgctcatcccgagtgaaggacgaaaggaaacaaaaacttgattgttgatcaggagttgctactatgctgtatatcttaaaggtacaagtgcaaggtatatgtactctctctcagattaaaaaatctttggcacagtggcttatccttatctctgattcccacgagacaccggttctccttgccttgggcggttgaaagacaacatcaattatagcaccaatcacccaatctttattcgactcttatttcggaggttttcaaatgattttgcaaaagaaagccaagttcctcaaatgattcacttagtctctctaagtgtatcaatatgaatttcttaccatttttgcctttttgattcctactctaaggtttgatatgtttagctcggtagggatcaaacatggcatacttgcattcagatttattactaagttaaaaacgtagactaaaatagataactaaacatactcaatatcaagatcgtgcaaagtgtgtgatatattgtggaaatggtatataaagaaaaataaagaaaatgcttctcctttgtgcttactttcttctcccataaatcattcttttattaattaggagagggcatagctacacatttctcttttttttttctttttttttcatgctcatgct

SEQ ID NO: 41398 - DNA, 2447 bp, Oryza sativa
tagagctactctatatatctatactaatataaaaaggaggagccacctctttcaatcctacaggccaaatcaacttatgaaatccctaccgttcatccgcatctgcgtcgccctgagccctaatccctgccgtccacccacatcgcaggccccattctatctccaccgctattttcgctcgatgtgccatcctcctagcgttaacaccgccgctcgcgataacaccgccgtttctccatcttccccagatgacgcgagcccccttgctcccgctaatagcctagcgctgcttctcgaggcgcggcgcgagccgctcgcagatgcagcgacgaccaacgaggtggccaacaagaagctagcgtcagcgtagggtgccctcgagatcatcgcgcgggcacagaggtggagctagggttacaagcggcagatggcgcacgtcctatcgcttctcctctggaaacgatgttgatgagatgccgctgcgccttggtcaccatcgctctgttgggaggccacctccccaaatcagtaatggctggcacctcccccaagctcccatcgaatccaccagtctcctccaccaccagacccgtttggccttcttctccatcagatccaagtatatatccaacgattccaacctctgaggcaccgtggggccactggatcaggcctactcagtgacgacggtgaggaggaagcttgtggcgccgcggagaggcaatgggggcggtttcaagctcgataggcttgtgagtggtcatgactcatgacatccgcgcgcggcggagctcggtgccatgaagcgcgtgttggaggacacggagtagtaattcagcggcgcaggctgcccttgccggtgcatccatccatccgctctgtctctgtctctctctctttctcttgatactcgatagcatttggtgaactgtctccctaattacagccagttttgcctgattcaactgggattgttttgttttgttgcgtgcagtgatgatcttgcttctccatgagtaaatatcaaagcctcgaaggtgggatctgatttggatgcacttaaggtcagtaatatccagtttccctgcagtatgtactgttgtttgctgttgaaattcgttaatttatcgtgacacactaatgtgtttctgctgatttgtatcattggaattagaaaatgtggatttgcttttgatgcctgaaataatggctttaaaagaagcttttggacactgtgagggtactaagttaataaggaaccttgtttatttgcggggatggggcaccattattttccattcgggtcgataatttatgctgcaagcagctaaacatacatttgcacctgcttgattcccgcgtaaacatgatggatcagttgaactcaaagataaggtacaaaatgtttgttctgcttagttgcctctctgagtcatgaagactttcataagctttattctgcatgttggacatgctacaactgattctacatctcttgcttccattgcttgcagccatgcttgacatttgcaaaacccattgggtggatcagtttaaagctaatatactatatactaacactctatttgaataggatatcaagggatctattaacgtacatctattgttactaccctatgcaaattcatgaggagttgcattgaccgcctcacttttctatgtttctgccaccatcgcaatctcgaggtcacaattgctcttggttcccatccatcacaaccatttgttctgaacttagatgcttgtcccctgagaaatccccttctggcttcacttgttgattgctaaaagtatggtacattgactatcctatttgattcctatgaacatcgatgctcactgtttgatacatttcactgccattcatttgtttaacataaggcatgccatttaagctaggtgcatgtaataacccttggggccacttaatggatctattcccttttacatatgcacacatgagtagttatagaggtaaaaaaagtatgcatagttttatatgatcagtttcaactatcacatgcaacatgagtcatcgaacttagtgtggagagaaaatttgctcctatttgttttgagatatatcattgatttattttccagtagttagcttcccttttcagcaaatgtgatcatttaaagtgattattagctgatttaagtagaaaatccctgattaaaagaaatgaatattggtggcattgtatcttttatatttgcatatttatttacattgttattttaatactttttgcagtagattttccttattaaatgataaactgagtttttttacagctgtaccatccatttttatgtcattgttgttaaattaatttgattattgattgttgagagcctcaccaggtaaaaaggagccataaaaagatgcttgcttcacttaaatttatggatagaaataaatc

SEQ ID NO: 41399 - DNA, 2139 bp, Oryza sativa
gttctacactaaatgttaggagtttacaatgtagcgtagcaagttctacgaaaattaaataaatgacatgatttttaattcctatatggaagtgactcattatattggtaaggccacctcatcattgtttcactactaagattctttgttgcaacccgcatgcttatacgatcaatatgatatgttgtctataaaaaaataacgctagatggggtacacattatgactaaaaacaatatcatttaaagtttttctctaatttattagtgacttcatagatcatatatataatttagatgctatgatcatttaaagattatttatttatctcctaagtcgatcatttattgataaaaagctcaaatatcaaattgtatgggcaaatagcccccatatacatgttgagagaatttaattaagttgatagaaagttgttaggtgtctaaccagatataactaatgggtgtaccagctttattaaaaattaaggtgggatattccgattttcaatgacgaattttaatatcttttttatttagtgtttgcctcaagatggatgtgggtctagaatgtaatttttatgttggcatttaaatatagtcaatatgaatatgaaagtattgatttcactaaaaatataatagttcaaacagatcgtaagttgaatatatgatttgaaaagttataattattttaatttatattgttccaagttatagtaagagaagaaagagaagaacatggacagtgggatacctgtttagaccttacatgtggaaggttcatttatagtttttttctccataaagataattttaattttagttatcataaataaagataaaaaataagagaaaaggaacaacacacaccgcacggggacagaaagggagggagggggtgttttttcataaaaaaatgattgttctaacaacctatgtgttggatgtttacggtcggatgttttgtttttcctctcataattttgtatgatttttttaaacttaaaagagacccctagtggtttagaaatatttataggatgtttaatgtagttttaagtctttaacattgtaggggcagggaggaaggaaatgaggtttgggagttttttaaaataaaaatctaataacaacctaaatgatatgtccacgatttaagtcgataccaatagttggatgttttgtttttaaatttttatgattttctctaatttagaagtgtcactaggtggtttagaaacatttataagatggttaatgtgctttaacgctgcatgggagcgcggagggaggtttgggatgtttttttaaaagattttatttttttagattttatctaatttaagagtactatatactccctccgtcccataaaaactcaaattagaatatgatgtgacatatccaagagcaacgaatctggacatatgtttaaaaatatttatatgatgttgaataaactatttattaggagagaatatataaagagttggctagatctaatatgttaatgggctttttaggcccataaaaagtattttattttaattgttatggggattaaaaaaaagagaggaacgatggttggagggatcatacatacatgcgcaccaaggctgacgtccggactccggacatagatttttttttcctttgattgaagataaatctaacgatcaaaattaatgggcccactaatttaaatgaaaatcaatgatcagatttttactattttattagagtgatacatggcgactctagagcgtttataggatgccacatgacagtctaggaacgtttgtaggaagtttaatggacttttagtatataatagatagaactgcatgagttctaaaaaaagctccgtccttagagattggttatacttatttctttttgatttatgtttttacatgaattccttcaaaacagtgtgatattagttcaatttctctcactggtggattgataattcctaaacaagtgagagtaagacctaacaaaattggttaagcaaaactattgagctgcacaagtaactgaacaaattaaagcacaggaatttgaatttaccatgaaaaaaatccacataaacctcaacaattacaaatgacagaatgaaccgagctcttttcgt

SEQ ID NO: 41400 - DNA, 980 bp, Oryza sativa
ttatcactatttaccaacataagttctgggttggaccaacaacagaagtatatgtagcacacattttttttttgaagcaaaagacggcaggagctctgccggatatattagaaggagaagcagttacagaggtcaagaaagagcagaccactaggtgacattttcagttttcatttttatgtagcacacatttcatatcagttaactccgaatgacttagatattatctccctacaagtcacttttctcagttaaaatattacatttgtacttcacgtttctctgatttcctgactagcactagctccacctctcctagagctagagctcagccaaacagttttagctccacccaaaatgggagtggagctgaatggaactctctcataaaatgaaccaaagaggtggagctgggtttaaacggctccataaccccactccagactcaactcctggagttaaatttaggagttggagctctactaaacgagccctatatcatctaaaatttcaagcgcagtagaggagctgctaattgtacttccttctctttctgaacccaatcaaggattgagccctgaagctggacaggtgcgtgcgcagcccaaaggctgaggaagtcagagattccatctgtgcgatgatgcatcttatgatcctgttgtcgcaacagctttgatttcctagctcctcgaatggtcctccgtgtgctcagaatgttcacggtcgccttcacagcatgaagatatgcaacaccatgtttaggcttccaaagcatctgatacactgtcgctttcgcattctgatgaaaataatctacggccctcggcaacatgatctcttccatttgttgcaaggcaatatttgtatgcaagcaatgctgctcattagcattaatcacctctatcacagaaccctcgactgatgggaataggctttctgaagatccgtgaggcgtataggcaagtagacattcagat

SEQ ID NO: 41401 - DNA, 715 bp, Oryza sativa
ccaaaatggcaaaatgttactcaactcaccaagctggttgaaacttgaaactagtgctttcaatatactgcagcttgacttggagtggtgaagagcgaaacaattgtgtgccgaaggaggagtttcagctccttctcaatgtcagttggagatgtcaattcgtataaatggagtccggatttctattcactatctgaaaaatgtcaatttaacagtgaaaagtctataagtagcaactgtaccagaatctgctctgcacaccgtctgtatttctccaaatactcttcaactgaaccaagttttttaatagatggcaccgttaacttttggatacatattttactattcatcttttttttttaaaaaaaaacgtaattataatctagtttgggcgtgggaaacggaggcgggagcggtgaactctgggagagagccggatttgttgggcgtcgtcgtcgcaggacaaggaggcggcagcgcgagatgaggagggcgtgcgtgggggacaggtgctcatcgggatgcggcggaagcagcaggacagacgacggcctcggctcctctcccgtcgcccgttgcccgcagcctcctccgtcgccgcccgtcacacgcagccgccttcgccctcacccaccgcttgccgcccgccccggccacggctcctcgcccttgcccaccagccacctcctctcttcaccaagagagagagaggggg

SEQ ID NO: 41402 - DNA, 650 bp, Oryza sativa
tagtatccgtccccaatgcccaattccccccaccattgccgactcttttcttcgcttccggccgacggccgcacttcccatctccgcctcccctagttggctactcctcccagcctgcctccgatccaccggatggcgtgctcgtcgctccaggccgccggcggcaactatggtccatggactgtggcagctcgacctcagtcagatccatggcgaggtggccctcaacttcaggcggtcggcattgctccaccttgcagatccaagtgctgtggaccactgcttttttcttccctatggagcacccgttccttgtacaaggggtgctgacatcatgcgaggtcattcctcgttcgtcttctccaccacgctgtgcataagagtctacatgaatggtatccgatgcaaggccactcgttgtcgcctgggcaacgcgtcactgggaaaatgtcaaaaaggccgtggcagatgaaaacgatctggatggagatgtgatgccgattcatcagtttttcaggctttgaatcatgaaactagctgcaattttcctatacgtgaaggactggattggcaaaatgtggaaaattcatggcaggtgaaaacgatatggatggagatatgccgtaaatttctcccatttaagcccttct

SEQ ID NO: 41403 - DNA, 1289 bp, Oryza sativa
atggtggcccgcgcagattgcgcggctagcatcattatattttctctcatataatagcatatatgttttctcattatattattcaaatatattaaaatgacaacataattttaaattttgcaataactttacaaaactactaatgtgtaatattcatattatattttatatacgtgttagttattaattatttttaatatcaaattttaattatttgtaaattatatatattcctatatggactctagactcgtcttttaatatttcttttttttaattccgaattttctgtaaattgtatttctatatagactcctcttcttccaatattatttatttttatttctgaatttttattatttctaattgtatttctatgtggactctaaactcatatttcaatattctttaatttttaatttcgaatttcagtcacttctaaattgtattcctatattgactttaaactcttcttcccatgtttttcttaatttcgaattttagttatttgtgaattatatttttatacggactctaaactctacttttaattttaattttattatgtttattccaaattttagttagttttaaattcctatatgaactctatactctacttctaatattccttattttttaattccgaatttctattatttcctaattgtatttctttatgctctacttcttatattccttatttttaattccaaatttcagttattttctaattgtatttctatatggactctagtcacctcttctaatattccttattttttaattccgaatttcaactatgtctaaattgtatttctatatggactctagtctcctcttctaatatttcttatttcttaattctgaatttcaactatatctgaattgtatttctatatggactctagtctcctcttctaataatccttattttttaattacgaatttcagctatttctaaattgtatttttatatgaactctgcttattttttctccgattaatgtgagaatttttaggccttgagagcgaacatgttggcttctttttctatggatgatatataatagatagattcatatagacgaaagggttatctattgatgctagatgacagggacagaggaagagggaaacccattaaagcatctccaatagcatcttcattccactctccaaaccaaaatttagctattttgaacaaaaatcgcactccaagagtctctctatcccactctccaagccatccggatgaccaagttcctttcctcactaggggcgcagga

SEQ ID NO: 41404 - DNA, 3643 bp, Oryza sativa
agttttcacgtcacctcttcattgcagacttgcagtggaggagggatacttttgtcaaaacacccctcatttcttcgtctatttctctttagccccattccatttgtttatgtgtcaatgaagttattgttatgtattgtacataaataatgtatatgtcaagaaaaatgatactgatttataaagttagttttttttatgtagatgttgtaattctgatggttttatggggttgtgacatggaaactgaaatatctccgtggtgagggtcggctactcggctggtgtaattaatctgtgggcgagaaattgattgaagatattcagatttgggacggattaattgctagaggtaaagatatgcgtaggatagaacggacggatatgatgctattaaaaaccgatatctagaagatatcggtttttaattcttgcgcttttcgattgcttctctttgaagcgatgagttgttcgtatatgcgtacaaaataacataattattatttttttctttttggcttgcttcgaatgattcggtaacagcacacgcctttaattcgtcgagcacctgcagtgacatttgtgcacttctcctttgatttgtcgcttgtttaacttcttgtctatctttttgtcgcatttgctatagcattttgtgctttctggaattcaaaattgtgtgatgcgcacattggtttagttgtgtgcatatattgctatgcttgtttacaccttatagcaccaaacatcctaacaaacatcagcttcaacatacaagtatgtgataaaggtcagcttttgatgttgtgtgatttgcccggtgtgtgtgattgcataattcaccactaaaccccatcacaaagtacttcttgaaattttgattaccgtaacatttttaccccttgcgatatactactgtgtaaaactcctttgatttgtcacttgtttttttttctttttgtcgcatttgtcatcttcattgaaatttgtatgcttctcctatttttctttttgttgcacttgctagatcatttttgtgctttctagaactcataaatgtgtgccacacacattggtttagtcatgtacatttgttagtatgcatgtttacaacttatagcaccaaacatcctaacaaacatcggcttcaacatacaactaatgtgatacaagaagtactttcaagaggctagccttttcatgttgtgtgcttcgcctagtgtgcatgattgcataattaaacactgagccccattgtacttctcgaaatttcgattagtgtaacatttttaccccttgtggtatactactgtgtaaaacttctttgatttgtcacttgtttgtctttttgtcgcattttccatatgtagtaaaatttgtatgcttctcctttgatttgttgcctatttttcattttgtcacatttctagactattttgtgctttttgcaactcacaaatgtgtgtcgcacacatttgattagttgtgtacattaattagtattcatgtctagaacttagagaacgataccaagaggtactttccagtagaggctagcttcaatgatgtgtgccttgtttggtatgtaatcacacaattcaccaccgagcgccatcacgaagcatgccttaaaattccgaataatgtaactttataccgttttcaatatagtactataataacacacatgtgttaacgaccaaatttggtgatatcagcatcgaaaaagaagattagatcaaagtggagtcgaaggcagagatcgatttgggaacagaacaggaatcggttggagtccagatcggctacgattaggatcggctgagtctgagtcggactaggtaagccaatgcagccgattccgacaatacaacttggtgtatgacatcgggttgaattgaggtgtttcaagatgattgccgcacatggatagagtcctgagaaggcaatggtatctattaattaggatattttatgtaatctccttagagatatgcttgggcaaaagtctgccgtaaagacttttggtatcttagagtttgttagagataagagtcgtttccgatatgaacattgtttgtaattttcgggtataaatagatcccgaaccccatgtaatcaagtaacacacacgttcaatacaatttcggcgcatcgccacccttttgctttagttttatttcgacgagttcttgctttcgggttgagctacatcggtttcgatcttcaacaagaggtaaaacttgttatgacggcttgcgttctcgggattagtgcttccatctttataacactctaatcttgtttatgtaattcatcgggttatcatatatcttacataatctctggcaatatcgctatctaacctacaaccggctaacatctctcgaagaaggcagccaattaggttagattttgacgttgactcagattatataagatatctaccactctatgaaacttccagcagcttgattgtctagatattgttcttcttttcatacttaatgctgcatcagttgagtttgatctattaagtcgtgcttagaatatcaatctctagcctgccttctggttgccgattagggtagcatcggagtttcagccgatcttatctgatttaactatatttgctctatatgcttcattgacatgttaaatctgcccttgtgtcaagatattattgcatttatgtatattaagcttctgtttggtttattatacctgttttaatatcctgatatagagtagcatcgaagtattagccgatacatgctagatctatctgatcggctatgctataaacatatatagtcctgttattaatatatatttcgatctaagtgatttatactgtctcgcatggtggccaatctatcccaatcacttgatttaagtatatatcgatataagaactatatattggtaatatctacagccgatcgagtagatttagttctttattatctatttatattcgccgatcgattcacgtatgacatcggctcaaagatgaatgatatgtcatcggcacttagccgatcggctatcatttatggatttaaccgcggtttctttctctatttcttgttgattacaggatcaaatcaattggcacgctaacacacccgaaggcgagctttggacctgcactagagttaagcagatctcccaggcctcgtgtttttcatcaacaacatgaaaagtacatatccccatggttgtaaatatttatcataaactaccacacacttcatcaaagaaagtgtattctcagaacattcagtagaatataccaattatacatcaattgcaaagaagatgccatgccaccttgatgattaaagaaattcgagtcacgaacaacaaaccatgaatgagatttttgggtgccgctttgaagataagaattggccatttgatatttgtcttattgggaacagtgacatcatttcaacatggcatatacacggggtttcgaatatccatctagaagatatatttgtcttttaaaatttagtcacttgcaaagttgtgtccatctgtagaatagctatatggtatggtggtgtcatccccactacttatttgtgctaccatttaaaaatgcaaaatgaccatttatgttacactctataaaatt

SEQ ID NO: 41405 - DNA, 1798 bp, Oryza sativa
ttcctgcagccccgaaaagagtactactccctccgtctcaaaataaatacagttttacattgtttatatcccatgtttaaccgttcattttatttgaagttattttatgattagtattttattattattagatgatagaatatgaatagcactttatgtgtgatcggctaatttattttaaaatttttcaaataagacggacagtcaaacattggattcggatacccacagctgcattattttgtgacggagatagtagttatcaagttttgagaataatttatccaactatcctctatttttttttcgtttcagtttttctcaagttgaccgtaggccgtactatattgtttagaagatggcacatggtttgatgttttagccttttgaatcatgccaaatctattttttgaagtgcatgaaggccgggatgttttctctatgtatttagtgcgtgggtcgatcattttgctaaagagattattttggtatgagtattcttttagataagcttctctatgaaaaaaatttgcacatactgacacaagtgatatataagcatggctcaaactcaactgatagctagtgtcctagagtactctacggacatctatgtagaaatatgtcatgagctctatttctttctttatgtttgagctataatctgtttataccttttcaattcggtggaaaataagtacatatagtagaacgtgcttgatatgtctattgtcgttttatatcaaactcaatgatacaatgcaagaggcaaaatagcacttgaaacaaaaacaagtttgaaggaagatgttggaacattgtggtctaggattgtagctacttttgtgccccttctgtgtaacacttgatttttttaatctattaattactcaaatatcatatagccataaataaaatggaatatataatcaagctagtgaccacatcaatcttgtagataggctctatatatatgccatacgcaagtgagcaccccactagctagtttgttgcgaataaatgatatctcccctgtacgatgagataagatatcttggcttttattatttctggtcatagtacacattgtacaaagaaaagtacaaccccattttcttgtattgcaagaacttacgagatactcatacttgcataagtcgtatgagttgacataagttaaatcaagttattcgtagtcccaacgtgtgaaaaaattactcagatacatgttttcgtctaatatattaacatacaattgttggtacatgcacaatttaacctaatcccccctcctatgatcaacaataaatatacatacttttttaatcatagggtgaaccaacatcaaatccaactcctggtttggctatgcggctatccaatctcaacattgagcaagctattttggtctatagccgaaaatcaccatgaaaacaactgcataacacaaccactaaaagttgacacactaaaagttgactcgctaatagtggtatccagctctacatttatatgcagactagaaaaatactcatgctttgctatgggtagaatgttcatatatacttaatatatgttattcacttgatttaaacaaatagtatattagattattatataatatcagaaaatatcagtgattaatttataaaaaatgcaaaagtagtggtggtaggctgtggcagaaccaccactattgtcttttacagtaggatagcgtattgagtatttccataggtgtggtgggagttactgtgcatgattccatctactacatttattctaaatatataaccta

SEQ ID NO: 41406 - DNA, 2253 bp, Oryza sativa
ttcctgcagccctttgtttagaaaaaaagaactttttgaggctcatactcctatgatagtagtacctttttatgttaaaatgatgcactcgtggatatatgtgctttcgtataataaaaagagtgcgttatttgtatttttttaaggattattatccatccaccccttgttgtaaaaccttattaaggtaggccgcagtatgtatgcaatttcttctacaatacctaagaaatactctatgatcacctccacaatatagagttatactaataaattagaataataattcacatatacgatcagtcacgagatgttccatttcaagaataatgcaaactataggatttagcttcttttaaatgtaaaactaagttaattactagggcctaggaatcctttcttttaattaatgagtggatcatttccttaaaaaaagattgagtggatcatgatacacacacatcaaggccctgtttggttccatgggctaatatttagccatcaccttttagcctcaaattagccctcaaggatccaaacaggtgggctaattttgagttagctcccctcaaaacattagcccctccaaggggtgctaatggggctaattttgtgtggggaccatcaaaaagcagctctctttctctctctttctactctctctctccaccttttagccttgaattagcctatggatccaaacataccaccctagattaatatttagcctaccaattcatgactaaacattagctctcaaaattagcactgggctaatcttctaaacatggcccaagtctaattaatgtagtggtgatgaaccaaatgataaggaagacttaattggctaattgtggccggctaggcaccgtactacgtatatacgtcaatacgtgtgcgtttgagtgaagatatatgcactttgacaccaaaaaagtcaatgtcacgaactcacgatgcttactctctgctaactgcacgcgttgaacgaggtgttaattaacattttctttttgaaagataaaggttaattgacatggccgccgatctctggaatcctgtagattgggaatatagtaatttgttagtgcatgcgtgcctttaattacaactgttgttggagtagcatacagcatgcgcagtgagcattttagcaccagcaagcaagaagcaggacgttttcatcagcttactaatataatccctatgtcttattttaagtgtaattatagatttatatgtccaatatttaaccgttcgtctcattttaaaaaagaaacatactttgtatttaagcatagagcgaataacccgttttaataattcgggcgaataatctaaaaaagtaaaacctaaatacattgcttaattgactagaagacatgcaagactgcaaccaacaacatgatacattaagggctccatttacaaacgaaaaataatttataaataaaatttttatatatgggctcttaacgacctaaaagtaaaatatgaaaaataaaatttgataaaaagaatcttaaaatcaactctaaatttaaggttaacattttaaattttagctgataaatataagtataagtataagaaaaaaaaaagatgaggtttgaaaagataaaaacctacagagttaaagactgcaggtagagaagcatgcggtgtgtgttgagcgagagattggatgaatggatggatacgtagaagacgacgtacagttgagataagagattcggttggagggcgaggggaagggacgccgtctgcggtggtggggcccaccgaacacgtggccgcggtcgggggtggaagcgtgacgcggcaaacactcacctcatctcctcgcctcgtctccacgaatcgatcggttcgccgcatcgcgccggcctccggatcggatgcaataattccccctgtttttttctttcttttcttttcttttcttttttttcaccttcttcagttcttctctcactctcctctcttccattttcaactactcgtcagccaaaatttaaattttcaacctttaatttggaaccgattttgagatatttttatcgaagtttatttttcagcatttgctttttaatcgctatgaacacgcataaaaaagttttatttacaaatgatttttcgtttgcaaatatgtcgtttcgcttattttttcgtttgcaaatataccgtttcgcttatttacaaattatttttcctttgctgttgtaagttgtataaccttctgggctgcaggaa

SEQ ID NO: 41407 - DNA, 2392 bp, Oryza sativa
catgaaatctctcgtccctttccttctctctatgtatatcgtgtggttgcaatttgtttggatttaaaaaaaaaaccttcttttagttggaatattgacgataggaatttaggagtatctaggtgagacaattttccatcatcctttcatgttagggaaggagatgctcagagttactgcttgggcaggacaagagcatcaggatataggaatcatctatgtacaatttgcaaggtatattcagaggatgaaaacttctctcttggtttttgggaatcgtggcccaattcatgtaaatatcttgtaaattacatatagattttcttagcttaaacatggtctttcctagggaaaaacactttacatatctctgataatatcatatgacacacatcttgttatttttttcttttctatttaaattgtcagtacattctctttttcgctgagttagaaacgaagaaaatcctaccgaatttttttctcaagtccttgaagaactgaaccaatccctataaaaaaccctacacatgattttgaaaatttctactccaaataagtcttgattgcaacattctatttggcctttctcaaccaagccaaaatatttggcaaactaaaaaatcttccatctatttggtttcagagaaaaatagacattggcaacttattgggcttagttaaatacctaagtgtgactttgccagcaaaccaaacaataatctagccaacttctattgaaatttttgtcaaatgacctatttttaccaatgccaaaattttggtatggttacaaatgacatactcccaagacttttcaagaaccaggggacaaagcaggaaattaattgggtgatagagcagtttattgccgccaccgttggtcttggcatccatgaaggtgactactccaacatctatcttgtcatcaaattgacattattcaccaagagatagccaccttattcgtttttaccactagtgaggcactagctgttactactacaattttaacccctgcaagaatggaaaaccccaactgggccgtaattaacaatattttatttactagataagcatacatgtatgccatgattaaggatttgacaactagatcccatctctttgtcacaacctaatctcaactccctccatcacagaataattaagttcatttttagcctctcagatttatcttaaaataaatttattgtttataatcactgcagtcgagtttataaaaatagaggataatacattatgagtagataaaaagataaataattacattagaatttgataaaattatgagattatattttttattgatatgtatggaatgagtgaaaaataaacttattatgagatagggagagagtagtatgcctgccctacctggccactcttatccaaaccttagggtgtggacaaattcaggcacgagagcatgcctgcactgtgggcccttgtggcctaatccataatttgtattatatatgttgtctgcaagggataaaagtattgtatactcaatagtggtgtaccttgaaaagtaatgtaatgagttgaaaccatgggcttaattaagacttgtaaggaatggtaattacatggtatgatcctatctgtaccttaattacttattactactaatttgtaaaagctatctgtcggtgtgctaattaaggaacctagtgacaaatatatttttgcacctaacaagcaggggttaatatgcaaaaatctcatgttctcatatcaatggcaattaattaattaacagttctaaaccaatgcaagaaaggtcagatatgataaagaaggcatgcatgtttgaacagggtccatggttgaaagattcgttcaagaagtaagaatcacacattattctgtcatggctgtcaagaacaagatgctttcagattagaataacactagacctgattatacttttatcccacttcaactgagaggactcattaatttaatctggagccaataaattccagacacaccagagactttgcattgctgatgagatgaaaagaatttaaaccaaactactggaagggcactagaaagcacagaaagaaaccaaacaaatattgaccatctgtgtatatgtgcaccaaaagagagaatccagaggtagcaacatgatgggatcttttggcacctttcaaagtggtggattcaaaggcaagcaaagatgagataggtgagcactttggatgtgtgcactggcttaggaatctcttccatcccaccatctaaaagggaggaagaaggaaggaagacatatgcaaggagaaagctagcttttgctaggtaccatcaaaggacacatgaaagctagggcaaagcactaagctagcaagcatttcattagtgc

SEQ ID NO: 41408 - DNA, 6010 bp, Oryza sativa
catgtgagttgagtttggaccttagatttttatggagttatataaatatgttgtatgagtgttgtcaaatttttccagaatttttcataaccgtttggatagtttttaagcaaacgaggggacatttccttgagggatcaaaatagttccccaggctcatcagcgggtgcgtagtagaattttaatgttattacaaaaaataaataaaatttttacagcaaatatatatttaacgtagttagatatatatgctggggctcttaaaattctggctctaccattgagttgaatacctgaatccaagacgaaattaattaagaggaaatgcgtggtagcaaatgtcaattaatgaataatatttccttgctttgaccgtgacaacggttgcaaaggtacggtgagtgtttctgatagtcgacacaagtctagctcactactgttaacacaataattgaccacctgttgttgttcagatttcagaaattcagatggaggcatgcagcatcaagctgtaccagtgtacctaacgcaagcaggcccaggaatattcagcagcatggatcacaaccacaattacaagggatcgatccaaaaaatccaatcaacagaagagggtagctgcatgtaggcaaagctaggtggtagttggcactatgcaaaggatgcattgcatgcaccgctatagcttgacgaattaatgatgattagcatcacctacaagagatgtttaatccttagcaatcaagcggctcctcgtcgtctccaggaggcagagctagtatatcaccctctttctctctcatctagcttctctctaatccttgtattgcatgccatatctgtcgtgttcgaggaaagaaccattcattcttccaatgagattgatcccagagaagagaagagaagagaagcttctcattgacagctactcctcctcctccagctttgattaattatcttatttactgtaccatactacttgatttgatactagcatcttctctagttcttaccattttctaagactcttgatagtctatgtggtactagcttatagacaagaattccatgtgtatatataaattaaccctgaagagattagcatgaactctaggtggagtagattggtttaagcttaattaagcaagagctgaaaggtactggaagcttgccagtggtttctgattggcaggtgccagtttgcatcatatcagacagaattgggacctaattaataaaccttggatacatgtgcaaaccggaggatctaaagaaagaaaaatgcctcttcaattccatgatagtttaatcactaaaccagattagagcttactatcagttggcccttacaatccattggagtcgttcttccatttcttggtttgtgttgaccctgatggatcatggatggatgctattattgttaatagatgatctcgatgcgagattcttctacagcgacaagatgataatgtattctaccacatattggtggtctagaaatctagaatcttgagaatatcttggcatgattcgatcgccagcgagtaattaactgtttggaagatcgatgatcacaagtatagtatagctagctggagttgctcttgatcgacagatcgaagaaagtctggccctttgaccgattaacaacaaccacattgccacatttttctttcctgatatatataaattaatatgcatgctttcagttcaataatggttcagtaaacgtcaacctcagaaaattatattagctatttaaggttctcttgttaattgcactgatccttccatgtgtgtgatttctatgctgtgtttacgcttttgtatttctatttctttttttgcttgattgtttgtcatgacagatatccatatatttttggaaaatgaaactctcttgatgctgaactaatgaaagtaattggggattttttttactaattcttgtctcaccttttaaaaattgttgtttacaccctttctcttttttaggccttaattaatttcataactgtaaatagtgcagtcttactaatattgcaaacgaatggattaattagaataagcaaaactctcagtataagatgtacaactgccggaactaggctgcattcaccgtgtacataacaacaatgtacatagttcagttaaggggagaatgaaattctccatttcttgttcagattcaactgaatatcgatctatctgctcctctgtcaacatctagttgtataagctatgccaaagcttctaattggattagcataaaaattaagtctttaaggcatatatagtatacttgagcaattctatagaagcacattcctgatgcatttagccctcatcacatccatgtacatagctcattctctccattacaagatcctaccgttatcgtacctaaactaattaaacaatgttttgacctaactaactggtttgtacaattagtaatactctataagtcgtttttgactttggtcaaatttaaactacttcaagttttacaaagtttgtagagacaaatatagtaatatttacaacatcaaattagttttattaaatctataattgaatatattttcataatatattattttgcctatttgttttggggccttgtttagttcccaatttttttcccaaaaacgtcacattgaatctttggacacatgcatagagcaatagataaaaaaaactaattgcacagtttacatggaaattgcgagatgaatcttttgagcttaattagtccatgattagccataagtgctaagtaacccacatgtgctaatgatggattaattaggctcaaaagattcgtcttgcggtttccaggcgagttatgaaattagttttttcattcgtgtccgaaaaccccttccgatatccggtcaaacgtccgatgtcacacacaaaaaatttcttttcgcgaactaaacaaggcctgggttaaaattgttatacttttttctacaaatttgatcaaatttgaagcagtttgaattcgaccaaagtcaaaacgacttataatacgaaacggaaggagtacaagacaacaacgatctaatctaaatggtgcccaaccggccaacacacataaaagtatcaattccattgacttttttttactaattcttgtctcacttaaaaaaaatgtttttttacacccattctcctttttaggccttaattaatttcattaactgtaaatagtgcagtcttactaatatagcaaacgaatggattgattagaataagcaaaacactctcagtataaggtgtacaactgccggaactagctaggctgcattcatcgtgtatgtaaccatcataacaaccatgtacatagctcagttaaggggataatgcaattctccatttcttgttcagattcaactgaatattcctttgtcaacatttagttgaataagctatgccaaagcttctaattgggtagcataaaagttgccccgctatggtgttttctattgatagtagaaagcaatctaaaccattgttttcatttgatcgaagggttcaaatttatttatactatcaccacaattagcggtagtagaaatatggagggacgttattgtcaaaaaaaaagagggtgcagagaggtataatttttatttagcagtaactaaaccattttttctcacttttttggctttttttatgaaatatgagcgatgctagcacaaagaatgatcatagatcgatttagccagaaaaaacataaatgagaaagtaactcctaattattatattagtaaattactaatttacccctaataatatcggtagtataatgttaccaataaatagcaccggagcatcgctctcaaagagcaatctttaaggcatacatagtactatacttgaccaattctatagaggcagattcctgatgcatttagccctcatcacatccatgtacatagctcattctctccattacaagatcctaccgttatcatacctaaactaattaaacaatgttgacctaattaactggtttatacaattagtactacaagagcaacaatgatataatttaaatggtgcccaacccaacacataaaagtatcaattccattgacttttgcacaatgtcaccatgaacagacaaaagtacaggggtactactgcccctgcccctgacctcaaggaaataaagagccattctttcttgatcgctttctttcttcaatttatttattttttacatgcaaagaggcaactacaagtgggcagaaaggggttactgtttgagatttctttttcttcatcttttgacaaaaaatatgattgactttttcttggcaggccggcaaacgccatcagatctccacggcacacaccaacatgtacaaacacaatgaatgccaatgcactttattcagtttatcctcctcttatctgtctgcaaaattgcagatatttacctactttgaccttgaatgctttctgaaatctcatctaattggtcccaaatgtttctgttctgcactgcccttgcacaaactttgtcatctgcaatgtgtcaatgtgtcatagagaaatgagcccatggaagatagagttccagccagtagtagcatatgcatttttctttcaagaaaaagaaaagttgaagtagcagaatttcacaaaggttactactgtagtagtagtgcagaactacatatggatgaggtgattgagtgaaagagtggcagacagagtcatggcttgtgctgttcatggtaaaggttgttgttgttgttgataagtcagaaggaagaaaaggtcttctttttatgatcatgacaaatggagtagattgttgagcattttgcattgactgagtgattcaaactgttactgaactctgaaatgccaagctaacaaacagttgagacggctctagaacagtctcagatgctcaactggtagttctagttaacctgataatgcttttattccttactgaaagatggtttggttcggtcatccagcatcttatatattcttattcagaccaatttgacagattgaacttattctacgagccatctcattttcagcagaaaaagaaagggacatctgaaagtaaattctctgctgctaagaacagaagaagtcacaaattgatccaataatatcgcagacatttttatgcacacttgccattaacacatcccagaaaattgcatttctgcttttatttaaagacttaatagtatcctagctgaaaagccattaacggccacagttgcaggacacctgtacggcaggagaagctacacaggtcaggacacacttgcaagttgcaacaaacaactttgtgaagtgatttgatttaattctcttttctgcatatatgtgtacaaaaaataaaatctcttttgatgttttcttctattgattgtgatgatagagccagtagatggagtgatcgatcgatcgatcgatcggaatctcgcgaatgatctttggcgacatggacgccaactagaatccacccactcatcgatcacagagaccctgaaggcgacgccactgacgttaacagatgcatcctcatcgcctcaaaacctcatgttcatgttcatgttcatggacagacctctcccaagtaaaaggaaaggactgtcgcattgcattgtgtctactgttagctgtgaacagatacaagcttttcgtcttcgtcgacagtgtcagttaagttcttcagaatggagatggaatatattttgcattcagatgctgagatgcagaagaagaaagtatatataccccactacttcacatggaagacagcaccatttcttgagctttcacagtccaacaatggccatgtatgcatgcataccggaacacgccattgcaagttgcatttttttttttgaggagatgatcagtgtgcagcatcaaatttgggggcagaaaactgtctgcagtctgatcctgacgaacagatggatggatatgcaatttgcatcgacaggggcac

SEQ ID NO: 41409 - DNA, 666 bp, Oryza sativa
acatgggcctgttcttcgcaattgaagcaatctttgagaatgttccacaggggaaaaagaatgttctcaaacctgtgttatcacaacaagtaataaatagcaagcaaaatatgtaacagatatttccatataattaataagcactaatgttctcaaacctgtgctatcacagtatgtaaataaatggcaaaaaaaaatatgtcacaaatatttccatataattgacaagtaccgaggaaagacaaaacaagactaatttctatataattttttagtagaactgatcatctttgaccctgctagctgctatcatagcattactacttcttcagtaattggctaccagcatctcaacagtaatcagcaaggaaaagaggctaaaatggcgattgttgtttcatccactttactattatctagtaaatcttaaccattatttttcatttttgaaaggcggtagtttcttgcagctaagcaagtataaataacaagatatcttcttaagtcgctgtacataatactccaagaccattagttataagatgatccttttacatagttgcatgatcctactcccccaaaacatcagtacaaagtattgatcaactcatatatgtagaaaaaggatatgtctaaggacataaatcatacttatagaatgactaa

SEQ ID NO: 41410 - DNA, 950 bp, Oryza sativa
aagattaatttagtagcgtctcaggtaatatttacatgttcagaccaaaagatccaaatccaatcatacagcgcattttcctacaaatggcgttcgctagatagttcactcctatgttatcgacaaattttgaagaagtgtcatcaaaatccatcgaattccatcaaaaacctgttactgatggcattattcagaagatttttcctcctgttctttttgcgtttcaatactctgctcgaaaaaaatttgtcctcctattttttgcatttcaactgatatccccatcatcctgatgtgataatcagagcaatgtacaaaattctctcaaacattaatgaggttcagaaaatttctccttttgcatttcaaaatcagtaaacagcaatgattcattcactatgcatcctgggaagaaaagaaaagaggaggcagcggccatgggaccagtgtccacggagcaaactctggacgctgcattcgggcgtcacgccggtgttggctatgctgctgctacccgttcgctggagggacgagacgagctgcctcgacgacccaccgagccggagcccaaggaggaggctcccctgcgcgttcgcgggttcggcagtgacgatgaccgcggaggacggcgtgcgttggccgagtggctaagtcgatggtggcggcgggacgctggtccgctcgaacatcggctggtcatgtaggcgtatggcctcctatgcacatatagcaaaggaggaaaatgagcagctaaccattcatagtacgcaagaaaaaatggttgccagatttgctaggtccgcgtaacgtagaatacctgtcaggcaaatgggagcaacactgctattagagcatcaaattcaccggctcgacggcgatcgccacggccgcgacagtcacccggcgagcccggaggagcatgaggccgtggcggctgccctgaccgcgag

SEQ ID NO: 41411 - DNA, 4043 bp, Oryza sativa
  unsure (1)..(4043): unsure at all n locations
tgaagttaattttaagatattttcaacatattttctttttcagcattagcttttaaatcactaagaatatatataaaaaaattatctacaaattaacttttattttctaataaaccgttttaacttattgggaatatgagcaaacggtgaggttttagggctcgcaaataactaattgtaaataatttagttaattgattaattaataatcctggccccggaggaattaattggtgatgccacatcgtgtacgaacaagtgcatgctacggagtaactaattaataattaattaagacgctgcatgcatctattgcacgcgatcagagaggtcagaggatgaaccttcctttgtgttgtgttacctgcggttgagggacttgcagtatggctcgtcgttgtaggagacgcagccttcgacgtcgccggggccggcgaccctcccgccgaggatgctgagcagcgtcgtcttgccgctccccgacgggcccatcagcgccagcacctcgccgggcgccgccgacccggatatcccgctcaggatctccctcggcgtacccttcaccgccaccttgtacttcacctccgcaaactgcacgaacgaaacgagtctcatctcatgtagcattagctcactgaacctctcgcatgccggcggcgtacgtccatggagcttgggataatcgatgcgtttggtcgatttaccttgagatatatcggcaacgtcggctcggtcatcagcttcttgcgcggcgtcccggcctcgatgtccatcgctgcatacgcacagcggcacagagaatgagaatatatatattagggaagtgatttcatctctcaaggagatcggatatccctcgtttcgtctatattatctaaatatctataaaaaaattaaaaaaattagtaacataaattaatataaaatatatcactccacgaaaatacaaatttaaatccaatttttataagtggtaataaaaatgccaaatataactacgaaaggtccgatacccatatgtgcatgcagttaggatcagtaggagtgatgggacgcatactgttgtcgtcgtcgctaaagggatggagctcggcggagcacatggtgtcctggggagaaggggtaaccccggtaaaggtaaagaaaaacccaagcctggcgctgaaggcgcgcctaagggcgccccgctgaacacaaggtcctccatttcgagcttcagctgcgcgctgcgggacttgcggatgtggctgttgttgttgttgctgctgctgtagccgtggctgttcccaccggcgccggcgccgccggacgccgagcgcttcccgaagctggacttgcgcgacaggctcgtcgtcgtcgtcacgtcggccgtgctcagcaccgtctccgccgacgccgtcctgctcagcgactgcgccgacgacggcggcggcggcggcgccagctggtccgacttggtccgctcaatcatcccccctcccgtgtccatcatcggcttctccattatcgactccatgaacgaacacgaacaaactacctagctaacaccgtcacgttcctagcaagcacatttagagcagtagcttttacacgagacgagccgttatatacacagacacagagtgatgggaaggcaacacacgcagctaaggcatttggcaagcgagcgatggaggtcacgcgtgtgaggtggattgtggcgagggcgacgtgggggggaggcagcggaggggcagggggcgcgccagcgaagcgcgatgcgggacgcggggcattaatggagcgggaaagcgcgggtgtggctgggcgcgctcaggcagccagcttccacacatgccggcctcacgacgacgtatcgcgcagggcacccgcgcgagcccccgcctgcggctagcttagcccgcgacagggacgtccccggccacctcgccttcctcgctctctcgctcgcggaggcctcaggcgcgcgcgcgtcccttgcagatcgatccagcgcgcgtgcgtgtgcgttcggtttaggcgtacgtgcgcgcgggcggcagcggcggcaccgatccttttaagtcagcttattggcttatataatttataagccggtggatttaatgtcctaagtttagtggtttagttatacatctaccttacataagccaaaaaaaacttctccaacctagcttttggcttaatagtgttagagtggcttatggcttccaaaaagccaaacggaaaagctgcttgtttgtttaggtttagacttttcgacttataagttggcttataagcctaaacaaagagggccttagcccctccgcacaaattgaggcgctgggtgtgaaacacaaaatgatgacctatttagcaaatgctaacgtaaaataagtgtttagttcacgccaaaattgaaagtttggttgaaattggaacgatgtgacagaaaagttgaaagtttatgtgtgtaggaaagttttaatgtgatggaaaagtgaaaaaaaaagtttggaactaaactcgtcctaagtaaagttcctttaggcgatacatccatatctttacttgatgccatattatttactccatccgtcccaaaataagcacaactatgagtttccgtgtccaactttgatcgttcatcttaattaatttttttttaaaaaaaaataaaaaacataatttacacataaagtactattcatgttttataatcttacaacaacaaaaatactaataaaaaaattaaataagatgtacgatcaaaattggatactgaaactaatggctgtacttattttggaactgggaagtacaattcattgcagggttgctctatctcccgatcgatgctttaatttttctcgatccaaatcactgtcggactgccggtggtcgtttatccacattccatgttagcataaccacgatcaagcatggtcggatggtcctgttcatcggtttacctatgccttctatcaaacaagcagtaattttgcgcgaccaataacagctaactcatcaccacctaattaaaaacagtatagtggccatatgcctagataggatctaggaagaagacttgtgtgcgtcatgatgtagtgatttaatttttcttactaatgttgtgtttagttccacgttaaaattggaagtttgactaaaattagaagaaaaaatattgaaaatttatgtatgtagaaaaaatttgatgtgatggaaaagttgaaagtttgaagaaatagttaggaactaaataaggtctaagcaagatcttcaatatttggaacgcacattcacatcatgatcatgaactatctttgaggtggccattattgtttccaaacacttgtgagggctgagaaaaacaagcatctaattaaattaatgaaggataaagagattttttattaaaataataatatgaacgcgaaaacatgcttagaatgtactaacggcttaggagtgaaatataaaattttcgagccctaggcaatgtacagcccctatatacgatcttctagccataacacaggaaaattcggagcaggcaaaagtcgtcgatcgcagctgcgcaggagtcaggatggacatgcttggcatgatgcctctttctgttttccgtgctcacactgtcgtcacacagtgcaacgattaccatatatcattcgtgaagagaaacacgagtacacgagcggtcgagcatcctaatctcctttttaattttttttttatttttgaaaacaagcatcctaatcttgacgaggatgaaagtatcagcaacggccccaatgctattgttgacaagagatgtgatgtggctgtggctactggctggaatcnggtactgcatgtagatgtactccactccagtaggcagtacgcctgcacagtcttttcctgactgttacggacgcggaaatgtttgtccggagaggagaatggtctctgctaaccggaagaccggaaccaccgaccaatcgggaaacggcgtggcgttgccagtactgattggtactactgggtagtatctttgacctcttggttaatgcact

SEQ ID NO: 41412 - DNA, 619 bp, Oryza sativa
tatggttccagccgagccgagccgagccgacgagaagctctagaagagtggcgttggggacgtggacggcgagagcaggtgacgcgttcccgcgcgacgcgggccgaggtggcgagctgcatgcgcctcatgcacgcacaccaacgcaccaaccagcgagttcactctcccatactactagtaccactctactagactccgttcgctgacacgccccgtccactcttgtccacgctgcgccgcgcagtgtcgcgcacaccccaaaaccccaaccaaccaaacaacccgacccgcggccatggatgcggcggcgggcggcggcggcgagccttcgccggcgccgggagtgggcggccggaagcacctctcctccatcgccaaccacgtgctccgccaatgctccctgtgcgtactttctctaatcctaaatcctaatcaaaccctgttgatggttgatttctccatcgtgtagaaactgtgttgttgttgttgttgttgttgttgttgttgttgtgtgtgtagaaactgttgctatcaattcgaaagaaactggcagtgttttccttgtagcagactcatgtgctttgatcttgtacgaacagaacatattggtatgaag

SEQ ID NO: 41413 - DNA, 570 bp, Oryza sativa
aattcctgcagcccgtccatacggtttccacgaagacgaaagagatatatttacatcgggccaccatattaatttgtgtaggagcccgtgatgaaggcctcgtttggtagggctccaaactccaactccagtgagagctagctcctgttagagttgaagactcgttgaaaagttgaaaagttttttgctacctttcagctctagatctggaaaaaaaatgaaaaaaaatgaaaaaaagagacctagccggcggccccaggcacgccgccggctgccggccgtcgccgccacagcacaaggcgccggagcggtcgcagcttgtcatcccagtgtagcgcccgttccgtcgtggcgcctagcgggaaaattatctcttaaaaaccctaattgcgaaatttgtttctttgcttgttgtctagtgtccgtgccatctcaagatctcaatccccgatctatcgtcgagttcaattccgaatccaaatccctccaaatcaatttcctccgcaaaagtctagtttgcctcccccgggttcgatgggccgaatccagctcggcccatctctcccccgg

SEQ ID NO: 41414 - DNA, 660 bp, Oryza sativa
atcctagtatgtttagccccgaactatcttttcctaagttcactatccctaacacactgcaatagtggaaaaattatcttttcctaaattcactatccctaactcattgcaatagtgaaaaacgtggtcataggacagtaacatcacatacaccctcgtcatatcctcaaaacatagcaaacactctctactaccatctactcaaaacacagcaaacactctctactaccatctattggtgtatcctgtatagatgcaaaaacgtcaacagaggttgtatgtcccatacaataggcagaaagcccctcctctctatggccgttggagtaaatagattattaggccatgcctgacagataaggtaaagtaatatcgtcgaagctgaaggagcaaccccaaagtgttggtccaatcattacgaataacacataaaaagaacatttgtaatttatatcactcaatttatttaaagtgttagtagtatgttctcggctactcaaattttagaccgtatacccactgttgggttgggacacagggattccggcctaatcttcgcatcatcggatcctcttcctcttctcgcggacaagataatcctcctcgttctctcctccacctctcctccatgccggatcaactatggggacaacagagtcc

SEQ ID NO: 41415 - DNA, 1551 bp, Oryza sativa
aataatgcaagggtgtacgcatatgtggatcgagtgcccccgaatgaacaaaacggttagcatgttttcaaagaagcaagatatgacactattgctaatggaatggttttttaaactcttgaagatgtttattgtatgttatccaaataattatgaaataatttgataagatatataatatgtgttatatcacttcacaaaaattaatctctataagtttaaaaaataacaaatttaactatagtagttaacgtatatttatagtcaagtttgtcttttaacttgtagaagttgaattctaacttacatatttgtgaagtgatatattaatctatcttgacaaatttttttaaaaaaaattcgtagatggcgtgtgaagaacaaggggacattcccttgagagtttagaattgtttcccttattactggtgtcgatcgacaaaccggtattttgtatatgtgcagaattagttactccctctgttacaaaatataagcgatctccaatattcaaaattagtactacaatataagcatttctatgacactatgacactgattctattataaggaaattcataggttttcaacaagtcaagtgtttgggagaggaatataagcgattcaaaatttaaccattatggtgacagaaagggaatattttcccttaaccttagtgtttgtaaataatctatataaatgcttatattttgtaacggagggaatcctaattacgctgtaacacatcagaacaagaaattcataaagatatgcagtattctactagttgatcatacggttctggtggttgacctaaagtactgaacaagataatgcaaattatttgactatttcttcaatgcgtcgccagtggttggaatagaaaaagagaagaagttgtggctgcaaagggtttaagggagttgagcctttagttagacacttagacagtactgaaaggacaattaattaagaagtgaaatactcctactactcgcttgtccaattaagaaatttgaaatatcccttacaaattaagaatttcatggaacgaaattaggtggccaataaatgagcataggcatattttcggtgtggattatttctgatcgatatataaaattgacatgttacagcttggtacgtcaactagcagaggatatgctagtagcaataattttattttttgagagagaagcggaggatataatttcgttagccaaacagagtaaaacaaaatgccctagtcgactggaagaatggtactccagttcagctatagcagaaacattcccgtgcatgcgtgatcttcggagcatttctgttcttccctttcacaacgatcgacttctgttcggttttaactactcgacttgaagaatgctaacatacgacttatagtttctgatgcagcaaacagtgatcatcacgcgtaagtcaatctctggacgttgcagagccatgtgcaagattcaataatgcatatgcgacaatcattcattgttatgcaatccatatccattcctctttgcaggcctcctagatcactat

SEQ ID NO: 41416 - DNA, 1828 bp, Oryza sativa
tggggagggggggggggtattctgcaacaataagactgaagcatccaaaatacaattcatttttctatatgaacaaactttctgcaccttggtaattaagcatttaagttccaagagaatgactacgtctgaggactgaatcatttcccatgaattgttacaagtgttaatgtttttctaaaagaacaaccaggagttataattgcactcaaatgtcagatatgttggctggtcataagcagggcaaagagagaaactagccactggaatgcaaaaagaactgtagaaaagagacaacaaaggtagaggctgactaaacagtgaaaaggttcttaaaagtgctaatgttgttgtaagacaattacacaataggaatgttttgtgatgcagatagttagaataatggaaataaagtgaatttgaagatgctctgagttgtttttgctttgcaccggcacatgggacattccacaatatggaatcatggacacatatttcacatgactatacatggatgattaaaaaaagagagagaaaacttattctatgccataacatcatgcatgtcctgccaaaaaatatatatcaatattcattggccaggaattaaaatagatattttgcttcttttacaactctgactgattctgacttatattgtttcgtgtaggtaaaaaagctgactaataacgtgcagtttatcttggaaacagttctgcaatctaccgtggttgaagtacaggtgatctttaattctcataatttacctttgaagtaatttcatattttgagtttcaaacagacttatctgccatatacaagtgctgtaatttataaatatgcaagtaatattcatgttctgctatgtgcggactgcggaatgtactgctggtttagagcatgtactataaggatttaggtgttgcctccaaaagtgccacataggattaggtgatgaggtgtagagagaggatgagccacccttcatgcaagggacaacctccgcacaatctccaagagaaaaagagagaatgagatagtgtgggagtgaaccaacacaaaaaaaaatgatgtttgtgtattagaggtaatatgttgtacatgttgcctcttaattaatggatagatgacatggctaaaattagaggtagtagccaactctactataagatttgttcttagtgagcagttttttttaagtatttaaacttgatttagtgagcagcttaccattacaaatcttctcttcactagatatttcagaaagggtaaacatgacattcaaatgggctgtaaatggcgtggcatgctgtataaaaggaacattctagggaaatatttttggtttctgatcttcaaactgacattatttagtttcagtttgtaagggatgctgtactttactgatgatctttagagcagcattatttagttccaatactttacattcaaaagcttgttcacctttattacaaccaattgggtagctctttatgctatatctgcatgacatattagtttgcgtgtctacctaggtaactcggcctatatctgcatagcgtcttagcttgtatgcgcacctttggcgtaacgttagtagtaggaatattggagtactcagactgttgtgcatgcccaacttaagtccagttgcatccttgtagaatcttagtccaatcttgtgtgtacattggatctggatccacatgttgaaatgtgcgcacgacgaacattgccatggcgcaaaggaatgcaccattgatttttaaatagtatattttttagcaccctagatgatctcacatgccaggaagcaggccttctctat

SEQ ID NO: 41417 - DNA, 717 bp, Oryza sativa
cattaaaatagcatacgcattcttccaataaatcatgaagagaacattgggatagggaatgatgaatgcaactgattatcatggcattttcacagttgacggttgacacacagtcgaacatttttatgacctgagttaaataacataatagccatgatgttgcgagagaaaatgatgcaaatatgttataaaacagtgcaaaaattaaagacactaattcatgatatcatctctcactttgttcacagttgcaagaactatcacatagtgagcctgacacatttatgattaaaaattgtgtccgcaatggaaccccaatatggtacagtgctcactacaaaaatgataaaaacaaggtctacttttcaatttggctaaggctatgagatacagtttctttgggaacggaagaactgtgaggagtgagatctaatcagatgttaccaatttagcatcaatattaactaccaaatgtatcactcaaaaactaaagaccgcatggacattaaacgatcttacaacacaccttgttagttgcccaaaaccctaactacgatcacaggtatcttggagttctcacaacattctgggttagttttgataatgaagcactaaaatcatctctccccaaaacataccaaatcatcacttagtttcaagtgaaatactatacttcagatgtttacctacaacaaaattccgttttgtaacctgcta

SEQ ID NO: 41418 - DNA, 1373 bp, Oryza sativa
attcctgcagccctgctgccatgatagattaagttaggtagatctatgagatttctttaatggaccatgaattatctaagcacacgcatcagtacaatcacagtagggatttacctatatatcgtactgacagtgctagcagctaatccttgttcagatctgtgcaaaaaaaaattactcaatcttatcggctgtgcgaggtctcaaatcgggttaacttaattcaatcagtgactgacagaacccagttgcgaaatggagtgtgtaaaacagtagaatagtagcgtattccgtacttcaagaatggcgcagaaagcacgaggaagtacagtatcccagttccgtcttagtaaaatacgggttaggataaataccaaaccaaagcctaatatatactatcgtactaccagtatattttgggaagaaatgagtaggtacgagcatgcaatgcgtcaatggcggagcggagtagagagcagaaggcgcgtggaaagctgcatcggagcacatggatctgctctgcatatgcctgattttgcattgctactgcttcagataatttactcccaactctgaacaagtgacctgcctgccatatttatattcgctgaatcttgcgctaaatgtttttttaaaaaaaaaggcgagtagaaatacagaaaccgggaagagtgatctgtagcatgggtcaagcaaggttcagagtcttcagacaatcagacaacatgttcggctgtctcgtctgtgtaagaagttcaacgcatcaatctattatagccgggccggcatatgaacaggaacagccacccaaaaaaaaaaaaaaaaaacaggaacagccaaggaaaggaaatggagcgagtgttggtgctgcttattattcatcaggatcgcattcacgcatactcctatgctgttgctgcttggcttgttgactctcattggctgtaactaaccatgttcagagcaagtagtgtaggaggtttttcacttttgctgaatcagcgtgctcgaacgcctctccaattattcatattgaacgacattagagatgagataaccatttggaagaccgcaaaggttgctcgaatcccctgatggatacgaaactcctatggcgcgatccatcgcttggggcgatcggttccctgccccacacggtataccgttttactttcctattttactaagtttatacatatcaagtttgcacatttaaagtttatacaagtttgtacacctaaagtttgtagacctaaaacatattcaaattcatctttaaatgcatttgaattcaaattcaaatttgaatcagtatataaacttttgacctataaaaaatgtgtaaatcctagatgtataaactttgggtatat

SEQ ID NO: 41419 - DNA, 654 bp, Oryza sativa
agtggcaatgtgctatacgccatactagctagagtagcactcgatcagacggttaatttgaacattgaagtggatagcaaatgaactgaaagcaaacacaggattacaacaaagctgctggttttaagctgaattgagtagcgaggtcactttaacccgccttccgcagcttccctgaaacaacactcgaaaatgcacagccccacaaagtttgacaaggtagaaagaaagaagatagctctctctgtaaaacgataaaaatgatccacagatgaaaggagctccctttgcaaaaggctgcggctggttttgctctctggaagaacattatacaagaaccaatctaatcatgcgttctttggctctagaccagcaaagcacaaagctttctctcatcatttcgtccatataggcatatagccgatcactcattcactctccacgctttcacttcactcgcccactcccactctcactctctcaatccatccaaccagaaaaaccaccacgcgcgtgcgcccgccgcgcacgacgcacgcacgcacgcgcgcgcgcgcgagacgcgagacgagagagagacgatgcctccgcttcgccgccgtctcctcctcctctgcctctacgtggccgcggcgtcccgcctcgcgccgtgct

SEQ ID NO: 41420 - DNA, 735 bp, Oryza sativa
cttgtgggcaatttgtgcttgtggctagaatagcgagttagcaactagcactgaactgttcaggttgcaggtctagcaatgctcttggctctaagctcttccggtggtgttcgcgcgagaatcacacgtccgtcaggaagctgttggaggtggatggcacgtcagagagatcaaaactcctgaacaaagtatgtgccctgccagcaactggttgtgttcacttgttagtgttagccttcgattttgcaggcatcagtaatgagtttagttctgtatgtttcatctgttcaatcgttccaccatttgggctctaccaagtgaaagctatttatatttcccaagtcctctaattattgttgtgagttcaaactagtgcatagtaaccttgtttaaatacaatgcgcatatacttgtacattaacttccttgatgttatgacctttatagtttaagcctatgcaatagctctacttaatgacgtctggatttgatttgcacggctctctgcttgatgccactcttcactaataatgtcacacaactattcatctgtacttgctgtgaacagtgaacattgtctggattatttatgattgcaggtgtctgttttgatgggttatagtaatacacaagaattaattgagcaagaaagagcccgcagaggatctgctacagaattgatcagtgtatgcaaagaaattgagttcccagaaatgtgtgcagggctgcaggaat

SEQ ID NO: 41421 - DNA, 613 bp, Oryza sativa
atttggcccgtgattccaggacagcgaaaaaggagggatttttaacgaccaaagcatcggatcagatcatcctcctgcctaattatgtcctgcactgatcccacgataaacttaaacatcaaggaaaacgcataaagcaggctcaattatcctccattgacattagaaataagaaatggtctgcattttgatcactgataaaaaaaaattctctgaagaattcagtgttcttggacaattgtcatgagttggcagcatttactaaattggccgcccgccgacacacacacacgagcagatgagggttggatccacggcgaaatgctcctcctgcttttgaagagcatatccagtgatctttcagactttggtcatggcctcatcatggagacaaaaacatacctgaaccataaccattttcagttttcagatgtactactagtagtataaattcagaggaagagatggatcggcttcgatctactgcaagtgcagctaactagtgtacttgagattagtttcagtcgatcatattgctcgttgatctgatgctcgtacgtatgttcaggcttgagaagtggtgggttcagataagcttaatctctgcatgggc

SEQ ID NO: 41422 - DNA, 525 bp, Oryza sativa
attctaaaaataaattttgtcataaataaaaattatttttgtgttgccttcgctgtggcaaaactaaaatattatttttgttaaataatatctcgcaaaacaaacttgaagttttacactccatttatatacttcgtaacgttatattttcttgatatctaagggcaaaatggactttatcttaggaatttaacggtccactaacggtcaactaacggaaggggtatagaagggatccaaactgaaatttgggggtatggaagggaatgagcaaatctcaggggtatagaagggattgagtaaactttcaagggtacacaggggattttctcttttcattccaccatgccaaaatgtctcactcaagacaatcaaatctatttataccctcagtgttgcagctacttgctgcaactcctacaaagaaataaactcagaattgtagctacagtatcttctttcagcttaccataggaggcatatgttccagttccacattaacacttgacaattgctgtagggaag

SEQ ID NO: 41423 - DNA, 724 bp, Oryza sativa
tcctgcagcccagatcgacgcagctcagcctcgatcccaatcactgtcaagtcagcgtggcgactgatgaggagcaccactagcactgttccatttgtaagtactctgctagctactagcacaagcaaagcgatgcagggatcagctagggattcgtcagcttggccgtgctgataatataggaaatgcccttggtttacaggtctttcattggacgcaccggcgacggctttccccatgtggtgttcgccggggttagcgattttgatacatatatctggcaggtgaaggtgctgcgccgtcgagatgcgcgcgcggcgacttttcggcgcgtcaaacacgagaagcatatagaaggaatagaatagttacatggagctggtctttagccaaattctcctgaaatgggaaagcctatgggagaagcgcagatgtcaaccatcgacccttgcattatttggaaaattctaagcttagggctaatagcagtaggagagtgtggagtgtggtatggtcgaagcgtacaggccggtacatgggactgatggtcccatggctatggaggtctaggctggctttttctagcaagatatcatattattgtacaagcttcagctctcaaagatgggtggagatttggtggtcctgaaggaatgttcatcggcaagaatgcgtttttagtaggactagtgttcatcttgcctgcagcttttgttggcacact

SEQ ID NO: 41424 - DNA, 1346 bp, Oryza sativa
ataaaactatcattcttaataattgttgttcttttttcaccttgaggtttgaacccttttctcatgtcattcaggagttaaaaagggtgaaaaggcatgcaatctttgttttgttaggggtttttgtggatgtaattttcatgataagttaataagatagtacatgtcatcttatcacactctttagcattaccacctttttaaaaaaaccaatgcagggtttacttatgagatgatcatatgatgtcctttcccaacttcatcgtgaaagtttattgtcaagatcattgctcgaaccatcttagtagacggagagtagggacaaacatgtaaaactcacaacatttaatattttaaaccgtaaagagtggactcatctatcaccaactatgtcatcatatttttgtttgtcataaatataataaaactaaataaatgtactgccagctataatcttaataagaattgattgtcgttccgtcactagcctagtgataagtgtattgctattcttaacacaattgattcttcctaaacgcgttaatgctatttttgtctatattagattgactacttcatctaagttatttgttcacaatcgggtcccggtacattggaccaatacaatttagaatggagagtggagccctctttcttaggggctccgcatttctatactcgtgcgatgtttataattttttgttccttctacgtatcataaatttgaccgacattcccttaaaaaaagaagaaaagaccgacgtcttctttgggtccaccaaatcaaaaactttatcgtgtagttatatgttctcagctaatttaagattggcactcttgattatctatttatctttcagctcaacttttactgcgagtctatgtctgacttaaaagttgtttttatcacagagaaaaaacacctatttttcattccaccatgtcaaatttgaaagggccttgatgtcgcctagagaggggtggtgaataggcacgcctaaaatttacttcaaatcgcagcggttaaaatcagggcccggaacttcctggcaaaaggtccggaacttcctggcagctttttctcacaagcagagaaagctgcccggaacttccggggttcttcctaggaacttccgggcagttgtgaattgctatttcaagcacctcacaaaattaaatcacaaggaagcctaaaccatagagaggtacaacatgtctcaaacaagagtaatacacatgaaaatacacaagatagtacaagtgatcatacaatgggagacatgatagcacaactaggcaaataaggagataagcatcacaatcacaaagataaagagagtgagagg

SEQ ID NO: 41425 - DNA, 726 bp, Oryza sativa
ccgatgataaatgtagtgccagtcttgacattgttgattcatgataaacgcgttaatgctatttatgtctgcattaggttgactacttcatctaagttattcgttcacaatcaggtccaggtacatcgggttgttactaggtagtaaggagagtagaggccatctttcttaggggctccatagtttcattgcacacttatgtctgtgtgacgtttatattttttttcttctatcgtaataaaattcggacaatgtttgttttgccagtccagcaaatcaaaatacttcatcctagttttttttatcctcaattttagttgggcattccatattacctttagctcaacttttaccacaacttgaaaactgactttagttgttttatcgaaaagaaaagaacacccatttttcattgaggaaattccctgtgtacctctaaaagtttgcccaatcccttttatacccttgaaatttgttcattccctttcatacctctaaatttcaatttgaatcccttctatacccctttcgctagttgactcttaaattcctaccataaagtccattttaccctttgatatgaagaaaatataaatttatgaagtatattgatcgagtacataaatataaatatattgtatgcgactattatatctatgagtttattttgtgagattgtatttaacaaaaataatttttatcttgcataacaaaaaaattatcata

SEQ ID NO: 41426 - DNA, 1515 bp, Oryza sativa
tataatcgacatatgccaaacgacatggctgataagtgcaagatgggtgatggcacatgcctaacaaattagggcaatgtttatttcaatccatgccaatgtgttacaatatattttaggaccttcttatttcaatttttcgaagtttctatctcctgtctccacttgttcagctaaaacttagcttattttccttggctctgataagggtttgatgataatcattgtcatataaaagagttgtattttactatgataatgtggatgcacgctgtggacgttgaagatacgattttctttccgctgtataatcatgcaattcttcttcctgggcttagcaccaccaccgttatcgactggtgagcttccttggtatagctccggtcgttgttagccatgggcatctactactcattcaatatcaatgcatagctagagagaggagcgttagattgatcgcttgctctcctactctagatagagagccactggcatgcgaattgagcaaagagcattgcggtggagtcccctcccaacgaatggcgaaattcctagcgtcaattgaaaagatgggtctagcccttatctattatgctattttggtcaataattcaatagacattgcttaaagtgaaatttacttttgtatattgacatattcttaacagaagacctcattttttttagcatcgacactgttccatgggaacttgagaaaaggggtttagaattgatgaattttcctagttgaccaatttttttattggagtgatacctcatcacctgttggaacttggaagaggtaacccgtgcatgatcagtagatgcaaccaccgagacgatcgaaatcggcttcatccaacatgcaaccaaccaaattgaatctcgtttaatcctagcccaattgatctaaccaactaagcaacctctcttgcatggttgcgttcatctaatcaggtcaagcctagcatggataagacatacgcgctagaataggagtgcatacacctaaacacgccttttattgttcttactacaaaaaagagatgtgtttacagtgtacatgtgcctctactctacaaaataggaatgaccatgacatttttatgttacttacaaggtactagacatatctcccactaaaagggttcattagtgctttttctttagattagagactaccccacatgtcactcacaacctattgaagtgttgtgtttgactccatgtccattttagtttgggtagagcggaatgcaacaatttctcacatcaagctcaagacgacactagtgatctatcactaagtaaggaagaatcacatttgtgtcaagttgttggtttaaaagccatagaaaaacgaacgaaggaaaaaaagttacgcgtaaaacttatatctatgttattagtggtttaaaattaaagctaaaaatagaatagatgaaaaataacctaaaattacctctaaaattaagttctaaaatataaattttagttgcggctgataagccaaca

SEQ ID NO: 41427 - DNA, 4983 bp, Oryza sativa
tatcccttcaatacctttacctacctaccactcttattacttttttttaatgattaaggatattttagtcattatcgctctccactattttcattttggaatgctaggaatggttttttttttacggagggagtatatatttaaacggttgcagtactctacaacagtgcatctcgtgtgagatttcagacttggaactaaacaagtgatcctagtcaggcttcacctcagaccaaaagctctaaataatttcattcattattaattcgtcaacaagaacagaactgtcattgcagtaagatctccagaagaaatatccatcaagtttaattaaatcagtggtggtgatgctaaattaaagcacatgcatgcatgcccaaattaaagaggataaacacatatctacttagtgacatgatgtcatttatctagtaatcttatgatcttatctgcagtactcacttctaggtataaagtaacacagtaagcatcgcaggaaaacgatggaaagcaaaaaaggaaaaccactaagtgctaaagctaaatctacctacgagatcaaaggggattagctgatgagctgatgactcacccacctgatcggctgattcacagatctcacaaaaggacggccatggtgtggcatcttttaattatgattgggaaattcaaacagaaaacaacggttgtcaaattatccgagagtcaccggcgtccatggcgaaccagcttcgagcaagagatcttaatttcatcagagattcagagagacacacataccaccttaattaacacagctgcagctaagctctgttcagatttcagatatccctacatgaacccaacaacaaaattcgcctaattaagaaaacatgtgctatcaggtctcaagaaaaaaaattaatcactgaatacaataatttcttcagtagtttcatgcttttggcaaccagatatatatgtacgctcaattgttcatgtcactccaaattgacatatacatgtataatacacaaacatcttcagcttcaggcttattatggcaaccgaatatattcatgtgtcacgtacgtatatatacatcccataccatactgtccatacagtatatgtacacaatacatgaacaagagcgtgttaggatcgtagtttctccattaattttgccatcccagatgagcactatgaaaaaaaaacagtagtacaatctaacactaataccacttgcagagttgcaggtagaccagaacaataatctccggtctccagcaatggcagggcgcgcgatctcgggatcgaaccgaatgagctacctagctagagagcctagaagcggtggccggagacgacgaggccgacgccgtcgtcgaagttgcgggagtagctctgcaggtcgtacccgaacctcgccgccgccgcgccgccggcgtgcctcttcgacgacgaccgcaacctcgacctcagcttccagtacagctgcctcaccggccgcggcgccgccaccgccgacgacgaccgccgcctccctgctacgccggcgcccttcgctgtcgccatcctcctccggctgccgtacagtccgtccagaaacgccatctcttctcactgacaaaattaagatcactctctcgatcgacttgctgtactcgagatcaaacacaagcctaggagtttttgcaaatcttgtttcgccgcgctgctgtgagctaagctagcgtccctcacctgcggcttatataaagctcgcaggatggctgggcatcatcgccggtggcggggcccgccggccactcaccggccggccggaatggtccgggctaaagtggatttcaggtatctttttttctctctctctctcccattgccgctgtggtcaaggacagaaacaatggatggagatagccaagaaagaggaggagagcatcgtagatataggctaagccttttgctttagaggtattcctccgtttttaatgttacaagacattttaactttgattaaaattaaactgctttaagtttgactaaatttatagaaaataataataatattttcaactcaacataaatttattatgagaatatattcaattgttgatttaatgaaactaatttgttattataaatattactatatttgtgtatagacttagttaaatttaaaggagtttaacattgatcaaagttaaaacattttataatttaaaacagagggagtagctaattaacctaggtagcgtgagcagtgaggtgggaaatggcgatcgaacgcggccgtctccatcgcagcataaattaaaggagagcaaaagctatgttgatcgatcggaataatcgatcgtttggagatagatcagtcggcgtgtcgaggcgcgatcgatcgatgctcgctgccgtcctgaaatgttgtagtggacggcgaaagcggaagcagccagatgcatgcgtggatacgtggccgagatcgcgatcgaactgctgccgaattgaaatgttgtgcgtgaaacttagggtttgaaagtccggccggaatgaaatttcggaccccatacattattatttcggccgatttttttaatttttttaatttgataatattttgttcaaatttgaccaacatttgttcaaaatttcagaaatttcggatcaaaattttagaaatttggtatatccgtgacctccgatagaatcggtcaaaccgaaaaattaaaccccgtgaaagatatctatgcagatcgatgtagtcattatattcccggccgtacgtaggcatctgagcgccactagctagcgtctgaggcatattacacatctacacgttttacaattgacacagcaaaacgtgggggaaatataatgtcacatgaacaatgagagagcttgcagctacagtgagggttgtacaatggtcgagtttaggcgagatatctggatgttgccatgctacgacagggcttaatttatgcccgtttggctgacatgacggtgtggccgtgtctcttgttcaaacgacgacaatctgtgtgttcagttcagatatcgcgtggtcggtcgttgctgcgaacgaatgcactccaaacagggccgtgcacatgggcatgcggcccatgcgaccgtatagacctccaaatttttagggcctcagaaaatcagcccaactgaataaggcccatgcatttgtgtgaggccagagcgccataaccctgttcgagtccgcgcgtgtctccgcgcggcgacttcgcgtgcgtggcgcttcgtattctcaactccgagccccgagaccccacggcgttttgtattctctttcgtttttcgtatctgtgacttattcagttcgtctcgagtctcgacgtcttgtctcctccgagcagcaagccaccagccggctcatccaatttcaaattttcattcaaccagcgaatagcaacttagcaagcaaccaacaagtaaggcactaggcagcaagccagcaacaacaacgaacattctccattttcaatttgacagtttctgattatgcaaaacaagtgataaaaaatatactattcttgatatatcgcatttgctctgcagtatatatattattttagttatagtttgtatcctcacttagtgttttgtacagggcctacaaatttaacggcccggccctgacttcaaacagctagctaggaccatggctgtccacgttgccgatcgagaaaggttttggtgatgaaactgaattagtacagtaaagcataactgcataagcactctgcactcgttggagcaatatgcatgacagacgatgatatataggcagagagctaggaaagacaatcgcgatgaggaggaaagtgtaggaaggtgactagggttcaccataccaccggtaaccgcgtggttaccgcagttaccgggtttaccgcgtttaccgtggaggtatggtaatgtaaataccgcggtaaccttcttaaatttaaaaaataatttaaatttttgatgaattttacacggttttttacggttaccgcgataaccgtgcttaccgctggggcgcggtaaccctggccccggcggtttgggaaaccctaaaggtgactgcatcaaggcgctttacgcgcgtgattgaatattgatggatggttactgcttcctctggccggtgtatttgacgtttagggagaatctatctatctattatattattaaacagctttgaaaggaggcaccacgttcgctgtggaggctagaaattcccacattaatcggagaaaaagaaaaaaaagaaaaggagagtccaagtagaaatacaatttaaaaaaagctgaaattcggaattaaaagtaagcaatattgaaagaagtttctatataggaacccaatacgagattaatcaaaattcgaaataaaaataaaataaaatccgaaattagcgaaaaaaaagagtctaagtaggaatacaatttaaaaatagctgaaattcggaattaaaataaggaatattaaaagaagagtccatacaataacccaatatgagattaattaaaattcgaaataaaaaaaataaaaaaatcgaaattagaaaaaggaaaagaaaagaagagttcaagtaagaatataatttaaaaattaactaaaattcagaattaaatataagcaatattgaaataagagtacatataagaacccaatagtagattaactaaaattcagaataaaaaataaaatataatctgaaattaggcaaattaaaaagagagttaaagtagaaatacaattttaaaacaactgatattcaaaataaaaataaaaaaatctaaagaacacaatacgaaaaataaaataaattctgaaattagaaaaagaaaaataagatatcagctagaaatacaatttataaataactaaaattggtgataaaaaaataaagattactaaaagaaaagaccatctgaaacacatgacgagattaattaagtaacatgcctatataggaga

SEQ ID NO: 41428 - DNA, 578 bp, Oryza sativa
ctcaaaatcccttatattggtacggagggagtagttgattcttgtaggtacaatgagaattgctttgaatatgttattgatgtgcttatctctaatttgatatgctgattcaatggttcaaacggtgtctatcccgggtgaaattttgacccccttttttaaaattttcttgtcaaatatgatacatattaacttatcattgcttcatgaatccggaactaaaaggcggaaagcgaaaagacacactattactttagagacctctgcatacatgcaaggttggtcacatatctaactaagctttggatgtgcgtttatagatatttcaggagaactggatgccaaacgtcatggaaaaaagcagccaagtacatgcatgcctgccagagatgtatatgctcttatgtggcaaattggggctgtaaaatgatgattgatcaataactgtttgcatgcatgaagttgttctctatctaaaagaacaacctggtcattccgtacaaaaagaacacttcatgtaactgaaaaaaaaaatggataagaatagcaagaaactcaggtctcagggctgcaggaat

SEQ ID NO: 41429 - DNA, 668 bp, Oryza sativa
gggagagaggcgagcgggggaggaatctgtgggtgttttgacttgttcccactttgcccctcgctatgaaaaggagtacgagtaaagaatgtttttttttgtggtttttggaatttggattgtatagtaaattgtttttttttctcccaccttgtgtttgagccatttttatcatgtcacttagtaaccttttgtgttcgagacattttcctcatgtcattcaatcacttatctttttgtgtgagttataaaaagggtgaaaaggcatgataatctttgtttggttaggggtttgtgcatgtaatttcctggtaagttaataagatactagtagtacataatcatattagcacactctttagcattatttctttttaaaattattcacagggttcacttgtcagatgattctatgatgtccttcctcgactttgtcgtaaaaagtttatcgtcaaagatcattgctcgagccacctagctagtagacagagagtaggggtaaacatgtaaacctcacaacatttacacatgatttaatatcataacaagcggactcgtctgccagcaactatgttgtcacgttcttgtatgctttataaatacagtaaaaccacataaatgtactgccaactatagttttaatagaattggtcgttggggctgcagga

SEQ ID NO: 41430 - DNA, 608 bp, Oryza sativa
atctcccattttccacgtacatatttatcaaactattaaacggtacaaattttataaaactttttatacaaaagttattttaaaaaaatcatattaatcatttttaagttattttagctaatgcttaattaattatacattataaaccatcatgttttccgtgcaaggagatggagttccaaactctacctctcaaacacatcctaaggatagtgatgatgcgagcgatgcctacatctctaacatgtgggtctaatgtattgacatcaatggagggagggtccgcgtgccagtcagccagtgtatgtattaatagcatgacggcagtgtctagttattagaatattaaggagctaatgacctctcaattatcatggttagttggtaattttatatggcttacagtttaagcgagcattttaatacgcatcctgcaacggattgagcgagacaggggagtagggggattaagcccccccatgatctaatcaaacgatattcatgggggtgatacatataatagggtggaagataagatggaataagaaatgtcttgcgggggagcatttaggtgggtaagttaagttgacgatcaagacccgataact

SEQ ID NO: 41431 - DNA, 732 bp, Oryza sativa
attcctgcagcccgctagatatgcactgaaggtacctttatataaaaatgaactaaaggtgtgggattctactttctgaaattgcgttaggaatttatgataaaatagttgatgatctcttttatatcacccttgttataacaatgttgcctatctgacttgattaaccaaagtagaaaaaaacatgcattacttgctgggatggtcttcttctacatgctttagaacagacataatatgttgcgagatgctagaaggtcaataaaaagggggttagtgaactctgtttagactcaagacattccattttgtgtaatgaatgttaacaaagttttttttttggaaaatagacacgaacccttatttgcaaacatatgatcatacattcatacagcaagtctgaacgggtgcagaatgtgtttattctctgatacattatattttttttcatgcatgcaggtgataaatgacagcattggttttgttagcccacttttactcaacaagtttataaaatttcttcaacaaggtatcatccttttagaaggttgcagggctgattattaatgtttttggaggcaataactgctatattcaattttggcactaaaaattggcagtatgtatggttagttgaagttttcctttagttcacttcatatggtctgtgtcaggcaaaccaaacatcattttcaacctttaggactctgctggtagttctcgtagaagcag

SEQ ID NO: 41432 - DNA, 737 bp, Oryza sativa
aattggatctagtagtgggctatattaaacttgctctaaggcaacaagctagttgcatgctgtaatgattcaatctttccttccacgcttttctatactgctagctgaatatgaccatgctttactataaataaaacaaaatactgttgaaaatgtgagctaaaactcatttaaattaaaactaatttctataaaaatcacatagccctaccttataaaaaagatgcatgtgaacttttaatactgtcttattagttctaggagagaccttattataaagaatgagtattatactagccacctactccatccgtccccaaaaaaaaagacaaaccttgggtttgcgtgtccaactttgactatccgtcttatatgaaatttttttataattcgtatttttattattgttagatgataaaacatgattaatattttatgcgtgacttgtctttttaatttctttcataattttttcaaataagacggacggtcaaacgttgagcacggaaaccagggtttgtttttttttgggacggagggagtaagtaatgcgcgatgagaagaaccagaggagcacacactcacatgcctcactaggcatgggtagcgcccgcatgcacgcaacatgtgtgtgattgatcaccaaataaccacccatatatatacttgttgtgaatatacggttttcttttgcagtttttttttatgtggtgcgtcatgctgctccacatccccaa

SEQ ID NO: 41433 - DNA, 1184 bp, Oryza sativa
ttttattcaaaaaatttatgtaattatcatttattttattgtgacttgattgatcatcaaatgttctttaagcatgacataaatatttttatatttacacaaaaattttgaataagacgaatagtcaaacgttaatcaaaaagttaatggcttcatatattaaaatacagagagagtatcaattctttgttcagtacggaggccgagatctgtgatgcgaaaataccgggacggcggacagaatctaattaaatcggatcgcgtggatgacagatgatgcatggcgggcgtcgggcgatatgagacggataaaaatcaggtgtgtgatgaaaataaaattacctattttttaaataatttcgattagatttctggactggtatatatatatagacctgtatttaatttctctggggtagctcgtattaaggacacccatacatggagtacatgttaacatgtatgctgtggattaaggaattgactgcatctcttagcagagattcctccaatgggacagaaaaaaaaacagttgctttactcctataaagcacgtatggcctgatgttaaaacctgcaccacgcatgaatagattgtccacacgagacttgtactggcttgatgggttggaaggcaaagtctgccatagcttgataggtccctagcaagattatttatttgtggcttccagacaatttggtaaaccaaactttagttactatccataaaaatattaaatatataggcccacattagtttggcaagattagcaagattggctttctagtaatgttgtggctcaattttctctaatcatgcatgactttactgactaagaatctcttttgtaatagagagaacacttggataattggatgcttgcatacacgcgcatcacactaaagatcattgcttcttaaatcttaagcagctgcaatattgtcggatatttcaaatttttcataaaggaaaaagtcccagagtcttattataagtggtgggctagccggtttaagttaaagcctccacaaccttttaggctgagttaagatgttttgttcactttcccaaatccacctctctcgtttttcacttgtacgtttttcaaattactaaatggtgtgtctttcgtaaaaattttctaaataaaagttgttttttaaaaaaaatcatattaatccat

SEQ ID NO: 41434 - DNA, 774 bp, Oryza sativa
attcatacaatagttgcttattatactactaatatatgatcccacctgtcatacatacattgcgtcttggagtccgtgctgcagctggctacatatatgtagcccgctgctcttctctcttatcttttatctcattaaaatatgtttacagctggctaatagccttctgttgtacatgctcttatgcgttaatactctaccaaaaccacacgtattaatgtatcagtgctttagatttaatgcagggtaagctaccaggggtgatttgcagttttttgcacacggtatcaaggcgataacatcgttcttcctgcgataccacgtgaaactatccccattcaaagatgagtgcgtcatgtggaatttgcgtcgacgtgttgtcttgtctgacattttcaaccgcatagaaaattcgcggcgcactgttagcacgtcccgtttctggccaagtctgcagaattattattcatctcgatgaactactcctaaatccaagcaattaaatatctttagaaaacaacaacctaaaaattgaaaaccgctcaattcggaactcaaaaatcaaaattctgagacacccgtgcaaactttctcgctgatgatgcgtagtacttcggctggagccaccgacttgtgggccccactcccgcgccgctgtagtataaccaccacaaggcgcaggggccgccttcgcctcgcgttcccgtcttctcgtgctcggacggcgactccgccaccgcgccaaccacaccaatcttcccgcggaatcaaaat

SEQ ID NO: 41435 - DNA, 1033 bp, Oryza sativa
aattcctgcagccctaatggaactccctttctcaaataggctttccatattggtaaaatgactctgggtcgcaaactctgtagcgtagcaaggttgtctggtaactttctgttgtattaactcaagtgatctattgtgcttgcaggtagatcattaactctgtatattatgctgcctctcataatgcagagacacctaaagcttttgcatattccccaaaaacttcagttaaatgactaatgaattgtactttactttagagtaagggcataggagactacaaatttctcgacttttcctacaagaatcttattctatgtttacacactaaaattaatcatttccatttttatcagtaacaccataacattatcatgcattagaagcgcatgaggttctctaaccgattatgcacttctacaaaaaaacaacttcaacaggcctataggttatccagcggtcagcatcagcagtgaatttagatttgcagtatataacttacaaatgacacctgttgccctgttggaacacaggttctccaaaaaaattggaatacaaaacacagcatacacacaagaggaaagtcacacctacttgatgatctgagatgctgttgttgaagctactcttgtctggtgctgcaaaaggaagaacagcaattcattatccaacaaagcgcagcgcctaaggttcaaaccatggggcagaatgtaatgtagaatagacagtgttaaaccccccaaaattgcatgacctataaacaattctgaaatagcccatgaccagccaattgaaatctctcctaccatccaccatctctgttgactaacaaacaaattttccggtgagccagtgcagatctaggaggaaggcactaggagggcaaggactcgtaccctcgggggtgtcgctatcggagaactccttgtcgagcacgcggccgaacatctcggcgatgctgccgtccccggtggcgttgcccgagccgttggtgaccagtttcccgtaaaacttctcccgcatctccttgtcg

SEQ ID NO: 41436 - DNA, 1343 bp, Oryza sativa
agtgtaaaatagaggattgctaaacacaggaaaaacataggaatgactgtttgattggtccgcatgaaaaacacaggaatttgaggagagataaagactcagggcccctttgatttggaggaaatatataggaattttagggcccctttgaatcaaaggatttatgtaggaatttcataggattcaaatcctataggaaattttcctatttggccctttgattcaaaggattgaagctttccaaatcctatgaaattcctatggaatgacacattgcatgtagattttggaggaaatttagcaagagctccaacctcttggaaaatttcctttgagtctatctctctcatccgattcctgcgtttttcctgcgctccaatcaaacgaccattcctgtgtttttcctgtgttttgcaatcctctgttttacacttcaattcttgtgtttttcctattcctccgttttttctaccctgcgattcaaaggggcccttagaggatttcaatcctataggaaaatttcctatgaagctctttgaaataaaggattacatcctatccaatcctttgaaattcctatggaatggacaatcctatagagattttggaggaaatttagcaagagcttcgaccttttgctaactttcttttgagtctatctctctaatccaattcctgtgtttttcctatggttcaatcaaacggtcattcctatatttttcctgcattttgcaatcatctgttttacacttacattcctatcaaaatcctacgttttctcaatcctgcgattcaaaggggccctcaaaggattctttccatgaggttctacctcatgttaaatttcctccaaaacttgcatgggaaaagacaatccataggaatttcataggattctataggatcaattcctttgattcaaagggctatataggaaaaaatcctctaaaatttctatgaatgggccctgagtctttatctctctttatctctccttaaattcctgtgtttttcctatggtccaatcaaacggttattcctatgttattcctgtgttttgtaatcctttgttttacacttacattcctgtcagaatcctatgtttttcctattcctctgttttttcatccatgtgattcaaaggggccctaattctaatatgtaagtgacataaaaatattcatcctaaataaacatattcatgttcatatgcaaagtaacgtattcatctagattcctatactggaatgtatcatgttctatattagtgttttattttgggaggaaggatgtacctatatatctgcagaacgacagtgcacgtacgtgcgatgcatagacgt

SEQ ID NO: 41437 - DNA, 2171 bp, Oryza sativa
atggaattatgatctagaaggcacttaggaagaacattatcttaccttgtttcacatgcatatacacattggtccggctacccgaagaaaccaatcacagattaactgagaactagaaagaacttttaaaaaaaaaacaaatcatattagcagctttatgccaattaccaagaggaaaatgcttcagatgcaacaattatgtgccatatccatattgcaagtgatctcagcttcgataatttctcatttccttaatatataacaacttccttcaatatgcattgttaagattaaatgtagtatgcatgtattctaaacttgtaatatgtaaatatgttcagatagtcattaaacacaatttgagcttacttagatttttgggggagcacatatggaaattattaacattatgcatccatttcaggtggaatatatattacggcaaaagaaagacctgtcagcatacttgcgtccatgcaagaccttgcagcttggtccagatttcttcattcctcatgatgctgatgatgagacaacgcactcaacccttgttgatgttgacgagcccatgggatcatcagactcagagaatttgagtgcaccatgcccaaattttgtccgaaagaagcggagtggaccatatatctgtgcacgatctgcaaaccgagtttctgatgatgatatggcaacaaacatgagcagaagaaaaggtgttcctcatagatcacctttgtgctgataaaagatcaataattaaatagtttttttcccttttttttgctttttttgagttctttatctcttggacaaagctggtgcactattgacagaattttgtctccatggaaccctgtgatttcaatgtacatcaccagaggcaattgtactcaaattcttcatgtagatgcaccagttcatatatatgtacgccttaaaatagttcatattatcccctttcttcttagtatggtattactgttattttagaggaagcaaaatgcactggacttattttgggttggtcattagttagttaagtttaacacctagatatgataatgggaccattatgttaaattaccttttatggcagagggtaccatttttattattgaaatgtgcacaagcatggccaataatcaattcacaaatttggatatcagcaaagaaattcaataattctatccagagagtgtcaatctggaccaaatagtatttggagactgaaaatttttctgtcacttgtaacaaatagtagtagtaaagaagtaatatcatgccaaaatgcattttaatataatcaaggacctggaatactgcgaacatttctagaggaattttgataattccagttttttcttgtaattaccttaaaagttattcatgtaacaataaaagcatatgttgctaaatattcagctatgtttaagcaactacaaaaccagcgaaaactcagagccccatggatataaaaaatgtttcaagctcttgtctgaatggtaaagatccaaattagaaatgtgagatgggtactaaaaatggcagcctacaaatgctacagatacattcttattgtaacaaatgttaagctctagctagctatgttagtttccataggagataggtgtgtttaacttaacagaggtgcaattctaaagatcaactgacagaataacagctttctcctaccaaacacaaggttgcaaaattctcggtctaccttgcattgtattgcccttttcatgcctacaacaaatcttaagagaatatacaaacttcttgaaactgtaaagcctccatgaaatcaatcatatcagagaaagacaacactatgcttcttgtttgattacgttttgcttcacagggaagggtaggaacacaaagttaaaataagcttgaaatcattggaagttgagcaattctagttttaactagtgaagccctcagcaatgcctactcagatcatctcgagatcagaacgtaagaataatatttttctccatgcacctcgtgatatgattcggcgcatatagctggaaagctcgggaagtgcactcgtgcgcgtcatcgactaaatattatatccatattaagataatctaatgtctacttaaacagtgaaatctttgtcatcctcctatgatgatgattataaaaaaggatcggtctag

SEQ ID NO: 41438 - DNA, 606 bp, Oryza sativa
tactgcgggttggcgaggaagctcaactgacctgggccagcctcctgcaaggtggccagcccggtaatctgcagcgcctcggggcccttgagagtggcgccgagggcctcggccaactggcctagcgtcatggtcacggtcatatcaacgggcttggttcatgcgctcgatgacctggcgggtgatgtcgtactgaggcttgacatcgatgaccgcgccacgctcgaggaccaggtcgtaaccacctttcttgatcacttcctcgacagcgccatccaacttcggcttcagctgcttgagcatgtcgcggtcagcaacggccttggcttcgttcagttccttggactggaactggaagtcacgggccttctgcttgaactcgagttccaggcgctcgcgctcctgctgctgcatcttgtcgccgcccttgatcagacggtcctggatgcccttggcgctgctttccaggcttttcagcttggtcagttgcgggccgaacttcttctcggcatccaccgcgtatttcttggcggcgtccgactccagcagggccatctgatagttcaggacggcaaccttcatttcggcgaaagccggggtggcgac

SEQ ID NO: 41439 - DNA, 1227 bp, Oryza sativa
attcctgcagcccaaaaaaagaaaaagaaaaaaaaaccagcaaatttcccttcccatgcgacgcgacctcctcctcggcgactagccggcgaactcgcgcacgccacctcggcccacccaggcccaggcccacctcgccgtggatcgccggagtagggggttgccggccggagcggcggctaccaccagatggtcggcggcgggggcgagtagcgcgacggcggcggcgaggacgacgagcggcggacggatctgcggcgcggcggggcggcgggggcgggggccaccatgtctgccgtagtgtgtgggaagaggtcctcctccatcttcggcgacgagctcatcccttcctcccctccctccccatcccctccccaccaccaccaccaccccgccaagcgctcccgctgctccccggcccgcgccttcgacgaggcgactcaccgccgggaggcgctcctgcaccatctcctctccctcttcccccacatggatccccaggttcgcctccgagctctacttatatcgctattatttcgatttttttttgtgggagtttgcaattggatgcgaagaggtgaatctccgtccagtaaattatgtggcttgttgggttaaattctctggtgcctggagctaaggatgcaatagctaatagctactaccaactatgatgctgcagaaatgttgaacaatagttagatagcaatggcctatccatttttgcaaccaacctttaggaatcgaagtgctactaatatatcatgtccgtccgatctccgatgatctgatggctggccatgttttcactaattttacagtattcaggaatgtaagtgtgaatgtgtaatcaacaaatacggcaaatgtgtttttttttgtcagcaccttttgctatcttcaattgagcatgcatatactgtaagaaactggattggatcgcattcgtcatgtacattttttgcaactaaagggtgtttccatcacagctatgtggtgtttatatttttagctgtttgatgatgagtttccgcatgattacagttacttgaaagagctcttgaggcatctggagatgatatagattctgctataaagagtttgaacgagctgtgcctggaatcggctgcggtaggtgattccaatagcgtcctgccagccgctcttaagttatcggctgaaggtacgtctgttgaatttagacagttgcatgctaaacatccagac

SEQ ID NO: 41440 - DNA, 932 bp, Oryza sativa
aaatttgaatcggatatttgaattcaaattcaaatttgaatcagatataattcaaatttaaatttgaatcggatatataaactttaggtttataaactttaggtgtataaactttagatgtatagaaatactatatataaaaaatatttgaattcaaattcaaatttgaatcgggtatataaacttttgacttataaacttttggtctctaaactttagatgtgtaaacttgaggtatataaactttaggtgcatgaatttactaaaataggaaagtaatacggtgccaaaaaaggaaaccaggtggagggagggaggggggaatcgatcgctctgggcaacgctcagtagcatttccggatgccacatcagtgaataccactatcaatactgttttaggagttaaattatattggttttaatagttgaggggtcaagatagttggtattgcagtttagcggtatggatcagattggatctatattaagggagtaagagtgcacttatttccttgttatagttgggctggtcttggtcgcggatttatttgggcctagccttttgcccctgtcgagagatgccattgggatcagataggccttcagccgacgctcaatctgtggccatttcagcaacggcgacaaaatcacatcatagaggcagaaacggctttattcagattggagaaaacttgcacatacgataataattttcagaataaactttgttaagcatgagcaagaagcagatactcaactaaaaaaaataacttgacggatgaaaatcagtgaatgtaatttcatttcctttacgctgtccttcagttttacatgattcatttgaagcaggaagctctggaagaagatagatcttggcctatacatggaacatcaatacaaaattgcagtcattacaaactaattttacagca

SEQ ID NO: 41441 - DNA, 2352 bp, Oryza sativa
  unsure (1)..(2352): unsure at all n locations
gacgatcaaggtcagttgaaatcgagccattttcatgctcccgtgcgcgttcctggttctttatttttgtctcttggactcttggtggatgaggtaactcgaagttgtttcggacgcggcaatcatcatgtgtaacagtgtaagtatgttgaaattctgtaaccacccagttgagagagaaattggcgagggatgaaatattaaattttgtaatatcccagcggggatagctcagttgggagagcgtcagactgaagatctgaaggtcgcgtgttcgatccacgctcaccgcatgttttcatttttaatgtatacgagttatttttttttttgctcatcgcatgttttcatttttactatatatacgagttatttttctcctcactagcatattttcatttttaatatactagttatttttctccttactcgcatattttcatttttaatatactacaaaaatgcatgatttgacaaaaaaaaactatgtcaatttaaatgataaaaaacaaaataaaggtcaaaaatcatatatagcattgaacctggttacacgagttatttttctccttactcgcatattttcatttttaataaactagaatttgattaaaaaaacaatgtcaatttaaacgacaaaattaataacaaaaaaagtaaaaaaaaacatatatagcatttaacctgattacacacgtgacgccgagtagagatgcatggaatggtgttggttgtctgggttgggctgggttgggatagggaggggttgcgttggtataatcggatagaagtgtatgatactccctccgtcccataatataaaagattttgagtttttgcttgtaacatttgacccctcgtcttattcaaaatattttaaaattattatttattttatttgtgacttactttattatctatggtactttaagcacaacttttcgttttttatatttgcaaaaaaaatttaaataagangagtggtcaaacgttgcaagcaaaaactcaaaattccttatattatgggacggagggagtagttattagtcatgttgaattggatacagacaacatataacaaacttaaacataaataacgtatcaaaattctggttgaaacatcttcaatttttataatagtgatacgagttattttttttctcattttattatttttacaattttagtatatgagagatttcttggttgctttccttctcttcaggtttttctccgcccctagagcgagtacaatagcagggtacaagtcaactgtatgcacgcatgttgagaagagaagagaagagagagaagaaaagcgggctacagatttatagccaactgcagcacagactcccatacgttgtttgtgtatgagagatggaaccatatattaatggtgtagtatatattatagataactattatatgaatgagttataagattgactatagatgaattagagctagcagttagctacactattaaacttgctcttggccgccgccgctctataacgttaaggtacatacgtacaccggcgaaaacgttaaggtacatacgtacatgttttccctgttcacaatcgcattccgtttagatacaccagcgaaaacgttaagatacaacggcgcgtgagaggagctaagtttatggcagccgcagaacttccccttccctttttccgcacttgtaactttgtaagcttctggtcagaatgtcagatcctcttggttaagatatttgaatcgagccttttccagatttacttgcgccttctgtaacctataaagctatctaatttcaccatctttgcaatcaaattctcgattttgtcactggcgcctcgcctacaagggttcgggatggtcccttgcaagatatttattttagaggaataggggaggaaccccctaacatggtataataattgatgaccagaaatgaaaatagatcaaaggtttccacgctccttcaaagcgatatttgggcttgtaaagtctgaactcggttgtgcttgcttatgaaggtaagaaagatgacgcttgcttgaccaaacagggcatccgctgacataatcacattgcatttcatgctgctttcaactaattccatatggatgtggatttcctaggtcaataaaagatagctgcatttgttttctcagtaactcatgaattgaatccatagtttcatactagttcagatattagaatttgcacaacatcatgttttatggaccactaaagttttaggtatagttaaggccacttcactattttcttttatgttatgcaatcatggcctttggtgttggttcatgatcccacaggaagtgatttcagtatagg

SEQ ID NO: 41442 - DNA, 772 bp, Oryza sativa
aaaggctacatatatccgatacgatgtggccgagttaaaaaaatatcattctctaaaataaaaggctataacttaatttgtgagtaattatagcataatcttgtgaatcataatatatactaaaatgttaatcatgagactgatcacaggctcacgaatcacactacatgtaatgagtttaacgagctaactcggacattttaacgggtcaagttaagtttcaattcgttcccaacttattgtgttaatgagtcgagccgaacaaactcgttaacttaacaagtttttacgaattacttcctccgtttcaagttataaagctttcacattgcccatatatatatatatatatatatatatatatatatatatatatatatatatatatatatatatatatatatatatatatatatatatatatatatatatatagagagagagagagagagagagagacctatacctattaacaaaacaactaaaatttaactttatttcacaatccatgattacatacctaactaattatatgtatggatgctatatacctagaatcaaaatctaacaaaaacaagttcaaattcagtataaacatgctttgaactagttagtaaagtacttaatgttaatacctaagtaattgaaaaagtttcatactcatttgaattgggtatatactcaatttcaacaatgatgcccgggcaccatggagcaccaaacaaatttaatatatatatatatatatatatatatatagggctgcaggaat

SEQ ID NO: 41443 - DNA, 1319 bp, Oryza sativa
agatggttgagtcttgtttcaattattccctaatcttctgtcaagaattaaactcctggtatttatgtactactactggctttgttcgatgctggttcaattttgggtattttgtgtactgctacagtcctactagctttgttctttgctgattcagggaaacagggaagcaagttctgttaatgaataatttatggccatatcttactcgtttgctttatattctgcatgagttaattaattatttggcttaatttatttgtaatgtatgtactttctcatccatatacacttgctttgcttgttgaagttaggtatcttgattcttgttatgcttgctatactacgatgaggtagctggacctggccaaactaggttctactctgaaacatcaagttcaaaagcatatgctgtcgccaccaccccttcaaaataataatttcatatttcagcaggagtgagaaacagcctattgctagagaagatgaagattacaattttgttggagatgaagttgactattctgctaacaaataaatcagccttgtctctgaaggtatggatgagtctccacataaccattagaagcaatcctgttttgctgaacctgtctacaagcccgtcccaccatctgaccctgctcaagattggccacaaccggtaatcccactaatgttcagtaacttcggttccacaatgctacatgtaaaaattgaattttgcatgttggaagtttgagacaaaccaaattaaatttgaactatgcacgttgaatgattgatacaaactaaatatttttttgcccatggtcatgatcttatactgaaattgccattaactattagtttgtgctatcttgacctgtatctcataaaagttaacgtctcttctgatgtcactggaaacgatactgttcaagtccgaatggtaactgctggatatcaagaagagttgtcaggctatcagtttggtgagcaacagatggcctatccggaacagtacatgcaacaaagcagacccatctatatcccaggaaccaaagcttgataactcaagcagataaagagttctttggttctgtttcaaacatgataattgaaggcttgagcggctaagggaagaggatgcactggatggagaaagatcctaattttatttcagggagcgatgatgaggatgattagtcgaagatggacatgggtactgtattctgtgaatctgtccttaccttttgcctgtttcccttgctgtgcggatttcttgagctcatatttgatataccgttttcatcttttgccctatatttccatacctcatt

SEQ ID NO: 41444 - DNA, 2963 bp, Oryza sativa
gggacggggcctaccgcgcgtcaacgacgatgacgacgacgactaccgagcgacgatgacgacgatgactaccgccggccgcgtcgttgccccttccctcgacccctcccctcccagatccggcggaggggaagggcgtcggcggtggcgcgggcagagggcgttggctacgacgacgaagactactgcaggacgacaacagccctaccgcgcgacaacgacgactagcgccggccgcgtcgctggctcgctgcccaacactcccctcccagatccggccgaaggggggagggaggcggcggcggccaccacatgcaatagaggagttcgccggcgacgatgacattgtgtttttttaagtttacatgttcattgatgttaacttgctgtggatttgaatccaatgcttttgtgttgcaagtttataatgtctgtgattggattttgtttcctggatgagatttgtgagaatttatgatttgtgatttgaaaccctagggaggggtggggttggcgggaaatttttttggcgctgaggatattttcgcaggcggggctacagtagccccgcatgcgaaaatagcacctgcagctcttgggaagattcgaactactgcctgttttggtccgcctgtaaaaattagggatttttacagtcgtttggatacaggcggaaggttttgccacctgcgaaaatgtgttttgaccgcctggaaaaacgtttttttagtagtgtactacattagtttgctaaatctattttctctgggcttccacagttttagcagcgtatatgatagtcaatagaaatttgtaacaggtaataaaccattccaaaaagtatttctaaaaactgaaccttttggccatgctaattgagagtggctggcgtggcaggctggcatggcaggacaacgctgccacgccagctgcttgtggcatggtagaattatttggccacggcctgacgtggtcaaaaggttcagatttggaaatacgttttggaacgatctagtaataaaattaaaaaaaataaaaaagtctaaataataataataataataataataataataataataataataataataataataatctctgagctaacctgtgacagaaagcaaaattgcaaaatcacaataggttgttgctgcaaaatgcaaaatcctgttttgtgaggctcctggctgtcacaataggttgttgaggctgtattcctgcttataaaaaaatcagccaacaatgacgagcatgtaaattagttttggttgcagcaaaaaagcttattgcacagctatatatagattacaatcaagattgttcaattttgctatatatttgtcgacaaattttctcctgaaaatttgacagatgtaattacaatacagtcgtagtgtaattacattgtaatttcaatgtaattacaccacaactacaatgtaacttgtatgcaacttttaaatatctctccataacatgtttgttggcggatggcatgagtcccttcgaccgaatctgccgaaacccatggcgaagaccacgagccaaggatgatgcgaggcgaagggtcgcacgagtgcacgccgaagaaggacgacttcgccatgccgaagaaggatgacttcgccaggaccggttcgccccggcatccagcccagagaaggacggcttcgccaggtccagttcgcccccgcgagggccgaagtagccttctcggcccaccaagcttagaggccatagggccggcgatcgcctgatggcccatcaagggcccatgagcctccctttacgttatgtaaccctgtaaacgtccctttcataagggcaactatgtaaattcctcagtacaccctagaccctagaagtgagaatctgtaacggggctataaatagccccctagggccatgtaatacaggggagaaaattcaagaaatcaatatacttcgtttctttccaaccactgttaagtaaccacgtctttcgacgtatgcggttgtcgtttcgacaacaatgttattttggtaaaatagaggtcatgggaacaaatcctctcacgtgtgtgttgtgacttttttcttcctaacctacaaaaaacttgaaatagatctaacggtttaaaattatgtgaaagttacatacaaattacattgcagttacagtgtaattacatgcaagttatagtgtaattacgctacgattgtactgtaattacatctgtcaaatttttagaagaaaatttatcgacaaataggtgatcccagattgtttacatgaactttcaacactaaaacagggctcgggagttactttgctctggttgctggaccaattagcttaaatgaacatcaccttataagagctatgattatagtcctaatgattgaggataactttcttaacactgaccaaaaccatatgagagctaatgacccatgtatggtcaaatcactactacaaagatggtttttgcatacgggggagaagggttttcgcatgcggttggcacaaccgcatgcaccaaatcgtcagcgaagatcgtgatctttgcatgcggctggcgcaaccgcatgcaaaaatccgattttcgcatgcgggagcttaagacgatcacatgcaaagagaaaaaatcacgaaaaaaaaataaaattccaaaaataaaaaaaaaagcaaaaaagaaaccctagcgccgccgcccgagctcgccagccgccccggttccgccgtcgccctcccgcccgcgctcccgattccgctgccgcccgcccgcgctcccgctccagccgtcgccgcccgctcgagctccggctaccgctggccgctcccgcctccggatccaggcaggacgaggcccgccaccgccggatctggcccagctcctcgtggtcgtcgttggcgacggtgaggcggggatgctggtggcgccgctgcccgcgtcgacgcccactcgtcgtcgtcg

SEQ ID NO: 41445 - DNA, 7686 bp, Oryza sativa
caaaatcaaagttgtataacacattgagatctactatttttcttttggtcatttcgccatctgtgtttgattgaactatataaaatttgaattttaaaaataagaaattcaaataatttttcaggtagtaaatgatttgaaatcaaaaaaattgtcaagaacaaagttgtaaaacacatcaagatctatttttattttggtcatttttctatatgactttgtttcgacagtttgaatttgaatttcaaattatgacaacttcaaacaatattttcaaatactaaatgatttcaactgaaaaagtcatcaataacaaagtggtataacttatcaaaatctataacttttattttggtcatttattcatccaaaaaagtgatttgtaagattattcacaaaatgtacatatctcttatatagttttataaactataagagagatatgtaaattttgaaaaaatgttaccatcactttgtcagatgaagaatgaccaaaatagaagttatagatcttcatgagttgtacaactttgttattgatgactttttcagctgaaatcatttagtatttaaaaatattgtttgaagttttgaaattcaaatttttaattgataaaacaaagtcacaagaaaaaatggccaaaataatagtagtaagaacataataacatggtagagcatgattttagaaatatttaggaaaaagaattatccaatttggtgttcatatgagtgagatacactattttcaaaattttcaaaattatttttgcatacggctgcttaagacgcccgtatggaaaaatcgattttttccatgcgggcgcttaagtgagccacatgcactcttaagaggcccgtataggaaaatcgatttttccatacaggcatcttaagcagccgtctgagaaaatgctactcgatttttgcagacgccactagttatggtccgtttgtaaaaataaaggggtctcgtacagaaaaatcatttttgtagtagtgaatacaaataagatatgttaacacgcttttacttgcaacaataaggagcatatcaagtaacatgattttacattaccatgaccatgccttcatgcattaaatatataaaaaaaacacatctggacaaaatcgccaaccttcttttgttccacaaattagaactatggagtgaatttaattctaaaagatcattcatggatattgccatagatggatcattcatgatatagccaataggatcaatagttaaatacacatacctcaaactctcaacatgctggtatagattatctcgactcactctagcccaaaaacatgttgtcttattgaacctctcctatcccttagcttcaataaattgaccatgttctagacagatggccctccaataattgttttcttcttttaaataatcttccttcacaaactgcagcaagtatggtactaaaatatgtgccatgttagaattctagatctggacatcacatttgacagacgaccatataatttcattgtaaccttgaatgtccacttaaaaaaaatgaagttacaaactgcgatttttttagagataattgtttctctgcgaactttaggaccaagagtagtctccatatccattccaagaatttgtttgtctatcttgctgagcgacaaattaacttctagattactaaaagcatgaacacacctgatgtagactgagaagcggcaagggcacagcaatggtgaagatatatatagaagaccatgtgcgaaataagaacatttcggtgcagtaccgccaatcctatgtaagttataacccactgaatcctaaacctcaacatgcaaatataccacattatcatccactaataattattacatttaaacatcatgcaagtaagttatattatctataatattataatttattaaattttagagttttaaaatgtaagcatgttaagtcataatcccacataattcacatgatattttcaatatatttctttatcattttttataatatcatatatatgttatttccctcttctctcattaaatcacatcaatagattgtttttagtattagatgattaatctatggtccaaactatctcgagattagctcactcattttcttttttcataaagcaacatcaccttactattatatttgaatcatcattctatatataatttaaatttaaattatcataaatcatatcaacttacataagtttacgttgtctagttatcttatagattatttttacttattgttatcataataaacttccgccgcagcacgtagggtttcacctagttagtacaagaagcaagactattttaccaaccaaaaaacagaaggggatcagggcctttggccgcgttcttttcagtggttgggtttggatgattagctgcacgtaaaacgagaaacgcgatcagcatataattagttagtaagtattaattattaaaaatttgaaaaataaatttatttgattttttaagcatcttatatatagaaaattttcgcacaaaatatactgtttagtagtttgaaaagcatgctaacggaaaacgaggaatatatgaactgcattagagaaagtttaatagtataacccaactactaacttcaaatcatatatagccaatctaatagctcattcatacaactaggaaggtagctcgcgtattcgtgtgggcatgtaccgtatgtaagacgaatttgagaaacttatagggacaatataccagcaaaataatatctgcaatgtttcaaaattgtgattgtttttcatgaattttcttcattagcatcacaaaacgaatttaattgttatttgtaaaattatctattgaagattggggctggtaacttatggtacctaagaggctaagacatactccctctctgtcccataaaaaatcatcttagattcatagttagaagttgacttttttttgacggaaggagtatgactcttgaagttccatatggaaagagaaaaaacttaagttataaaagatattacatatacaaccatatataattaatggttgtactgatttatgtagaaaaattgatactataacaatattattggatggcagacatcgattggtcatagctatggataatttctcataggaaattatgaatatgtgtattgtacagggatacaaattagaaaaaaatagtagaggctacgagaaaaaacaaaatatatgaccctcaatttttacttaattcggtagtccattatttctgaccattggatatttagatgatctaacatattgtgcatattccaactaaccaaattattcgtcttccctcatcaccaatgttggacatgttaatccggataaatctatttatctatgatttacatatataaaactttaagtataataaaatgtacacactactctgccaacgcagccaacgatgtgtgcgacaggttcgccacggccggcttcaacgtgaacatgatcacgtatacctgacgtagcagctgcaccggccgctggtggtggcctcgaacctcctcaccaacttcaccggcacggctgattccttcgccagccacctctggaccatcgccaccgacggcgttctatcccagctcggcatgctcggcccctcgtcgtgtcggcgctcgtccctgccctccgccccgcgtcgtgcagtgctgctgccgccgccccgtgacgacgactatttagactacgtacgtatacgtacgtacgcacgtactgaggagagggtggatctatgggagaagaggagggttgtgggattttttttttctaaagataaatataatagttgaaaatagtaggtctagcgatttattattacagaatagtgggtctatcgatttattagaacgtcacgtgatggcttaattaggagcgtggcagcttaatagtgtttgtaggaagtttattggacttttagtatataatggatagagagaagatacttacctataaacatatactacaccattaatatatggtcccatctctcatacacacataacgtattggagtccgtgctacagctggctacaaatctatagcccgctttccttctctcttctcttctctcctccacatgtgcttacaagctgacttatagcctactactgtactcgctcttaggccctgtttagatcccacacacaaattttataccctgtcatatcgaacgtttgaacacatgtatgaagtattaaatataggctaaaaaataactaattgcatagaatgcgactaatttgcgagatgaatcttttgagcctaattgctccatgatttgacaatgtggtgttacagtaaacatttgctaacgacggattaattaggcttaataaattagtctcgcggtttactgacggattctgtaattagttttttttattagattccgaacacccccatacgacaccatatataatatccgatgtgacacgccaaaaatttacacccttgaatctaaacacccccttagatgtttagaacgcggcccaagacatctctgaaattgtgcgaggaaactactgattaagagatcgattgttgcttcagatttactataattcgcgcatgacccttctatggcaattattgctagtacttcctcttagagcaagtataatagtaggctataagccagctaaatgttgaggtggaggagagagagaagaagcgggctgtaaacttacagccggcttggacacagaaaccaagaaactctgtgagagagacaagtggaccatatattaattgtaaagagctaactattatatgggtaggctgagagaaggctatcaaatcttatagccaacaggtcggctatattattagccttgctcttaagcagctcctgcgtctctcgttagcatgtaattcaggtcatccagccatatgatcttgctgcacgcatgcaattaaatcattcagacatgaaagaatgcattatcaacttaattagggacatatagaaattcagtgtcagacagcggtgtaggatcgaacaaaactaaacaaacctaccgaagtgtggataaatggtagagaaaactgaaaacccagaatcttttgtagaataaaagatttacttcgaacggagtagacgacaaagctctatcgccgctggtcacaccgcccgcttgccgccggttagaccaccgtgtcgcctaaggttagaccgccacataatcaaccttggagcgttccttaacctaaaacagcctgttccctttcataatccgattgatcagcatgggcttcccacacctccgaggcctcggaaaagcagtagtcagggagaggcttcgtatcggaaacgtcaaaatccagattaaggccgtggcgatggattggagaagaagacgacgacggatgagggatgtgtaggggcggggagggattcctatctctcgcccgcggcccagcaacagaggtcgcgcgacgccgcacccccccccccttcccccgctttttttttcgattttctcatttcttttcgtgttattttctgatttttttttaatcttcaacacatgttttcaaatctttacttaaaagttttcaaatctctagtcgaaagtttttaaaatttgtcttacaaatttaaatttcgagttgaaaatttttaaagtttgagttgaaagttttaaaaatttgaatttaaagtataaatattgagtcgaaagtttttaaatttcgagttaaaaattctaaaagtaagtttagagtttcaaattttaagttgaaagttttaaatttatataggacttttaatttttcaatagaaagttttaaatcggaaaacacgcacgggctttccagggtggggggttgccggttaggagcctctttctagagcaatgctacatgtactaattttttcttactaaacttttactaacaattatctcaaccatttaatttacgtagatgaaagttataaaaaatctagatgccacatagcatgacacaacagtattagtaataatttagtacgtatagccttttccctctagtagatatcacactatacatgagcagatgagctctcaaggatcgaattccctatagatctgtcgacagattttcagttaaacattataattataattacattgtaattttagtttactatcactatataccttcaatataaactttttttcccttgaaccaacttggcttaattgctttatggtgtacggttaacagggcagtgcaactagagctcttcgaatcaatccccgctatgcacgcacttgtgtttttatccatcgtattagttagcacaaatctccacgcaaatcatatggcctaaaaatcgataaatctttaactgaaaatctgtcgacagatcgatagcgaattcgtttctttttcacacgcatacttttcaaacagctaaacaaagtattttttcattctttttaaaaaatagataatacttaattaattatatgccaagaagttttatgtgcgtgtgagattagtttcccaaaccacgtgatacgtacaatccaatactactcgttgctctctgtatcaggcgctcttactactccctccgtttcaaaatatttgacaccattaacattttagtacgtgtttgaccattcgtcttattaaaaaaattaagtaattatttattcttttcatatcatttgattcattgttaaatatattttcatgtacacatatagttttatatatttcacaaatttttttttaaataagacgaacggttaaacatgtgctaaaaagtcaacggtgtcaaatattttgaaacggagggagtatttcttactatccgggcggcatgctgagagggtggcggcggggcacagtccccgcaacaatctcagaatccggtacgggggacaaagaggtgaaactggcaacggcggtagggagctccggcatgggtggccgcgcatccgatgtcagcgtcaatggatccagctccccctgtctggataaggtgcccttgcgccggatctggcaggggccgtggccggcaccgcgggggcgcaaagctggcgtggccggaagcggcgatcaaggccgtgcgtggcggcgcgatggggcacggaggaggtcaagcggcgcacgttgctgagcgatgcgtgttagacacgggagctggcggccagagtggtgggtgtggtggatttggccctccagtggctagatcaggagcgggcagcgacaaagctcatggcgagcaggcggctccaactacgttgcttctcgcaacggtggcggagctcgcggcgactgcagacgggtggaagcgtggggtggagtgcggaagcgctcccgtggtcggtggcggaggaggacgacagcgtaagcgatggttgcacgacacgaccgtcggcgaggccgaaggcatggaggccgtcaccgtgaggccagcgtaggcgtgggcaatgtcagtgaggccggcacagatgacgccatggaggctgtcatggcgagtccggtggcggtgatggtggctagccgatgaggcgcacgacgagcatggtgtgatggcttgtggctggcgagcgcggcgcggaggttgaagcggtgtggcagctgtggtgggcctgcagcggcgaggctacagccatgggaggtcggaggtgacagtgatgcgaccaagcg

SEQ ID NO: 41446 - DNA, 929 bp, Oryza sativa
agctgcaggaagcgcaggtgagcgaggcgagggagagcgactgcgctgtgtgctttgagggcttcgaccaaggagagaagctgacgaggatgccctgctcgcattgcttccatgcgacctgcatcttggattggctctcgctcagccatctctgcccgctctgccgattcccgatgccaacggggcagtagtagccatcagctacactattgtctgaaagtgtcttctagagtgattggcaacggaggaactgttctgccaacgctcaagaaatcttttgttgattggcaacggagaacaatatttaccattacgaatcccacacctgaaaaattgaaaagaaaaacagataactgaaatggttaaaagtagtcgatcattttccccagcccaatatccatgatgaaaatcaaatggtcctgatcatctagttgtcaccaaaatcaagtaaaaactattcaaataaatttatttcattttgtgcttcacttgaaaaagtaatcgacaaatctgagcccatgccaaaaaaaaatatagcctttgtgacaccaaacagagaagaaaaaacgtactccttaatgctaccccatgatccatttctacacaaaatggaatgctcattaacatcctaataactatatgaaactccgcgctttgctattagtatgaatcagtaaaaatatcatagctagacatcttaagcccatagaatttgtatttttattgatcattggaaaaaggttataaaccattatgttgatgtggtttatgataatttaaatagcatatagattgataatccaaaagtaaaagtaagacgatatggcttcatgagagaagaaaatgaagaaaattatttaggctatagattaatcatctaaaggttagaaacaaggcaaaatttgctataggacacttaaaaatgcgta

SEQ ID NO: 41447 - DNA, 1076 bp, Oryza sativa
taaaccaacatctaatcattttgatacccaagttatcaatggcataaggtaaacaatatatggctgagtagtaggacccatcccacatgatattgtaaaacaatgcaacatttaatagaaatgcgggacatttgtaaattgggtacaatatgatcaattgtgatgcatgacttgccttgctctcgcactgatgaaaccacagcaacgtcttcgagaaaccgcggatcgacgaaacggccgaaatctacgcgacaaacaaagcacacaagcaaaacatgctataagtctactgaaacaggaaacaaaaccatttttaatggattctatacatttttatgaatttactgagacttgaatggacttaaacggagctcggatgaattagatatgaattttagaagattcactgtgtttttactataaacagataaatccttaattgatttattgcgcaatatctcatcccagggctgacgtcatcaacgagggggcggcaccgacatgccggacccacgggtcagcggcttaagggggaggtccgcggtggaccgggtccacggaccgggaaggagacggcgcaccacgtggtgcacacgtcgcgccgacgtggcgcacacgtggcggccacgtggcagccacgcgggcggcgggtcgggtagatcggacggcgggggcggctcacggccggccgcacgggctcggctcaagccggcccgacgccatggcgcgcggcggcgcggctcgacgcagcggcggcgaccgggggcgaccggccgacggcggagggcggcggcgtcgcggcaacgcggacggcgctagcggcggctaagcagctaggtggcggcgcaaggctaagcggcgcgggagagagaggaagggaggaggggccccaccgacgacgattgacgacggcgagcgacggagggcgacggcgatggcaggacgagctccgagaccacctagcgaacacgaagaaaggggttagagagagagaggaagatggaagagggcgaggaagccgacctaatgctgcagctatggcggtgctcaccggcgcacggtgcggaatgggttcc

SEQ ID NO: 41448 - DNA, 2076 bp, Oryza sativa
tatatcaattaagttagagatatgattattagttcagttagagataagattagatcagcccatatcaattaagttagagataagattattagttcagttagatataagattagattgaatccttacttaggggtcaagctataccatctatataaggatgggattgtgtctattagcattaaacaacgaatatcaattagtctaatctctccctctcaacagtgttcttctccctagcctaaatctacatcccttctccaggagccgacgctgcccggctatcttcccggcagtgtttatcccgtcatgtactcatgtcctcgggtcatgacagtctggctgatgttttgccaaaaaaagatgctgattataaatgggtgtctgtttacattgatatcattggaccactgattttctgtataactgaggaaatgtatagatcaacaattgtcagagaaaaaaaactgactatcacacttagacatgggttcttttcttgatgtgcaatgcttgggtgaggtgctcctgcctgagtaaactagacaagtatctgcaaacaagatattcctcctgcagtacttttgccctcattgactgcacacacactgaattacaactggaagtttgaaaatggtgcaatttctgtttttctgagacactcgattgattatgaatgagaattaatgttttctggaggtcctcagattgacctgcattcaagggatcttttgtaattttgtaaagatttcacttaatcataattcatacttgttatccttattggattccaaatttattttattcaagggattgttcttgccatttttatgacagacaaggaaataactccaaaaactgtcaatgacctgaagctcattaatgccggaaggatattggagaataaccggacacttgtggagtcccgtgttcgagtagaagttccaggaggtgtaattacaatgcatgtggtagtccaccctccacaatccgacaaaaacagtggtattgccgccaatttgatctgtctttttttacattgttttctttttgcactgggtcaatcaaatcaaaggattggttaaaatttacatttacaagatgtttagatgtgatctctctgaattttgccaataaaatagattgtagtttgtcttgctcatgtgaatgacaatactatacctgagcactaatctaggattttttttcttgacatacccatgtctttttttgattgactttcattcatacatctaggagcagtaaatctaaggactggagaaacacatgttttgctagaaaaaaaatatttactgtcgtggagttatgatgatcaaaagagcacattgtgttctttttgtaaatatcaacaaatgctaattgttttgagaaggctggaacacataacctttatagtgaccagttgtttgttaataaataatttgaccctttcctccgatcatgacacatgcatctacatttgactacttattattctccaggatggatgattttgagtgagtcaatcaattcataggattggttgaagagtgatccttgcagttgcaagtaagtttgggaaatatctaggacccatgctttccctacacttaggggaatgcggctgttggtagttggtactcaaatccattgtagctgtttgtactcagatccgttgtagtaacgaggtaattcatgcatttttgcagcatttcaagtcaagcttgcaaaatctgtagtcatgttcaagtagtgagtgataatgagattctttttcgttgacctagagtgatttcttcacaccctggctaaaccagagatcaaacctggccaccaaagtgccatatcatttttctgcggtcaataaaaatcatcactccctgctttgatgatttctctcgctggcactaccctgctatgatgggaacccattgttgataaatctgatgcaaccaaactacttccgacattcctctcttgttcgatattaggttagtggggctaacctagctctccctggttttccatgcagagaggagaagaaataagaaccagagaacattatgggcagagtgaaca

SEQ ID NO: 41449 - DNA, 1505 bp, Oryza sativa
tcagcaattattggtattacaacttgcagatgcacacagaatatctattgagaaaaacaaatatcttggaggttggttgtgcagcagtcttatatccttttcatccttttggggacaaggagtcactttggcttgtatgctataaacttttttttcttgctttatttgtttgtactttatagacatgttctcatacatgtgcatgagtggttgaaattatgacatagttgcttctgacttctgtggaaatgagaaattgaatctttctttggaactgtgttatgtccacatactgcagcaattccagattttttatttggaatatgaactatgaagagtgaacactcgcttgattgttaacttccttttaatttgaaatatcaggggctagtgtgtacttggtatttggaccgagtcagtcagttatgcagagctgaatattaatggtggatactgtagttggacattttttctaagagcatatgatatattcttgtgaaaatgaagactcagatgcttgaactaccatgttgattgacatttaattttcaccttttgtgttttaaaggtgatatgcaaatacacatctggtcattggattggactatgctctacttcacaaagtactaagtgaaatagaaaagtaggcctgacacagagggtgggaaagatacacagccaaggtactccccaccatactattgttttagtctcagtgttccataccatttgatcataccttttcttgatagtttagaatccgtagtattgtggacaacctgtcagattcatggttcatttcaaatgctgtaatatattggtaagagtgattactgctgtcatatttcttcagtataggaaattacggagttgattccattgtttatttatgacacaacaagttgtcaacctcttttagggccagtcctctttctttaattggaggtgattaagagagatccatttttctcttgttggactgccaagccaaattattctgttattcatgattcttccaacctgtttcttgagagcattatgcacaactaagtagttggatttgtatggtgatgcttctttaatgccttctttatttttattccgagtgataaaaatgagacatatgttttacagtggctgctggatcattcttagtgaaacattatttcatgtacactattgtgaggatcatcattaccaccttgtagaataatacaataattggttgcatgcatctcttgatttgagctataccaatatgaaattatcgcctcatgtccttcacccttgtctggacgcagacacctttgtaagttagttattaagtagatggtctatatatttagcctgtgcacttgtgttgttgagggcaacaaaagaagatcaggcatctcattcagcacggcaactgtaaaggtatatttccttttagttttaattgatgtttgcttcttatgtgatggaccatataatataatatggacactaaatccattcttggttca

SEQ ID NO: 41450 - DNA, 547 bp, Oryza sativa
agctccaatgatccccatactctatgttggcagtatctcatgagacccttcgaccagatctgccgaaaccgtgcgaccagtcaggattcaggctcaaggtgttaagttcatcggggcaaagccccatggtgaaggcggtgaagccacatggcgaagacaatggagcgaggacggcaaaagatggagccccatggcgaagactgtacatcctgggcgaagggtgcccgccgaaggagggtgacttcgccatcctggccgctttggccggcctttgggccggcattcgccaaccaggcccattagaggcccatgtatgccaatgacactgtatacccatgtaaatgtccctttcacaagggcaaccatgtaaattcccctgtaaaacctaaaccctaataggggggcctgtaacaaggatataaatagacccctagggccatgtaaaggggatcccaagaaaaattctcaatctaatacactttactgttttccaaccatcgttgagtaaccacatccttcgacgtatacagttgttatttcgacaaca

SEQ ID NO: 41451 - DNA, 585 bp, Oryza sativa
atatgatcctaagcgtatgtttagttcaagggataggatgggtcgggttgggttgattctattttttaggtatttagtttggaggtagatgggattgcacaaagatccaaattgaccttgtctcttaaaaactgaccaaccaatccaaatcacatttctcactagctgacatgtgggccatcccttaagaagtagtaccacgacacaactatagatccagacatccgtgacaagctaatgctactcgttggagatgactcatctctaacaggtcgaaaagtatcacattttaggtatggttatagggataacccaccatagatacaaggtcatttgtgacgggtcacagttgtaacatgtcacatatgacctataacgggtcacaatcatgccccatgaaagataaaggtcatctgtgatgggtgtaatgagatggcccataacagatgagtagtcctaacttccacccatcactaataacattatttgtgattcacacataacaagtctctcaagtttctgcatggccgtggtaaaatcataaacttctggctagtgatgtgtgaggaatgatatagtaatatt

SEQ ID NO: 41452 - DNA, 649 bp, Oryza sativa
ttgaaccttctatgcacacaagtttacgatgtatgcttcatgcacacaaactaacaaatgttatagaaaattctagaaaaaatgtacttgtactttcaatagtattacatatatctgtaaagtatcaacttcaaattcattattctttagccataaccaaaaaaatacgatagttcataaagcatatatatttaataattttgtgtttttttggttacgactaaaatataatgaatttgatgcaactttgcatatatgtgtaatactattggaagtacgagcacaattgtttctataatatttagtggtatttgttaattggtgtgcatgtatgtacaccataagcttgtgtgcatatatacattccctatttaataaggggcatctaggtcattttctttcctggtaatttgtcttttgaatcctagtagtagtattgcacttatttagaatagagggagtacatctcaatatttattaattttgaaattttaaattagagtaaagtgtacgggcggtccttaaacttgtagtggtgtgtcatataggtctctaaactctcaaaatgtatatccaagtctcagaacttgtcatggtgtgtcatctaggtgccaaatcgccacaaccccttcaggatcctacgtggcgt

SEQ ID NO: 41453 - DNA, 1079 bp, Oryza sativa
ccccgcgcgccgccgaacgggtcgttcgtaatcgcagcaatggcgcgccagccaatccgtccggactttttatttattttttgttgttgttgtgacaaaatcctcaaatgcggctaccgagcaccggcacaaacggtgagaaaagaggcgacttcacttcaaaagagtagcctgagtaggctgcactggagaggtgaaacaattttttctttttagaaagtatatataacctccagccactgcagcaactaagaatacacgtggtcataattatgatattactacatccgtccccaaaatagagttttaggcttaacgtgagtattaacaaagtgggtaaagttaaatggtaaaaatattgtgatcggttgaaaatagagagttggtggagaatatgaatggtggaatattatgattggttgagaaaaaaatgtaggtggagaaattattatattttcggacggatggagtaacgtttaaaatctgataggttgtgccatgcattttccattctaccactacaccaataatgcttccgcatgaaaccgaatatagagggaggaaacaaacaatcttttgttttttaagtggggagaaagtgattctgttagtcaattggattgctttattatcactagggccagttgttctcatatgttgttttcgtaaattctaagacgtcactgtaattttcaagacccattagctctagctctacaggtgtttgtttttttctcttagcaaatgagggtgcaaggtttgtttgcagttcagctgttccattcaggaaacccaccaactctcagagataagcactctctgatctcccctttgttgctttttaaatgtgattctgttaatgattattggtacgaaaaaaagggtagtacatcgcaagattgatgtcccactgcttttttttttgtcacgttcgcaatcgaagacttgaagttgtacagtctgccgctttacgacttcgaaaaatatgtaaagttgttttcatgttcaaagtaaaataaacatctgggtctggtcagtgctgcatcggcctcagtatttacataaattgggctgcagga

SEQ ID NO: 41454 - DNA, 2622 bp, Oryza sativa
  unsure (1)..(2622): unsure at all n locations
gtatctccgaccacccgcgnttngccgcctcctcctcttcctcctctcgatctctcccgtcctcctcctcctccttcggctcgtctccttcgcccgcgtccttcgctcctacggccttcgccgccgcgtctcctcctccttcgctttcgccgcatggcccgtcgtccatggcgctcgccgtcgccgccgccgcttcgctctcatctctccccgtctccgtctccaccaccatggattgatacctcagaaagtcttcggtcttcgtcggagtcaccaatcacatggcgattgcgagcacgcaattattgtcgttgtgatccttcgctgtgtgtgttcttgtcctgtgtcagggagagtgtgaagtcaaaatgctcaaacaccgtgccgcttctgtaggcatagaagagagatttatgaatatatactaagggcagaaaagaataaaaaaaaagcttcagcggagcttaagattctaagaaagaatttaaaaaaactggtttttcctgcttttggcttttatctttttttttattctacaactacatcttctcataatctaaatcaaaagttgtttagaaaacttctgattctaaaaaaaagctgtaccaactaaaatcttctccaaacatgcccttggattggttgggcacgttgcacgttagttaacccgcctttgttcgctctggggaacgagaaaaggcactgacaagtggtaaaaatttacgagtactagcagtacaatggtccacggttatcgaactggtgattgagtggtgaacatggtaattaaccaagctttgccgtcagcgtgcgttaaaacaaacaacggcacgtccagctcactgaatttctatcgagaaccaatccgcatgtgcataatatttcatctactgagtatatatgtactttgaaaagatatttactaccctcttactaacaaggatgtcaaacatttaattcaattatagtgggggtaataataaaaatcaacatccaatcacattgtaccacgtcagttttgtaggatgtttgggaacaaaattttgtatctgtatcatttttctcccaatattcaccatgcaatattcaccgcgtaaccgtatggttaccacagtaactgtgcttcccacacggatgcgattccttcaccggtcaaattattttaagtttaaccatggttaccaagcttacctcgggaaagggtaaccacatgccacatattgatgcccactgcgcaaagtttttcatgagatttatgtttatatacatattttaaatcatgtctcgagtcaaaactaaaaccaaagtgggtgtatttcttctacagtagtcctgcacttccaacttgtttgcatgttacagtttgatatgcaaaacttctgcaagactagtttatgattgtgatattaatcagtatatggagcagtttttattatcctgatattgatagccctcattattactctaaagaaatatagggagagggcgtcacgtcctcttatcatactcgacgcatgaaagggatcacgccaaggagaagacaccagaagacaatatccctggccgtcacacaccagttcagtcagcaatgacgaaataaatggccatgtcactcctatcttttaagttccaatcggccgccaaaacaggtacatgccccaattctcacagcagtttctgccccccacaaaaaagaagtgatcagctgctacaccatcttgaccagatgccagatgcagtcccagatcctcagaaaccatcggtacaccaccaaacagcttctgcagtccaccacaggtaaacaaccaaggtgcaaatgtaaaatgttacgatcgccagacatgagaagctcgcactaagtaaatggcaaattggccctggctgcatgtgattgccactttgcctgacgaccttggaagagagatactccttggacatatgcaaaacaatcctgatctttaagtagccttgatactgattctgatttcggtctggtggtccgaaagaaagtatagataatttcataaattgtcccccaaaaaaagtgtcatggactcatggtgtcaagattccccaacatgatgccgttggaaaccaaagataaactatccaatggaatccacaaagctgtgggatcagctaattccagacagggcaacagcaaaactgatgctcgtttggtgttcacagtttgtgctttaaccacttagctcatgcagcagcaatacagcagcgtgatttccagtaaacagatcactcagctcgttgacatttggttctccctaatcgcttgtagtggggtactgattaaatccgacctggctctactttaccaaaaggaattccaaaatatcctccaacaggcaacagtagcaaaacattgattaaagaagtgcaaaagaatgaatgatgcgacaaacaaattgaatcatatgcagacggcaaactcaaaattaaaacatctttatgaaggctagtacacaaccactcgtgcaatcccctttttaaagagagaaagaactgagtcaagtttaagcaacctctgaaacatcacacgatgataatctcttctgttacatagaacttttttaggcttttcattgtctatgacatcttagcaag

SEQ ID NO: 41455 - DNA, 753 bp, Oryza sativa
tggacaagaatacgtgattcagtcggtgacaggttcttggcggctcgttttgcgtgttggagatggagatttggagtggatgtccctttttacagacctagattagctatgataatgaggtagcagtcagcagtgaactcaacttgcctgctttgcaggagtattcgtcttcctccttttgaaacttgaaaagtgaaaaaactataatttctgaggaattctcgtgttccacagttaggcaattcataaatgtcatgtatgctagtatacacccttaaacagtgtactcaccccgtttcataacttttgacgttttagataagactgagaatcaataaattttaaactatttagattgaaaacactataacacgatgtatatattaatcttacaacttattttttatatgttataatagaaaaatcatagtcgaagataattttttaagaccgtgtcattttctaaaatattaagaattatagaaccgtatggtacatttatgtttaccaagcagtgataaggtatttatgtattttacaactttgatctctgaatatttgcgtgtaggagatggggatttgtggtggacgtccctttttactgacctatattagctatgataattacgtatagtaagcagtaaactcaacttgtctgctttatagtaatgttcgttgtcctccctttgaaacttgaaaactgaaaaccatgaaatttctgcgaaattcttgtgctctagttaggcactcatc

SEQ ID NO: 41456 - DNA, 1188 bp, Oryza sativa
taaataatggatgcattcaaaatgaattcagaattcttcagaattcgacaccagagaggcaatgcatggtcgtatgggatccgcgttggttggtgaggtgcttcactgcctaaaaaataaatttataaggaaaacaaaatggagagaagtttgatcatcgatgaggacttggagtgagttcaatggctgtttggtacgactccactatatatgcacacatatcagtactgttccctgactttgttcttcagttaattgcgtatgggagaaacctctcaacagcaacaactactgcacaccaacttgtactagaattgcgccttgttagcaatatgatagtacactgaattttttttttgtcgaaatcacaatgatttaatgattttaagttgtttggtaagagttcatgactagtgattgattaggtttacggccatagagtcaacgcatcagaatacatgggcgatgacaaacagctacagttgttctattccaaatactgcgtacaaatttcatgcgaaatatctttcaataagtaatgatgtggagtatttcttaaaaaatagtagaatatacattttatacaagggcatatgtatatatagtgtatacatgttcttttttttttgcatcttctttaaaaaaaaagaatttatttgatatgtacttgcaactaccccaatgttacatcttgctaatcttgtcaatttatttgatatatagctgcaactactctaatattgtaatactgcatttactagtcttatagatttatttgatatatgcttgcaactgatatataatactatattttgcttagggtttagggcgactattgcaagaaaattgtcgaggaagacttcaatatatgtatattaagaccagaaaagaacaaaaaaggggggagaaaacccaaaaatatttcaaatcaaaacaatgtcagaagaccatttacactaaaattttgattcttttctataaaatactaatgaatgttctgtgactaatgctaagcaataacaataaaacaaacaaaaaatcctcaaaagaaaactctcctccccgttgttcttgcgcaagggaggccaaccatgcaaatgggggcattccattccacgacatgccacgtcacgtcgccgtggacccatcggtgcacgaccgcgacagcgcgggctcgccgccggcgcc

SEQ ID NO: 41457 - DNA, 661 bp, Oryza sativa
tgatctacacgcggtagacgcgtagaattaacagggatgtagagaagaactccgtgttcttgatttcgatagatgaactttcgtgcaattatgagatacagaccggcctaatccgtgtacattcttgtactagtttttgtgcatttttcgtgcaagccacaggggttgaggtgtcaattgcattcttgtactagttttttctgtctctgaaaaagtttgcagttgaggaaacgaaaccctgcatctttccatctttcttctaatctgtgttaccttacaaacatttcactaaccttgcagtgttcttttatgaatttgtgttggtgataagataattaagctggtgcaggagactgttcagacaatattgtcttgatgttaggttagctcagctgaatgcttcttgttacgtgaggacataaagattttgagaacacaagtgtgcaacaatctgaacaccgaattgctgcgtgttgcgccttttccagagacctttcctgaattacaattttcctcgtgacagtgttgtggccttttcaatgcgaatgatgcagatcagtctgcgcttttggcctgagaatcagtttttagttttacctggtcatttttttggggggaaaggttcttcagagcctttctttacaaagattcctagagcaaa

SEQ ID NO: 41458 - DNA, 761 bp, Oryza sativa
attatatttctatatggactctagtctcctcttctaatattccttatttttttaattccgaatttcagttatttctaaattgaatttttatatagactctgttttttctttctctgattaatgtaagaatttccaagccatgagagcgaacgtggaggctcctttttctattcctttaataatataatagataaatggagaacagtatatactctcctgcaagattagtgatagaaccaatcgagatttgtatctgatatggtttcttccatatctttattagattcatagaataacgcactgaatttgagtacttttaagctaagttcttttcaggttatttatcggatcgttgaaatggattatttgatccagcttcgaaaaatacatttccttaaaagaactttcttctactatattatccaaaacacttattttaagttatttgctaagtttatttatataaaaattaattcattcatataatcaagtagataattcttaactacaatccgcttaattcgttaacccttcttggaattaatactgttctgaacactctgattgcatagtactagtcaagtttaattagcatatcccagcggacggtggtgaaccgagcgaaccttctaaaatgaaatgtaataaagtagtttggtgtacttaatccataaacaacattggacagttcaacacttgcagtgtaagtttttatcccatttcggcggctgcaaaaaaaaagaaaaaacaaatggctactg

SEQ ID NO: 41459 - DNA, 1188 bp, Oryza sativa
tgcgtgggaggtgtgatcgtaaatcatgtagatactctcatgttatggcccatccaatgccacccccaatgagggatattcccatgcaataccctgatatggtaagttgttgtaccgaacatagtcttacagaattacgctgttgcttgttgaaaataatttcttatggagtatttgtacttgccttatttaatactccctctgtcccaaattatagggcgtcctctttttaaggaaaatcaaactcggtaacttttgtctaataatcatactaaccatatatatgctaaatattatgcatgttatattgctagattcatattttaaagtactttcatatgatgctaatttcatatttgttgggaacataacatggaataagttaatggtcaaagtatgtcattgaagatcgtgtaaaaaaagtaggcattataattttggacggagggagtatattttttggaagcaagacagttagtgttcctttaactcacatagacttgccattatttgttcagaattcagatgcaataagaaatgaattgttaaatagataattgcttgtcttttgatcgtaaagagtgttctactgttttgttttctgttttcataatttgattatagtaatatagtcttaaaattttattcactgccttcaaggtttacatgccaccaccagcaccccttggagtacctatgatgatgcctcccccttcagcccctgcagccttttctggtaaatagtgcatgatagaccatttactactgatgttcagttttaatgaatttagcaaaaaggtacattagttttccctattactgttcagccttttctggtaaatgaagttttgagtgtctaccctattctgttgctattttggcaagcttttgatcgttgctcttctgcaggtaataactacggagtggaagtttgcagggactacttgaagaacatgtgtaatagagaatcctgcagatttgcacacccggatttgaataatgaggtttttataattttcttcttctggcatgaaccatttgttttacaggctactaattagcaagttctttccaacattttctaataggtgatgaatacccaagttgaagttgccgtgattttaagcgaggagaatgcaatcgacctgcctgtcgcttttaccatccacctgcaagctcaaattctat

SEQ ID NO: 41460 - DNA, 1364 bp, Oryza sativa
cttttgtttataaccagactgagccacaaactaagccttagccactagacatgtggaagtacggtagtgctttgcaacagaggcccgaagactggtccttttatggccgaggtgctactatcaaaaccatgcaccccgagcccagcctaaaaccattttgagggttttgaatagagggggaggtgtgaatccaattcccaataatccatccattccatagtgtccaggtgatgagaatattcccaaagtctagagttgtaaaaccacctaatgttgcctaattaaccagcgaagcatctacctaaattcatactagtggtaccatgagtagagtgtccactagttggggttttgtttattctagggtgaacaaggtaataataacaataacaataataataaggtcataacaaaggtaaataggcatggctaaataaaacagtgataacgcgggaatttaaataaagcgataatgcaataatttaaatcaaaataattttataaactgggattcaatatgttcaaggatgatgtgacttgccttgctcgctttcccaaacgtcggcttcaacctccacgaagagcggatcttccgaagctgcagcgtctatacgaccaacagaaatgaaaagggtttttactctaataaactccatataacaagtaggaacaaagcacaaaaatgggttcttgacttcttaaggaaaaattagagacttgaacggtccaattccgagttcaaatggccaagttatggccatttaaagtttatatgctctttaaatgaatatttgcgaatttcttcatttaaaatttaatttaaaaaggggtttattgcgtcagccgaggggaaggggcacgcggaccgggtccacaggagtggggcccatgcggcagcctcacggtccacggtggaccaggtgcacccgggctcacaccggccggcgtcgtgggtaacacgcatcagccgcacccgagggcgcgggcggctgatgaccgggccccacgcggcagccactcggcccgcccgaaggcggccactcggcgcggccggcgggaggcggtgcccgcgcccctattgtcaccgacggcggccataggcacggcggagcggcggccgagagaggggaagggaagggggaaaagaggcggcggtccacggctcaccctaggtcgacggcgacgacgaaaaaggcggccggagcggaggaaggcggcggcgcggctcgggtcgacggggtcgacgacgttccggcggtcggcgaactcggcaagggggtggacggggtcgacggcggtgcggcgaagccggaggaggcgacgccggggcgggagacggtcccggcgagcggagaaggccggcc

SEQ ID NO: 41461 - DNA, 697 bp, Oryza sativa
atcctagtacgttgtcgtgactaattaccatcatcggtactctacaattttactgggtgcttacattcgatccgaagctactttgtttttaagatataaatggagcgtataaaggatgtccgtccttttattccaataagaacaaacacaaagcacatatggcaaatactaaatccactacaacaaaatcatagaccatacaaagcaggtaaagatgtagcaatccacattgattcttcatccactactacaacaagcgcatatgaaaggcggcatatgcatgatcattgtgaatatgacatgcccttgtcgagcaaacgtgtcacttcatgcaaatatgttgtttcaagcgacatcaatatatggttacaaaattttaaacattggtatattaatgactttcatatatgcatattaatttcaattgaaagacatcttgttgtccatccttcctaaaaagaggtagtgtccaaggcattatttagttgagctctcgctcactttgcatcacagaagtataacctagacatagctaattcattataaaatcaaaaactgcagcagaacaatgagggtaaaaactagaaagaaggatttattatgttccttagtttattcagccacgaaagagtgacttaaaaaaatgtacacttcatccaaagtgaaaattatgagatgtcttacttatggaattctc

SEQ ID NO: 41462 - DNA, 955 bp, Oryza sativa
tccgttgcagaggctgcgctcgccatgagatccagtaaaatcgctcttcgtcttcacgtcgacttgcagagcagccatagattgaatttctaaccgactccgggacaaaatcaacccagatcggagaggtagggtgaaactccaaggcgtcgcgttagaggagagaaaccctaattttaggcgtgagttagtgagatacaatgtcaatcaaattttaatggatagtcgatgcgacagtgatcttgatcgtttgattagaaaccaacggctagagaaaaaagatgacgtggaatcaccaggatgcagagaattcctagtagtggggatgatttgtataggtatataggataatagctcacaaaacataacaaatatagctagataatggttgcaatccttaccaaactaacgtataaagtgagcgatgagtcatatcattatctttctagcctgctaaccatcatgtacaccatccgatcccaaaaatgacaacttctaggggatgaacctggacaaggtttagggtttagggatgaatctggacaaatgattgtccaggttcatccctagaagtgggtttctccttactggatggagggagtatatgtgatggacacaaaagttactttcgtgatgaaatcaaaggggatttgttggggcacctaatagaacatgtgtccgaatgacatgactcacttggatcctaataggacatgaaagcaaaactaacactccaaagcaaccgatgaggaattgaaagaaaatcagtgccattgcatctataaatagacaagcgcaatgaaaaccctccccatcgttcacacagttcaagcattatacaacaaaaaaagaaagatctagtgtcccgtagcaatgaagatcattttcgtctttgctcttcttgctattgctgcaaacagcgcctctgcgcagtttgatgttttaggtcaaagtt

SEQ ID NO: 41463 - DNA, 1272 bp, Oryza sativa
actcagtcttgctgaatttttcccaaacccagaagaggagcccctggaagatgaaggctttggtgtctagctcatgcctgccgtcaagcgcctgtggtcgtcgccctagtcttccgctgtttcccgtttgtctttgtgtgtgctgggccttcgccgccctgtaataaattaactatttacgcttccgcttgttgaactctgaactgtatcaacttttggtgtaccttgcctcctaggacaaggaataatgcacgcacgtaaggaacgcccgttagattatttccggtcgtgacaagcccccagcgttagatcgtagtcgatttaacatcggggacactcgcgcaatatatattgtataaaaacatgctctaggtaaacataataaattatagatccgacaatgctgtatgatcttgaaaagtaggtacagtaaattgtatataaaatattgcgtacctttgtagatatatgccggatatatctacagaattagtagatcaatttaaaaaatcaatctactaaatacctgatcatgggtggctggacacgtactgactccatacatatgcatgtgtactgtgtacgtgtaaggagcaggcatatttgttgaattcgcgtcatcaggacgagtagtcagatttgtcaactagaaatttgattctagcgcaaactacagaactcctcgaatccgattaggatattagccactgaacagatcaatgtggtgcttgtatttcagctcctcgacgtgcttgttttgttgatggagatcgatgccgagtctggcttggacccggccagctgatgccgcccaccggttggcgtcctgcacgtcgatgggttagtgtcggatcagttttggattccgccaacactatggtcctctgccgctgcgacatcttgaagcttgattggtctcgccggatcgaatagttgatggcgatgattccaatctcgttgggagacgtactttggccaggttggatctccctgatccgaagtcgtcgagtagcttattgttggagaatccatctcttaaacccatctcgtctaaatcctgaagcaccaaaaaatccccctacctggcgcgccactgtcgacgtttgatgtcgcgattccggtatttgcatagtatggggatcgtcggtactaggacatacgcgagactgaggtaaaagagacagaggcgacgatttttatacaggttcgggcccctgaattgtcaggtaataaccctatatcctgttggccgaagccggtattgctcttatt

SEQ ID NO: 41464 - DNA, 961 bp, Oryza sativa
tgttataatccccttgtactccccttgcatttattctgcacttgtgggtgtgtcttgttgagtacggtggttgtactcagtcttgcacaatttttcccaaacccagaagaggagttcctggaagatgaaggctttggtgtctagctcgtgcctgccgtcaagcgcctgtggtcgtcgccctagtcttccgctatttttcgtttgtcttcatgtgtgctgggccttcgccgcccatgtaataaattaactatttacgcttccgcttgttaaactctgaattgtatcaacttttggtgtaccttgcctcctgggacaaggaataatgcacgcacgtaaggaatgcccgttgggttaattccggtcgtgacaatatgttatctaccctaggtactatggtgcacccagtaccattaccacccttggttgtgtcttgtaatgagttttaacagtatagtggttcggaagttaaaaataagctcagatatcatcatatgtgacatgtgaaactttgggtgatataaatggaaaaaagttgtctttcatatttaaatactatgcctctataaggatatatcctagtacgttgtcgtgactaattaccatcatcggtactctacaattttattgtgtgcttacattcgatccgaagctactttgtttttaagatataaatggagcgtataaaggatgtccgtccttttattccaataagaacaaacacaaagcacatatggcaaatactaaatccactacaacaaaatcatagaccatacaaagcaggtaaagatgtagcaatccacattgattcttcatccactactacaacaagcgcatatgaaaggcggcatatgcatgatcattgtgaatatgacatgcccttgtcgagcaacgtgtcacttcatgcaaatatgttgtttcaagcgacatcaatatatggttacaaaattttaaacattggtat

SEQ ID NO: 41465 - DNA, 1870 bp, Oryza sativa
tgataattcaaactccagtaagtccaaatcatattttggacaaaagcaagcaaacagcacatgtgcacatgtgcacctaaagacaaaggaaatgcatccatataaacatttggcaaaattttccaaacaaactctgccaaagagaaaatcagaatatatctcatttgttggcttaaaaccttatagtatgtagacaccgcatggccaaaaaatgatgatgtaaatatcttgataaaaataaaaatatagcaatcagtactttagatatatactttaattgactagaaatcaggtataattttattattaaggcccactgcagtaatggattccattactgttgtccttatcagcagattattaaagtttggtaggaaaggtatgtagaacaaagtagatcacctaaacctttaaaggaattttttttacaataaaaagcagagacactgagaaagcacaaggtaaaaccagtgataaatcaacccagtggattatctgaaattttcttcctatggcaataagtgatgtggaattgtggatagtctgagaattcactaaaacagcatgacttattctgtagatttaattacagctttccaatttactgaagtaggtccctaaccagttaaacaaaaatatctagagaaacgttttatggaaaggagttgaactatttggctggatacattaattagcagcaagaatatgtgcaatcaattactagtaaataagaatgctaagcatccttgacagcttgacctgtatcactcaacataagtatggtcaatgaacactcaataaaaatgaattgaagcccatgtggaagtgaacatgcatgatggttttcgaacacgtattagatggaggttacctaggggttcaggtgatataatgtagatattggaccacacagtattttttttattccaagtggaaattttgtttgtccctatgtgattaacatataattgagtgagagatgcactttctgtaaaagtacaccatatttttaccataggcatagttttaggcccatgaaattgtagcgggcccagtggctaaattggttgtgcagagaaaggaaatctagatctgaacagcaaattctatttaacagatcgattcattcagtttcaccagaagacacactgacacacaggtaataccagctgggttaattaagaacgtcaatactagaaatggtttcacagttgatagtctctctacctctcttaatcctgctacagcctatgaccacacaagaattcctgttctgttgtttatgctacttaaaaaaggtaaaactctttacgaaagagagctcagttgcataattagcgcaaacaaactaccctatatcatcggcaacaccgacaatccaaaggggaaacctgtcgattatcgatctagcattctagccaccgctgaaggctagatggaaactcatcagtagctgttggccacggaagacaattttctcgttggccttctcccccgtgtttgtcagattcacggccaaaatgttatatgatatttcctatcagctctgtcaggtcttgacaacacatcgaggggcttcatccggcaccccaatttcaatcgaaccccaaatcctccgacggctaaatggcagactcgtgctcaacccaagaaacagcctaaaatcaactgggtagaaagcaaagaagcgcacatacacgacacaattcgcagcgcaaaaagaagacggatacctttgaaggcaccacggatgattgcagccggctgccaagaaacccgaatccgactcccacgacccaagaatgacccgggggcagcaatgcaggtttgcagggtgggacggggggctgctccgatcgcttcgttcgtt

SEQ ID NO: 41466 - DNA, 846 bp, Oryza sativa
tagtatatgtactacttagtgtgagtagagcactacatgggcttggcattaacactctagatattatgtagtgaatcaagcaacaaataatgtataccttatgaattctgatgttattcagagattctttgagagattgctccatcactcttttattatggccaatatattctcaaccttctctggaccgctccaataattgaagaataacatgcaacattgttatacatgtccattaattccctttaattttctccctattatctatgagaatctaccatgatttttggcatcaatgtgatctgtctgaataaggggcccttttaagatcatatgccaccaagccactattgagttcatcaatgaatataaatatttacataattattgcagttttatccaattagagtagataatttgtgccacaacttaactgagctatatacctaagacacctttggacatctacccttaacattgcaaagccccaaggtgacttgacaattccttccaaacaattgactgaataaacatctgaatatcagagacatgaagcaggaaataagagatttaacaagttgttatatcgttattgaattgttgataagtaccttgacaatctgacccctgcaaatatacaatagattcaaaagaattgcagagtgagaatctttctttgcaatagacatttgtgttattgtatatttttattccatgttatagcataagctggcagaaatttactctgagccaaagaagtccggaatatttgacatcatgatctagcttcttgaatgtcttattaaggcctttggaagagcaaaaagaaattgatctgatctatct

SEQ ID NO: 41467 - DNA, 900 bp, Oryza sativa
cctccctcactttgtatcacagaagcataacctagacgtaactaattcaatatagaagcaaaaagtgtagcagcaacagcgagggtggaaactagaaagaaggatttatgatgttctgtttattcagtcacgaaagagtgactttaaaaaaatgtacacatcttccacactatgagatgtcttacttatggaatgctcctacacgttgaggttgttcttgctgacaccctcgtttctatgagaagtttattctaacatagcaagtcgatagtttactgcaaacaaaatggataataaacttgatgtttcaacaaaactagaggaactcacgcatgatgtacccaaagaaaaccggttcttgacacactacaaatatgtggtagttcttttccatctcgaaaacgaatagggctgtgtttggaatcaactgttcccaacatgcaaagtgcgcacagaaaacggagcggttcattagagcttgattagttaagtattagctttttttacaaaaaatggattaatatgatttttttaagcaacttttgtatagaaactttttgcaaaaaaacacaccgtttagcagtttgaaaagcgtgcacgcggaatacgatggagatgggttgggaaccctggattccgaacacagcccaagtctatccaaaatgtttagacaagaaaacacgtaacaagttggtttacaagaatacgaattgcgtcaatcctgcactacaagtagagcaacatgttgatttctcgtaaatctctcgaatggtgatttaagaattcagtgcaaacctaattcttgctagaaaattgaatgttcggtaccgcatcaacggaacaataaaaagcacttggcgtaccataattttgtcattcttgttgaaattttataatata

SEQ ID NO: 41468 - DNA, 2030 bp, Oryza sativa
acatgcatagagcattaaatatagataacaataaaaactaattgcatagtttgcatggaaattgcgagacgaatcttttgatcctaattagtccataattagcaataagtgctacaataacccatatatactaatgacgaattaattaggtttaaaagattcgtctcgcggtttcaaggtgagttatgaaattagttttttcatttgtatccgaaaatctcttccgacatccggtcaaacgtttgatgtgatatccaaaatttttcttttcacgtactaaacggggccttaatggaattttagaaacaatggcatatgccttgaagttacaaaactcattaatatcacaatacatcctgtatatatatatgattaatgattaataggtatccaagttccactagtactctacgtacccaaaaagccaaataatgcatgcatgtgaatatgtgatgtgatgagcatctgcatgttttcaagagcatggcacgccggaatggatctaatagaatactgcagaaagaccatatatatactccaactattacaaacatattactatgtacaagacgacaacataagttttaagtttccatgctgcaacaagcccatgtgttcaacttgaaattttgaccaatggatttgcgagatgccaaaatgatgaattggattcttcttcgaagctacatttgagagtttttttttcctcttttgatgacatacgtacacctgagagttgacgccttccccggagagaagcataattaatcgcattattgctgaaatatacggatttaaaatgccaatgatacaggaatatgcacaacgcatatgttacgcaataattccgggtatcttgtaatataaatataattatctatcaccactataaggcaagaccgctgcacacgtgccatcatatcatttgacatattttgctgaatggggtaggtcattgcagaggcgtgatttttatatctaaattttataaaactaaacttgactgatgtggttgtcggttcactaaaagaaagagagcaacaagattcccgccccagtttctagaaactaattgatcattttattccgtcacactcttgtgttggagaaaaatcgagcgacttttttttaattattttgacgaaatgttccatattccataagccagagcttagataatgtatgctacctgatcacttcaacattaaggacatatgactaagtattagaaagtatggtgttggcgctgttattttcagctatactttattgggttattatcataaattaattaaccaacgtctctaaaaatgtttctaaaactctttcttcactgtattacgtagatccattattataagcatatttgttaactttggactccaccggttggcttaataagccaaagccaaagttaaaatttaaattttcaaatttaattttgaagttacttttaagatatttttaatgtaatctttttggatattggcttttaagttattaagaacgcattaatttttattttctaataaaccgtttttgacttattagggaattaatgtcaacaaccgataagactatttattaaaatatttaatttatatctataatcttataaataatatattatgataattcaggtactaatcttttaatttcatttatatacaattgatacccacggcagcacattaacttctacaaaactgatcacacatcaggtcacatcacctgtaaatataacccgttagattgatgcctccaactgatatgtgcaacgggattaacttcccagtccgctgcttatgtcaacgtagtggactccagccagtcggcaccgacgcaatttattattccctcgatttcaaaatataaaggtacaactactcttaacctaaaaaatataaaataattattatcatcttaatgcaagcatctaattctataattagagattttgagggatgatgatttaaaaaactgtaatttagtgaagaaaatatgctagttaattaatggcatgcatgtct

SEQ ID NO: 41469 - DNA, 2306 bp, Oryza sativa
tagacgattggccaagtaggcaccatggttccagcacacttcaaataatttgttgtttcactttcacatcacaatcacattctttttcaagtgtcaagatgacatagataatattttttagatttcaccataaccaattatgaatataaacgtgaaccagatttgttagatctatgagtaattttaccaataaatgatcgaacttctgaacaactttttcacccaaatcttaataaacaacgtagtgcggtgtttaagtgttgggctaggtgtaaagtaagcgtcgggctacggacttcaggggcaaaagaaaagttgcaggttgacagatcaccaccgacttaattcttaaaccgaaaaaaaaaatccattgaaaagaacatccccgattaaactaatctcatgttttggaggaaaggctttaactactctcatgtttatacagccgccttgatagaactagcgcaaaatcgcgacgaaaacatttacacggtgtatcaaagttcggcaatcaaaccaaagcgcggacgcgcgcacgtacggcggcccaacgcaccatatccagcgcaaggacacggttgcgcacgcgtataactagatcgatcaacgggggtgaggtgtatatcaggggcgcgcggagcatgagggggagaggcggaaacgtacccggcggtgaggacgaggagcctcttctgccaccgcggcgtgcggcgcgcggcctcgacggcgcggcgcaccaagctcaatccccccgacgccgacattgcgatccggccacggcccctactacgggtggtgtgggacggagcagggaggaggaggaggaggagacgaggcgaggcgcggaggcggcggcggaggaggagcggtttgctcgcttgcgaacacgcggcggcggacgagggcgacgtgcctcctggcctcccggagaaaagcctaattataaacaaaaccacaggagaggagagagagaattttgtctgcgtgggccgtggagcttttccactttaacccctcataggttgaccgatttgcttttaaaccccggagatttgactctggaatgttgggtagggatacgattaacaattaaatgttttacagggggagatcagcaagacagacaaatgacagtttcgtactgcgtaataactgcgtttcatttccttccttgttcagtcgcggcgaacgcgttcacaccttggacacgatcgagcggtgcaccttgtccgaggctgtccacgtggacggcgcgatgttcgcgagacgggtcttttggcttgtgagacaagaaagaaagcgagatctttttttggtcgtacctgaaggttggggttgaggagatgggaggggagtggggccagctttgctgcggcggcggcccagctgtaccagcactactgtggctgcgttcttttcagggtagtcctcctcgttttccgttagcacgcttttcaaactactaaacggtgcatttttctgtaaaaagtttctatacgaaagttacttaaaaaaatcatattagtccatttttttaaaaaagaatagcagatacttaattaatcatgtgctaatggatcgctccgttttccgtaatcactgttgagaagaagaaagaacgcagcctgtgtaacaatggcgctatagggtttttttatgttgttttggaaacgtgtgatgcttttcttttcaagcacgattacccagttttttttttttgagaattgattacccagttttttatggcaacgtttcattggagattataataatgggtaccttaaataaatcagaattgctatatttcttgtgacaaaaattcttgtgaaagaatctgtcagataatgtacccttatatttgctcttatacgctatctttctttcgacatattttcttggaaaaatccgtcagattttgctcttacatttgtgcaagtggcatgctatatttatttcgatataaattctaggaaaaacatttttgttagattttctatcaaaatgttgtatagctctctgtaaataaatttgttgaaagacgtgcgactttcggtatataaaagtgcaacttcagtactagtaatatgcccgtgctaaacgctacggtgcaattctatatgtctttaattattttttaaaatttcatgttaccaaaataatatttttatatgatttgtgcatttaaactttaattaaattcatatcgtgtataaaatatattttatataaagtgcaatattatgatattacgtgggcacaataaaactttgcaagacttaattatatataagcaattaagtatacaa

SEQ ID NO: 41470 - DNA, 1137 bp, Oryza sativa
aaaagcacttctccaccagtgtacacaacaattaaccaaatgctcctatcttttaacatgtaaagacatgttcagaaagcaatttgggagatgttcagaatgtattctggaagaaaacatatgcatattgttttgcatgtggatgtgtacagaaaactcatcacatagtacaactgaggtgaattgaattacaatttggatcatattatcatactgtcaaaaagtcacagtaattgattcacattcagtttcagcaaaacaatacacataaaaaggcaatattcagatattactgattcagtctcagcagaatgaacaaccagaaaatttgtacaggtaccaaaaatcgattcaatcacaagcaatactgaatagacaacataacaacaaagtttcatcgaatttggttgtgcatttcacaagcagtattgaataggcctgaacgacattgtttaatgaattttctcatgtaattcacaagaaatgttatattattctaaggtcaaaacacaatagcaacaatattaaatcatggttcgttctcggtgggttcattggagacgttgtcattgtagatcttcattgttttctcgatgggagataccagcgaggatcatacccttcgcccaccttccttttctcaccttgtcctttttctaccttcttggacttgtattcttccatggaactttcaacacgctggtagccatcacatatgaactgaaacatcatcatgatggcattcacgtggccatgtaataattccccttgtttgctgtttgccttgatgaaggttgcaccttcacatcatccttagagttcattgactccttagttgtggcttgatgtggtgaaaaatcctcatcatccacatcatccatggatgccatgccttactacaatacagaagaagtaggagatcaataggtgcaaactaaagtataataatttccaacacaaaagagatagattggagaacaataccaagatgacgagttgaagttccagcagtcctatgcagccgacaatcagtggtgagtattttttcttggttcatacttgttcacccactcatatataggctaaggaggataatgttacctttgttgctatcatgatatttatggaaagatatag

SEQ ID NO: 41471 - DNA, 647 bp, Oryza sativa
aacgagagtgtcagcaagaacaacctccgcgtgtaggagcattccataagtaagacatgtcataattttaactttggaagaattgtacatctatatctatactaatataaaaaggatgagttgagcctagcaatgcttcaggccaaatcatcgtccctaatccctaccatccatccgcatctgcatcgcatcatcaccctaatccctaccgtccacccacatcgcatcacaaatccgcactaatccactgcaatttcaccctcccacagcgacctcatcctctctccaccgaattttttggcctgcgctcccgccaccgcgagatgactctgcgtctccgccctcagcgccacggtgttatcgggccatcgcgcttgcgcgccatcctaaacactccccgcaaacgtcgccctccacccacccctctagattaagcccacccttcctccaagctcccaatccaccctttctccaagcctcccagggccagccgtgatcccctccaccgtgccactaccgacggtaccccccccccactccctgacgcagccagtcctcctcgccgggtgcacccatctccgtcgttgtccactcttccggcggcatcaccacccagttgcgccacccggtcgtcatcccttctacca

SEQ ID NO: 41472 - DNA, 563 bp, Oryza sativa
ttttgatttgccaatgaataccaactaatgaacttatcagagccataacagaacatgtaaataaaaatttcttccagctataatgaatagcacacctctgctgctagtcttcttcactttcaaaacagaaagaaccacaagagaagtattcactaaaattgcttgagacgcttacaagattttgctacatggcccaaaaacagaaatctggcaatacaaatgttatttcacttttgtgatcaaacaatatcatgaacagtatctgctgtgcacaattccaatatgatcccgggttacaataagaaatatgaaggacaaaccatcaccatgaatctatctgggacaaacatgtctagcatcatggattaatagctatagcacattctcttaagcaaaagggtgagaatacaatctgcttaaatgcccactcctctgtcccacaaaaccccaatatatctgaagatgtaccaggacaacgtgcgtgtctaaatacatcttcaggattggactttttattggacgaatatattattatttattatttatgacgttaaataaacaag

SEQ ID NO: 41473 - DNA, 670 bp, Oryza sativa
tgataaaccttggcaaaagttccttgccccaataattttccaatctcataccttcgcagtagaatgtttccattcttctcaagttccatcattcaaaacaatgctagcggacaattctttattggaattttagaggaaaaccgtaaaagcaaaaacttcaaccatcatcagaaattgcatgatctagcatagcagtatttctgacattgatagcatcattattactttgtgattgcagaatgcaccaggtgagcaactgaaatcctcgctcatcaagaattagtgatgtcaaatcaatgggagaaatgcccttctcttcataggagatatctctggcgtgcaagcacatctttctgcattccctagaatggcctttcacggcaacttgcaatactgcaatacagacaataaagcatgattaactatttggcagaaacaaagtagcgtgattacaatgtttcaaaagtgaaagcaaatattgcagatacacaagtgatgggtggaaaaaaatgtctgtcttcgtaaactaattgagaaacaaaatgcacatgcagatgaaaggaaagacagatgttgtatccatgaaggtcgatgtggagtcaattaatggattacctgggtcagtttgtgtgtgtagatgtgcctatctgttccctataagcttggtcta

SEQ ID NO: 41474 - DNA, 682 bp, Oryza sativa
aaaatcactcttatgcacaggaattcaatgggatgcaccgaatgtgctaaaggcagacttccagcggaagcattcattcgttcacgttcctttcagaaactggcattcgagttttgagtttctcgagtcgctcccctaaacctaatccccgaattctcccgcagcccaacatttcattcaaccacgaaatcacgccgcgcgtacccaccagtcacctcgctgtagcaagaattcatccataagaggcgtacctgatctcacaaccctagatctcctggaccccggagaacccgaggcggcgaaaccctagcccacccaccgccggcaagacccccgacctccgcaaccgcggagagagagagagagcgagcgaggagtcggaggcgagcacgaaccctcaaggccgcgaatccccacacccgcccgtcgccggagttcaccggaaggcttcgcggcgcccgcggcggaggccggcgagcagcgaatcgtcggaggcggaagagacggatttttattttttatttttttttgggaaatttttgaactctggtttgttcacttgccgcctcccctccgaaatggtacgcccgtatttatacccgtacagtatgacagacgtgttgggctacgactctaaatgggccaccatttggtggcccatgtagtttgggcctccattcct

SEQ ID NO: 41475 - DNA, 710 bp, Oryza sativa
caattgtactagttaagtattacgtcagatgtatgtacataagagccatgaaaatgtttagtgaagcactgaaggtgctgaaatcaaaaccacattgccttttgagaattcattcagtacaataggcaggccatagcgttcccttttctttcctttttcctttttttcccctagctctgttgttattccagtatgtgtatgcggctcaaatccttgcctgatgcttctcttctacgcacagactgagattgagcacagagcaggggaggtgccggggtcattgcagcatacaagtgcacagccagcatgtcaatttccttctgcaaatattcaaagcaattcgttctcttttgggaatgtaacggatgcacttaactcccatacagcgcaaactggccaaacacaaactgccggcgtgttaaatgctccgcccaacccattgcggcaaaatttacactcaaatcatcatccgattcattgttcagcgtatggcactatcaactccctaccagatggaattggagctcaaagcaacatcctccccaacatcagaatttcatgcactgcaactcgtatgaaccctccatggatgagtcatgatgcttgttgaggatgtgagccatatgaaaacccgcagcttgtttgcttagttcccccggagccttcaagatctgatatcaccttaattgctcgagaaggggctgcaggaa

SEQ ID NO: 41476 - DNA, 2467 bp, Oryza sativa
ccgcaagcgcacggatataccattgtagcatttcacccgagagtatttcatgggtatcgtatttattttatcccatgggaagatcatgtagagtgaacttgactaataatttatatattacttgtgataatcatagtctaagcaggggttaagataacccaagggtagagtgacacacaagcattaactactcattctcattatatattatctaagttaagtggacagaaaagagaaagaaaatctattcctatacttctaatatacatagtatacatacattctagttaaccgatatactagctaataccctctatccgatgccctccaggtacttcgagaagccacccctgactgccgagttccttacgacagcccgtcatgaccatacaaccggggctaaatacggaggaataccctccccagggaattaacttaggattatatactggcgcggaggaatacccgtactgagctgtcaccatcagcggcccacctttcctctgcaatatataaccccgaataatgatatcccgtaatctagacaccacgtctaaactaccagatactactctaatatcatcgtcatgacatagagtaatttcatatgcaaatattatacccacaccaaagcatctgccagataagctagccgtatattcagtataacatgaacataatgtaaagtaggtactcatatacttggaaagtattttaataccataaatgtatttagaagagtattctaataaaagtacaaagcttacaaaagagaagagaaaagctactagagccatacccgaactcttccgaaagcttccggactcctgatttctactctattcctattccaccagctagatactactaaactaaacttgagagaaatgagagagctattgcttgaggtgtgtgtgtgaagtgagaaggtgaagtccttttataggcaggtatgaccattgtaaccactgcgaaatgtctgaagtaccccgcaaccgccatcaggagaagatctggagcgtcctgccaaaccccacatccaacggtggagaaggaggttcggctgaaccaggggccaacccaacctggcccaaaatcagcaggtggcctcctccgttgcttcactttgtagacttgtgaattttggcccaattcatgcataagtctaattctcgatattgtccgattgatttatcgtctgtgttgatgtcgattctcctccactttagtgtcattctcagcaaaaggttagtatacctaatactagtggaatatgattattctaatagatatatgcattgcaagcatcactagttctcctctattttagtaatattgacggtcgaaactaatcgataacgaccgtcaacaaagagcaaggagaagggggcacggtgctacaagtgtcatgagttttgacatataaggaggaattgctcgttattgaagaagaggaaaactacgattgcaagtttagcagctcatggtgatgattcagagagcaccagtcatgagattctcacagtgtctaacgagaagtctggagaagcgtcaatgttggactcagctagttcctatcatgtggcattgaagcgggagtggttatcttcatacaaatctagtgattttggtgttgtttacttgggcgatgacatgagttatcgtgttgttggaatgggcgatgtcaagttcaagatgtatgatggaaacgaggtgctactttcggatgtgagacacgtgccgggactaaggaagagtatgatttcgcttgagagcctacatgagacaggttggttgtatcaggtggattttgataggaggaccatgaatatcatgaaggaaggcaagattgttatgactggtgagagggcaagctcatgtttgtacaagttacaagggagtgctgttgcaggtggagtcatggaagatgggtatgctggtgttgttgtgcacaatcctgaaggcggcgagcctggtggaggctcgttgggcggctcggcgtgagcggcggaagaaccaactcaattcctggtacacggagattcgagcaagtaacagattcaggttggtgtggcatattcgccaaggtggagtttgttagagtttgtgtcgaatatatgtacatagtaggttacagtttaggacttgagttgtaatagcgagagggagcggctaccggcggcgaccggccgtgagtcattgtaactctaatacgatgtatatgctagatcggggaggagcgcccataatcagtgtctcggagatgtagacctcggctgaactccgttatcaaatatcgtgcctcggtgttgtcatcgtgtttggttctccaatggcgtttcttccccgtttggttaccgatgtgatttctaggcctgttttctaaaattatcttcccgacggtgtttatcccgttattgatgtgcactagggttctcaatcttccgaaaggttctgataaacaacg

SEQ ID NO: 41477 - DNA, 3952 bp, Oryza sativa
aatgcacaatcatataaaaatcccctattttcagtattgcacaataactcttgaatctatactactcagcggtccaggtttagaattagccctatgtagttgatatttaactcatggataatctctgggaaacttagtcgcaatccgcgcatcaacgaaaataactgcacattccgtaagaaccatacagactctcaagctccaacatctgtattgcgcagctgaagcaatctatatcaaatcaaccaaaaatggtattccataagtccccaatcaacactaccaagcacatcccatccgctggcatccccagcagtttgccgtgatggctttcaaatagaagccgggtctccggaccttccctcaaaaaaaaaaaaaaaagcacatcccatccatccaggtctcacccggtcgatcattccgcgcagcagtgaggaatggataaaaatcaaaagggaaggggcagcagtagccaagagagatgaaaacgacctgagcagcggcgccggtgcagccacggcggcgggccaaggtcgcgccagccgcggagcgggtcccagggcggcggcgtccttccacgcgaggcggtgggcgccccccgtgctggcgatcagcagcgacgccatcctcgcctccgtggagaaagaacggactagggttttggcgtctcgctgtggggagaggggagagtgcagaggggatgggggatgggggatgcgccgcggcggcaataagcggtgcgcaagatttgtttagcagtttaggtcggacttgtgatcgtactggactactggtggtggtaaggtggaactggaatttgcaaaccgcggtcgtcggtcggttccggtgggtctcggactctcggtagggaaattccacgggaagcgagcggtgcagaagcgagtttctattttttttctttaacctttttaatttttaaatttagaaataaatccctgcaaaacttaatggacgcgactccggctcgggcacccgatggaaggaggctaaaattggacactgacgttagcatgacgttagcacccgatttacatgcaaaactattttaaaaactgatttttctctttaattacttatccaaattatgatctgattgcaccataaattcgttgcaattaaatcttcaaaacaagaccacacatggatatattccgacgaaaaaaattagcttattattgaattatttttaaatgttgcacgatgttccaccgggtatatcggaattgtttcactaagtagatcaagaatgttttactcgttttaatcaggtgttgtttcaccttatataaaaacaatgtttcagtaaatagcaaaaaaatgtttcagttcactgcaacatttgatccatacatagtgaaatattataagtacactaggtgaaacatttttcggtggaacaacaaatgaaacgaattcccttaatacagggcgtttccaaaatatgtgggttttttttgttacaatggaatatttcagttcactgcagcattagatctatatatagtgaaatattgtgagtacactaggtgaaacatttttcgtggaacaaaaataaaaccaatttccccttaaaaaggggtttccaaaatatgtgggttttttattgccaaaaatatttttattcactgccacattagatctataaataatgaaacattgtaaatacactagatgaaatattttttgtggaacaaggggagacaactgggtgggtccaatggaggtacgcacgtgggggggcggggagcgaccgatttgttaagaaactttaggcttcgcccatgaaggcctggcccaaatacacttattgggcccatcaccgaactttctatatattggattgcactatataaagagaggaggaggctactcattgtacaattgattggaggattgaatagaaaagagaatctcatccctaaactttgtgtctccacttttatacgattacgggaccctcttggactacttcgtgtagctggagggttgtgtaatacgttatcagcacgaagctctaccggagaccaaggttgaaaaagggtaagaactcaacaatcctctttgcatctcgtagattaaattgcaaaaatgaaatccttgcatcttgctcgttccgtttttgtgactcccgacgaaaaccgccatcgccgacatggtgtacaataaagtgggccccactttattgtacaccatgttttggctcaaaatgattgctcatttctgagttcttggcccatccatccataagtctcattctcacagtgtctatttgattgatcgattgttgtgctgtcgattctcctccattttgatagcttctcctgcatgattagttttccaagcacatagtggaatagaatgttttatttgtgaaataatgcattgcaaacacagctagtctttatatattgggtagtattcatggttgaaactggtcgataacgaccgtcaacaaaaccccctaagcttgaacctttactcgtcccgagtaaaggacgaaaggaataaagacttgattgttgataggagttgttgcaacgctgtatatcttaaagatacagatgcaaggtatgtatactctctctaaaatcaaataagtttgacacggtggcttacccttacccctgattcccatgagacactgcctctccttgtcttgagcggttgtgagacagaacatcaattagagcactaatcacccaatctttattcaactatcattccggaagttttcaaatgattttgcaaaagaaagccaagttcctcaaatgattctctcgatcactcaaagtgtatgaatatggattcctcaccaaatttgcctttttgattcctactctaaggttgatatatggagctcggtagggatcaaacatggcatacttgtattcacatttattactaagttaaaaactttgactaaaatagatgataaatcatactcaagatcaagatcgtgcaaagtgtgtgtgaataatatggtggaaaactatgatggaaaataaaatgtggataaagaaaatgcttctcctttctcctttgtgcttatgcttttcctccaaaatatgaatttattatttttctcatagccatacatttccctctttttttttctttttttttgcaaaggatttttctttggaaaggaaacatggatggagagcttattcgtggataatgataacatggatatggtggatgatacggatgctatcttctagtgtagaagcttagcatatgtgggtgtatgatcttgatcacagagcatgaaaagtatctacacaagtcacaaggatttgacaaagtttaatggaattacaagaaaccagaatgtatatggtttaatcaatatgaatatttttggctttggtaggaatttatatcaaatgaggaactttcaaatttatcattttggaaaataaaacatacggaactcaagtcaaacttagaacatgatcatagcaactcttattttactatctcatatctcgcaacaacctagactcagatcagcaaagtgcagctcacttacctcaggttcccggataatttttggcttctctgattcaaattttgagacaatacttaaccatgaatccatatatgagagatatcaaacagagcaactattcatcatttcaatatgaagaactaagcatgtcttacctagcatattaaatctaacctatctttttggtatttttggttttgcaaatttttatgttgtttttaggtttataaatgcaatgcaaaaatttaaacatgcagtttgaaaaggaaatatgcaatgtgatacaagttaacttagtggggggagagacatctccccccaagcttgcttcttgctatagctcatggcggggatcaaatccctggtagcggtgaaacgcttgccagtcagcttgctgctgttgcactattgtgttgaagt

SEQ ID NO: 41478 - DNA, 620 bp, Oryza sativa
caagcctaaggaggatgcaaatgcttatttgcagcaattcctgttaagttgtagcacgtataccgtcaaaggactcagactccaactgttgtcgttctccctcctcgggagagcaaaatagtggttctacatcaccgtgcaacggtgaaaacccggaataagcactcaacggcattcctctcatgattcttcccgatgggcaagaccaacgctcttcatggaagaatatttggtttgcagcgaacgagggatgaaaccattcttgaagcttgggaaaggctgcaggaatgcgtcaccgcccgtcctcatcatgggatggacgagtggctcatcctgcagaatttcttcagcggattaacaacggattaacactctcgtcctgggatcaactggacgctgctgctggaggagcacccttctcaaagatggtcagagataccactgatctgattgagaagaggctctcaaatatgggttggagcgagaaacaacataaacccgtcaatgcggtatgcacaccgtcaatgagacggaaatgcttgccgcccagttggatctccttatgaagagactggacaacaatgagaaggacgccaagcggggtaccattaaggccctgg

SEQ ID NO: 41479 - DNA, 1197 bp, Oryza sativa
tcccacgaagcaagtcgccgccgcctcccacggatcccgccgcctcccgcggagcaactccaggccgacgaagcaagtcgccgacgccgcctactctcacggatcggatcggatcggatgggaaggggatatttgctcgccgccgatttggtagaagaccctatttccctcccctggacacttctacgcgaaaagacaaaattacccttccaccactccaaatattccggtaccacctcatgggcaaatttgtacctggaggtaccacagattttccaccatccgattgagctgattggatggctcagatttcataccggacagtatcgatggtacctgctggatgggagcttctcacatgagtacctccgctccgatgtttgttctgcatcagaggtggttgttgtggagcttctcacatgagtatcgattttttttggctgtctgacatattttataggcattttatatggtaatatgggtgatgaaatgggaaacatttttttgtgagaataaaggaccaagaagatgtacgaagtgataaaaaaccgctgggcgttggatctggaacaatgctctgaattaccatgcttgaattctcaaacatgttgctatgttgatgggacaacctgagtttttgatctctgctgtgtgataagttctgttctatgcagtgttcgcctaaacagccgcctagcccgtctagacggtgattaatcgctagtcggcgacaattgtccagtttataccctaggcagtgaattagtcgttttaccgcctagacggtcctagtcggtcctaggcggcctggacagcttggacaggacggtgcctgggcgcaattggacaatgggacagtgtgtctaggcggcgactaggtgatagaaatcaaaatttgggcacaattaaatttagaaacgccgcgcgggaccagctcggtatagaaggggatttaggttaccttatttgagagcctagagagagagcgcaacccctacctactcccctttttcacgccgccacgagcgacggctccgccaccgtgcccatcgatcttccaccgtgccgctgcgttcttcccgatctcctcctctgctgctccacgttcttccccctcctcctctgctactactgctctccctctcatccttcatccttaccgtcaatggaaggtggcaaacacaccaattgaagcag

SEQ ID NO: 41480 - DNA, 1862 bp, Oryza sativa
ctgctggctggcccaagttcccgggggtggaatttgtattgagatatttcaatgaatatatggagtgtggctgaatttgttttcctaaaacactgttgcagtacccagaaacctgttcaatcaacttattctggtgagattgtctcaaggtagcatctagtgaaagaactgctatacctatcacactagaatagaggttcgagagtttttgtgttaagaaataagaggctccagttacctgcgaaatttttttattttttagactttttattttttttaattttatagataggcctttcgaaaaaatatgtccgaatctgaaccttttggccactccagcccgcctggcttggccaaataactttggcatgccacgcgcagctggcatggcagtgctgtcctgtcatgctagcctcttgccacgccaccgtggctggcgtggcaaaacaatgctactagcctatcatggttacggataaggtatatctcctatcctacgatttatggaatatatggatacgacataccttcgtttgtacgatatatttccgtatacgatgaggaaattaacaagagattatggaaattatcctcacgagcaagtgaacaacagagtcctactcaaaaagggttaggttatactatatcgtgtggggtccatagtcaccgagttttacttggagactaaggtgattcatgttataaaagacacaccccttaaggggtccagatcatcgaatcatagcaccaacaccaccaccatagcctacaatccggaggacgtgaagcctactcgctagaagatctcgtcgaaaccatctcgacaaggatctcgctggtaatctcggaatcgttggttctctattgtaatccgtggttctttcatatcaatctcatatagattggattatggctattaccttacgaggggtctgaatcagtataatccttgtctccgggtttgcttgatgtcgtattgtgtagatcctcgtaccaacataccctataccctattcttccagtgtgctagtatcccccgtcgacacggagacaagaaatatactggttcagttttcggaaatatatattgtttatactagcttgttcaaacctcttgataggtaaatagccctaatccaatttatatgtatcgttcgatgatgtttcacaccgattataaaattagaagcaagctaactaatctaagcctaagtagtcttcaatgaggactaatccgatgacttgtagtcggcgcctcggcggctagctttaggtttcctcatggctagttggtgttcgatctggcttatggctatggtttataatttgatgctatgtctcaatggaagtctttgtatttatacgggtatgaccgttcaattagaacttgaaaactacaagtgggataggagcatataagaccttatattacacgaatcgattggattctgacatattgaatggcatttacatgttattcgtagaattcccatattatttttttaagccaatagaaatttcatactcgaatatatatatacccttccatataaatctaggtatatggtattttcgttccatataaagctatagagggctgctagctagggtacggcatcccgtctaaacgagatactttatattgatgacgttagctccgccaccactttatccgctcacgagtccaccactcagcgccgccctacgcgctcacgccctagctggcgaaggagcacgcgcgaggcgctaggagaaggccacagtaccagtagtggcttaggtggcaaagttggtccctgcaggctgtagcagcctggtgacccttgtaccaacaccagattgagaagaaaaggcatggagat

SEQ ID NO: 41481 - DNA, 811 bp, Oryza sativa
tgctgctccagtgctctgtgctgcttccccttcctctctccccatacgtgatagcatgcgagtgtggcggcgtttgatcatggtggctgtcagcggcgagccggggcgcgacgtggtggctgtcggcggcggcagtagcgcatgggacgagtccctttctcactatccagatctgactaaagaatagaatgcgaaaatacaaaaatatcccccgcaaaaaatatagaaagacaatatacccttcacaatctattatattattaaagaaatagaaaaatgagcctctacgttcgctggggttttttataaattctcacattaattggagaaaaagaaaaagcagagtccatataaaaatacaatttagaaatagctgaaattcggaattaaaaaataaagaatattagaagaggagactagagttcatatagaaatataattagaaaataatagaaattcggaattaaaaataaggaatattagaagtagagtagagtccatatataaatacaattaagaaaaaaaatagaaattcggaattaaaaaaataaggaatattagaagtagagtataaagtccatactaaaattcggaataaacataataaaattaaaagtagtgcttagagtccgtataaaaatataatttacaaataactaaaattcgaaattaagaaaaacatgggaagaagagtttaaagtcaatataggaatacaatttagaagtaactgaaatttaaaattaagtttagagtccacgtagaaatacaattagaaataatgaaaatttagaaattaaaacaataaatatt

SEQ ID NO: 41482 - DNA, 726 bp, Oryza sativa
agatccgctcttcgtggaagttgaagccggcgtttgggaaagcgagcaaggcaagtcacatcatccttgaacatattgaatcccagtttataaaattattttgatttaaattattgcatagtcgctttatttaaattgcccgcgttatcactgttttatttagccatgcctatttacctttgttatgaccttaataattattgttattgttattattaccttgttcaccctagattaaacaaaaccccaactagtggacactctactcatagtaccactagtataattttaggtagatgcttcgctgattaattaggtaacattaggcggttttacaactctagactttgggatattcatatcacctggacactttggaattgttggtttattgtggaattggattcacaccgccccctctattcaaaatccccaaaatggttttaggctgggctcggggtgcatggttttgatagtagcacctcagtcctgcctgcctgtcccggaggttctggccgtaggcgggattgggtcggtactcttgtctatggctaggatgggttgggaactatgtcacgtcttccgtccgtataccgtggtggtatgtggcacgtggttacacgtgaggaagatgtgtcttgtgggtaaagatgtacacctctgatcagagtataatctattcgaatagccgcgccctcggttatgggcaagccaagcatgtaccca

SEQ ID NO: 41483 - DNA, 514 bp, Oryza sativa
gggagagtcaagcatgcatatcgatggctccactctcaaacctcacatccctcaccagtttaacactaaagcactgtgttaacttaaccgtggatgggttcaatcctttcatcacatacagccaatactcttataaatagagaatttttacggcaataataatcatcgctgctccatagcaacggatatgttctcagaggtggcaaggaccaaagttatgcctgcaggtggctccttccaacagctggtacgacttgatgtggacagtatctcagcagtgtttgttgaaaccatttgtagcctcctcgctgcgaccctcatcgagttgagattcacgtctgacttgattacagaaagcttcacagaaaagcaggagcaggtacttcagctccttgcctccctccaatacctagaattctatgggtgttctcgcctaaagtccctccctaaagggttgcatcgcttttcttctctctatggactagacatctctcgatgtcctcaaaaagaatgt

SEQ ID NO: 41484 - DNA, 530 bp, Oryza sativa
ggaaatacattgcctgctatctgtatctataccactagggtttaattgccgatggtcatctttagtgcttcctcgagatggggagcatccaaattgttcttctgccacatcacctttgacctttttctgattccggataaactaattaccaaccaacgactattatgttctcaaatattgatgtctcctggatctccttaactgttggcaggtatatccgatcttatcaatgtagaggcatggcgggtacccttaggggtttcctccaacaatccttatcttgatctgtaaaaggcgtatccaaactcctatcctcaactactgtctcgttggctttttaacccaacacagtttaattgtttttcttttccatccacaggttggttattaactcgaggttagaatatagttcctctgacacgagaccctaggtctcctttgtcagtaaacaattatacacatgatcatatatccgcatctttcaaacgaatcctcctggaacttgtctgtattacacatttctccctcat

SEQ ID NO: 41485 - DNA, 1085 bp, Oryza sativa
gtactcctcgtttattccttagcccaatggtgtgaattataggcttgtttactcatattaattctgtattatcagcctatctatccacaagtctacttctcgacaacgtctgattgatcgttcatctattttctgtcgattctcctccatttatatgtgcttctcctgcatacatgttactagcatagtatatagtggaagtagatattttatttggaattatgcattgcaagcatagctagtcttcatacattgggtaatattgacggtcgaaactggtcgataacgatcgtcaacagcggtggccgttggccagcagcatccaacggctagtgctaacgccggagggccgggcgaagttaaaattgatattattatactgtaagaatttgctacataatttaaaattagtagactaagccaccgcataaacattaataaccttgtaaaaaaaattacatggttttttagtcacatgatttcatatccgtggagcattcttaagccgccatgtgacacttcaagaaattatggatatttctacgaatatttatactacttaaaaaatacgcaggagggatggtgaaccaatctagacgtactgacaccgcaccccgcgcctccccctctcacgaccccaccagcgcctcctctcacgcccgcacccgtgccctaaaaacggcccgcccctgccgccacgcccacaccgccgcccctatcatgcctgccgctgccgctccgccgcccctctcacgcctgctgccgctgctccgccgcccctctcacgccgccgcccttcgtgccgctcgggaggagttgcggcggggtcgagcccctcatcgccgactacccttctccgctcgcagccgccgtcgtagcgtgcgtcgtcgtcaccagacaccagcgatcaccattccctctgtgtcgcctcgccgtccgtccatactacacctctgccgccgagcagccgccgtcgtagcgtgcgtcgtcgtcaccagcgatcactattccttcagtgccgcctcgccgtccgtctgtactccacctctgccgccgggactcagggccgctggccaccatctcat

SEQ ID NO: 41486 - DNA, 878 bp, Oryza sativa
ctctaataaattagaaaagaaataagaaaaattataagaaaacaaaatatttggccattgatatacacgtagctccattattttcaaccattacattagatctattccaactaaaaagccatttaatcccttcgtatgtacgtatgtacacaagatatgtaaaaaagaataaaaaagaagagttcatatacgatctgctctatctgatagtttttttttctttaatttgaggcactaaagtttttttctcaaattgtgcatatatgatatatgtaatgacactcatggcaatcttctcgaagaagtcgtgtcgctgtggcaccgcttcatgccatcccaccaaactttttgaaagtattttttttactaaccatgtaaaaggcaatcgtaagcgctcatataaatgtgtgcacaccatcctatgaatacacatactactattcacaaaaagaaaatatacatacttagaataaaaaaatgtcacatggaaacatattatatccttatgtaattatgccattctcatataaaaagtgttaacagaaattaagcagcaagataaatttgtgacacataggacttgattcacttgcgtactattagcccatgcaaccatgcgccagcgtgagcttagatgctcatagctaaaaagaaaaagaagcaagaactccatattagactcagtatagtactgtgcaaagatggtgaaatagcacgagtcttacggtataaccaggaataaacgtgaatttggtttgaatataatagaccattgtcatttagtatataaaattttatggtttatttcatggtgtaagtatttctttcttttatgattataatgtaatttatagttattacagttgaatatggtgaga

SEQ ID NO: 41487 - DNA, 716 bp, Oryza sativa
gggggtatattctctgggtgattgtatgccgttgatggtgacagctcagtatgggcgtctcccccgcagtttatattcctacatacaatttcctggggttggatacacctccgtatcctacttcggttggagggttatgacaggttatcgtaagaaactcggcaacccggggtaactttgcgatgcatcgggagggcatagctatgcttaggcttagctatgctgcattgttaaaggggttatactacatagtgtatactagttataatatactaagatgttgtatactagaagtacaggaatggaacatatctaaactactgccacttagctataattaggagatgtaggagttagataaatccttagttgtgtgtcactctacccttaagcttaacttacccctgcatagaccttgatgtatataagtaatatataactattagcatagtactctcttatcatatcttcccttgggattaaacaaatacagtaccttagaatactcccgagtgaaatgctacaatggtatatccgtgcgcttgaggatcacatctgtaaccataggaaggcgaagaccgagtggaggtcggcgcggacgctggcggtgcgccaggagctctgccgggacgctgatgtggaggcggtcgacttcgaccctgatgacgacgacctcatggacgaggacgtcgccgaaaacatgccggcgcccgccc

SEQ ID NO: 41488 - DNA, 506 bp, Oryza sativa
ccgcgcttttatcgtgaggtatgcactttaggtatctcctgagtgagcctaagcacatcgaaattagtagacacacaaacccagaccttgatagggaagtaggcatctgttcttttgtcattgtagaggtgttgggcgaaagttgtttttccaattcctccagggccaactatgggcaaaaccgatagtgttccactcggaatattgcagttagtcaagtcatgaagagtttgtctaaagattatttccctcccaaacaatttatcctgcgtaatcgttgagctagtgggaggccgctccagggatgtatacaacattctcctcgcagtttggttaatttggagcaatctagatatacacgtacacaagtcatgtatgccctttaccactgacttgattttattggacatgtctactcgattgaatggcaagttgccaacctggtcaatgacgtcaccatgggagttggctgtatcttgcgagtcgtcggcatcatgtcgtgctcg

SEQ ID NO: 41489 - DNA, 929 bp, Oryza sativa
agccgcgtgcacccggtccaccgtggaccgtgagaaaaccgagtgggccccactcccgtggacccggtccgcgtgcccctcccctcggctgacgcaataaatccaattttagattaaaatttaaatgaagaaattcgcaaatattcatttaagagcatataaacttcaaatggctataacttggccatttgaactcggaattggaccgttcaagtctctaatttttccttaagaagtcaagaacccatttatgtgctttgttaatgctttttatatggagtttgttagagtaaaagccttttcttttccgttggtcgtgtagacgctgcagcttcggaggatccgctcttcgtggaagttgaagccggcatttgggaaagcgagcaaggcaagacacatcatccttgaacatattgaatcccaatttatgaaattattttgatttaaattattgcatcatcgctttatttaaattcccgcgttatcactgttttatttagccatgcctatttacctttgttatgaccttattattattgttattgttattattaccttgttcaccctaggataaacaaaacccccaactagtggacactctactcgtggtatcactagtatgattttaggtagatgcttcgctgattaattaggtaacattaggtggttttaaaactctagattgtggtaatattcatatcacttggacacattggatttgttggattgttgtggaattggattcataccgccccctctattcaaaatccccaaaatggttttaggctgggctcggggtgcatggttttgatagtagcacctcggccatataaggaccggtcttcgggcctctgttgcaaagcactaccgtacttccacatgtctagtgggtaaggcttagtttgtggctcagtctggttataaacaaa

SEQ ID NO: 41490 - DNA, 698 bp, Oryza sativa
aggtccaatttttaaaggtttggaacttctaaaaaatataaaaaaaccaacgataattatgtttgatttttaaaatagcaatggcaataaagagaagatgcagtggacggttgtagaggagtataatggcagcatttaatgggacttctaaaaattatacaaaagaaccctaataggacgataaactctaaaaactataagtttttaagatctaatttttaaaggttctaagaagaatgaatagaaacggtggtagatcaagcaagctaataaagaataatatgacagaagtaagtggtagcaacttatgtgacttttaagaactataaaattacaaacacgaggatgataagatttggtctttcaaaatctcaagatatcgagataaatttttaataaatcttaagtaaaatcatattaaaaaatatataattttatatgggtgctagccgcgcaattgcgcgggcagtttaaaaaactctgtcacgtataaccagccccagacgcaaccacggtggttgcatccaagcgaaggatttcataattaagtcattaatggccaatttggctctaatgggacttgttaattaattttctcctgattcttgccagctaaacccaccatctacaccttacccatgagagggatgggatggcatctcaatctatgggcgccgggcggttgatgaggcagacaa

SEQ ID NO: 41491 - DNA, 1191 bp, Oryza sativa
cacttcaagatctcctgagtgagttaaccacatcaaaatgagtagacacgcaaacccagacctttatagagaaatgtgcctctattgttttgtcattgtataggtattgggcgaaagttgtcttcccaattccaccaggaccaactataggaataactgatagtgttctactatgaatagtaaagttagtcatggcatcaagagtctgattaaagatgttttcccgcccatacaatttatcctgtgtaattgttgagctggtaggaggtcgcttcggtggtaatgcccttcctactgcaggatggataattttgagcaaattggatacaggtgtacatgaggcatgtatgccctctataaccaacttgattttattggacatgtctactcgattgaatgtcaacttgctaacatggtcaggaacatcactatgggacttgggtatatcatgtggatcatcggcgtcatctcgtgcagaggaacaacaaaaacatgaaagccagttaccggtggtatgatgaagagcatggcggccatggatgagcacttgaccacgaaggccatcgtctaccatgggagtggcctcatgggtgccgtcgatctggtcctggatgatgaagtactggagctcgtccaaaacatcctcagcctcgtcagcctgcttggtcaggatttctaggagcacccgtaggccatggttgtttctgacatctctctcttcggccgcgtcaagcagtccttgagtgtatgcaagatcggtcttgatttgctccatgttgaggccaagctctgtactggacacgtacgccgccaccatgccatcggacagctgtgtcaccacctttccgaggagccagctcgccgcaccgacggccacatccatggatggatctcctccgcctgcagatcgagaaagatggtgccagctgcagctggggttaattgggtttgagtgtttggtgctggacgtataagttgcagacttcagattggctctgagtccctgatgattctatttgtaccagtaaccaggcttgattgcttggatgaaacaaactactcatgtttgatgtctgcctcatgacgtcatggcattcgtcacatggctatatgttgattctgtgccaaaatcttcttgttcaatactgtccattgcctccaccaatcttttgtggttggtaaggacatgga

SEQ ID NO: 41492 - DNA, 700 bp, Oryza sativa
tttaaaaggattatttagtttatatggaagaagatgcatcgatttgttttaaatagccctgagcctggtggtgacgaagatgaggagccccttgatttgtgaatgtggtctaatgatattagttcgtcagcgtaaaataaaaggaatttgttgattgacacaactactcgaaaaatagaagtatccacttggagcattagtatagttaagtggtggtatcacccgaattttttagatgtaagcacatgcaatccagtaattacaaaaataagcacgcaacaaccacatttagatgcataggcaagatgctcacatgaagcacggtgcttccattgaaccacttgaccaacagactaatgggccgctgaattaagaacgttagcgcaataacccacatcaccaattggttaaatgcatcattacgggagcatgcatggtttaattgtgttgttttcatttcacaactcattgtagcatatgtatttcttacattatttacatatgctctacaatacaatgtgagctatgagaccaaaactattgctattagttgaagaaaaagaagaggattaatactattgggctgctcgcatgttagtgctagaaacaagaccgcaaaacccccatatactacttcgttaggtcctcttggtcgacccgatattgacagtggtcaagtacttgtgcgaaggtttgttag

SEQ ID NO: 41493 - DNA, 1579 bp, Oryza sativa
aatcggattcggtgtaaagttaagggacctcagatgaacttattcctatttctggcgttggaccgtaatagtcagatgttatatgggccgattaggcccatagcttgtttcctttatcaattaattccaagagtgcaaataagcaagcaaaatattccatcaaaatattccttggcgggtgttgcagatctgctgcttggagttaacctttctagtttctaatcaagctagatgtgccacatctgatacagagagagcttcttggcagtgtgaagctctggaggtgctttaaaaattcttttttgaaattcatcagggacaatcacgtttcttgcacaatatcaattattcttagactaatagctcttgaaactctactgtttctgttgcatcagttatctggtagcattttctaccagctgaacacacgattctacgtacattttaattccaattttcatgacaagagaataattccttttgatgtaacctacccgatctcctctctgaaagcatattatctgtttaaattgtaatcccgaacgatcacaattaacaaatcacatctcatttttttcaaccggcaaacattgcccctatcaataaattgcatgatccacactttttatcagtaaaatcaagtacagaaatcacaaatgccagcaacacttctacaggaagacaagagcatgttcaaccagtgccattggcaatgaaaaggaagcttcttgcattgctccttccagtttacattcacatcaaggaaccaaatagctggtagatcagagtagtaaaacaccagtactggctcatgggttatctgcatgatggagtataaagtaagtatagtgcactactagtatacaatagcaattaatatttagcagaaaaagagtgtgcatataggtaaagaaggtatttttattgaattgtttaacaaattggtcaggaagacgtgtgaagaacagatcaaaagcattgtttcttccagggaattgattaagtcagatatgctgtagtaggagactttccctgctcgtgcttgtggacaaccatttgtaatgttcctaaggtaatcaaatcagctatacaaaatataattttcaactccaactaattatgaaactttgccatttaaatttgcagacaaacaaaaacaagttacatgttacgtatactgtatacagctatggccaacttatatgtttagattaattatttttttggcaaattttgctacaagatatcacgactttgtggttttagctgtagggcaccgcacgaagtcacttttggggaaagacactctcaaaatgtggttatttgctaggggacacttcattcattaaattaatatttttgtgctgactaagcgagaaggggcctacttttttacatggcatgaccaaattgccctcatctctttctcttcctctctcttcctccttaacagcgaggccgctactgaggcattgcaacggtgtgtggggacgggcgtgggcggcggtgcatgggcgatgggcgcggcgttgcagcggcgcgtggggatgggcgtgggcggcggcgcgtgggcgatggg

SEQ ID NO: 41494 - DNA, 629 bp, Oryza sativa
agatacacattctaaagtcatttgaacaatgataaaaaatcaaatccgatgggaaaaaacaagaaattgctagaacatgttggacaatcgccatgttttcttactgtgcgcaacaagcctaaccttggcattatggaaactttgcagtaactttgcagtaattagatcgtggatgttctgtacgttgctttattgggagtgatgaccaaaccatttgccacacatagcttgtttttttcaagagaattacagttttgattaaggagcaacacccaaatgattgtggagctaacctcgtttgtctctatttcatcatatgttatgttacagttttgattaagcagtattagatttagatgagagcaactgtaattgtttatggttctggtaacacagtttcatggtcattagtaggagaattctttgaccttattaacttgttccctttcagcaaagcattgtggaatggtgttttttttagcctattcagaaccagttttttacataatggaagctttattaatctcagtaaatttcatcaagtgatacaattattctgagagcacattcggcttctgcaccaaagagtaccacacagccaacatgaaagaaacaaaagataaactcat

SEQ ID NO: 41495 - DNA, 1973 bp, Oryza sativa
tacctgtggtcatctctcttactcgtgaattcacctattttaatgacagggcaactgctgtagggttgttgctatcgggagtcttccttgagtgacacaaatcatggttctcgttatcctttatcaatcacctttcgacctacttcttttcccagtaaccaaacatcttttccgatctcttccattaatcacctttcgacctttctcaaccaggtactcttcactccgggtgttgaggatgcttctggggcaatgaggtgcttgggcgtgctgtctttcagagaaaccttgaagtagttcgtcaaaagctagactgacgattgttgcctttgatccgaagagacacatctgaaactcttagtccaaacaaatgcctctttggttgatcacttgattttcttcgccatcaatcgctaggctatttgattcctaacagattatgggtttacggaaatgagaccctaggtctccctaatcaacaacaaaatgtgcacaactcacagcacttgcactcttaacatggatccttcataagcttatcaaactcattcattatctcatgtttctctgttattacatgattgacggggaacaactataaaacaaaagtatttgaacactgatataagagtattatggttgcttctgactagcgctaggcttatcaggtactgtatttgctccagtgaccacttggcgattggcatgtctgcttccttaacaggtactacagtttgtaacagacaataactttcttacgctcgggttcttcatcttgtacttgatttctttggctgctgtgcacgggcgggagggcggctcggcctggaggggggggtgcggcttgggccgggcaggccgggagggggggggagagacagcccgggagagagagggaggagggtgctgggccgaggggaagggggcccaagaggagggagagaaggagagggagagaaagagagggaggaatgggagacttcggccgcgggccgaggggagagagggaggactttgggccagacttggcccaaaggaggaaggagggttatttttaggtttttctttttaataaactttgttaattgtttttgttgcttaataattatttccggtgctataaaaattcaagtaaaatttgagggctccttttagaccaaggagaatttaacaaaaattctccgggccacatttgaatttttcttgcacgtattttagtgtttgccaatttcttttcgaattttaattaattctattattccttttagcgaatgatttttaattcgggatgaatttatcaggacgtgacaggagggtcctcagcagaaaagaaaaacaccaatgcgaaccgaagatgaagtccgtaagatgatcattaccagcacagaatggcctccaccaggaatgacaaaacgtcagagaagaaataccttccgaggtgcaccacagttgacagagcatcttttagctaatggaggtagagtgtctgatagtgaagattcagatcaagtctcctcagatgatgaagatgagaagtctccccaaggtttcaaccagaataaaatggaacgtaaggcatgctctcgttgtggagaaatcggtcatgttgccagctcgtgtgccactacatgcgttcattgtgaggaagaccatccacccgacaggtgtccaacgagcaggatcacttgtttcttttgtgaaggaactgatcatgtaccaaaagattgtcaattcagtttgctgctgacgaagaagatggccaaccaacccgccagttccaacggagagaagcatcaagatggatgaagtcgggggtcgatggacattctccagggcaaatgaaggctacacgagctgcggcccggtagtcgagatgtcatggcagagggttggtgccctgctgctagggtgctcagtcctgcctgcctgtcccgggtgtcccggccgtagggggattgggtcggtactcttgt

SEQ ID NO: 41496 - DNA, 645 bp, Oryza sativa
aattctcaaatgtttgctaaatgctgcttttgcaaatgcaaccctattatgccatcctttgttatcctgtgcacttgcatatttgctgcgtggcttgctgagtatgtcatatactcaccttgcaatcattcatcagaggaagagttctacaatgaggctgatggtgtggaggattaggtgtagccttggtcaagctgcctgtggagtggagccgtctgcgccgtttatttattttccgctgcttagaactttattgattgagaggaactatctacctctgtaatgacattttattcgcttattaattagagtaatatttgtactctattatcaatttgttattgtgtgcctcggctgattcctggacgagggttcacacacatgtaagcgtttggaattttggatagaaattccgggcgtgacacatgtgaggaagatgtgtcttgtgggtaaagatgtacacctctgatcagagtataatctattcgaatagccgcgccctctgttatgggcaagcaaagcaatgtacccaagttagtgttttaattcttaaaatttgctcaacaactaaatgtggaatggttggcctgggttggcttgagacgagctgggactcagggtcgggttgctagttcggactgaatc

SEQ ID NO: 41497 - DNA, 691 bp, Oryza sativa
acaacacgggatattacactagattcattaatatgaatataaatgtgggaaatactataatgatttacattgcgaaatggagggagtactaattacagaatgctatgcccctggttgcatcctttcaacgacggcacaggtgagttggttactgatgctgatgatccttttcgactcgccgacgctgacggcgtgttctcaccaatcaccccgctaacagaacttttaaatatgacgacctaacaatgttttaaaccaattgtatagtaacatgttatattatggcagcgattccttatacaaagggatctgtggcacacattcataggaggatcagatgtaggtttttctgtacgaggtgtacgaggcccccggtatattccagacagaccgtaagtggcgccgcctggaaaaaccggtccaccggggccgggtcatcgcccgcacgggataatctctattatcccgtgcaggcatcttaatacgaccgcatgtgataatatctgcatggctcgttaagtgaaccgcacagaaaaatcatttttcgcgtgcgggcctaaccatacggggcggaacctataagagatccgtacacaaaaatacccctcccttttttgccactcactcactttgaattttttacttccttcttccttttattcactcatctctctctcttcctctcctctct

SEQ ID NO: 41498 - DNA, 1947 bp, Oryza sativa
tttattaaagtcaaagtaatttataatctgaaacagagggagtatctattagtgggtctaaaattctacctacctgatgcatagactgattacataaaaacaaccactacacatgcttcgaaaacatgtttcgtctatttttttcctaccacattacctaaaaccattagatctcattttaaacttttttaagtttatttcttaaaatatttaatttatttatacaatcaaattgatacttcactgtaataatgtgctcaataatctaaattaaaacgacctaatggcccagagagcttaaaatactaaaagttgctggttggtaatcggcttctaagaatttgaaaaaattgaatttcccagtttctgatttctagttcattttgtttattttacaactatagtttctcagaatcttaatgaaaagttgactgtttatgggagcttctgaagaagctgcatctgtcagaacttagaagctccaaaaacatgctcttagtcatcttccttttggattatgtgtcaaatacattctttcttcacaatatatgttttagcagcgtctaactgtatggtttatgtcctttaagtgtaaccccacgttctcatttctcttctttaattacgttgtatatgaagaaatttcctatatgatatacaccctccgtttggatattttggttttgtccaaagtcaaacttatttaaatttaaccaagcatatagaaaaggtatagtagcatttataactccaaattaattttattaaatctatcattgaacatatttcaataataaatttgtttggaaatattactatgtttaatataaattgggtcaaacaaaagaagtttacttcaaataaaataaaaacatcttacattttgaaatagagagaatagtccttagatggcattgtagtgggttataataatctccatgggtacaactcgttttatatttcaaagtggaaaagtcttcttttctctaataaggggatattctcttattttttgcatgccatttaaatagttatgaaaatttgataatatagatcagcacataatatatcactccacgaacatataattttaaatttgatttatactccatccgtcccataatataatggatttgttcccagctaaaaacaaacctctctagtctaatagcaacaaacaaaacgaagattgatccccaaaatattgaagaaagcctgcagatatctaggttggaaagcgtacattccctttgtcagaggttagtggaggaggtaatggagtaggtgtttctggtcgtggcttcggtggtactggtcacgggacgggaggtgccatttatagaaaagattggctacaatagcactttatgcacttacttttggctattctacatgggcaaccctgggaaatgggcttcattcaagtcttggtcttttcggattcacttatttacgtgcattttcttaaggaaagagcctatctacccaaacctgatagatggatgtaatgaacctagcatagcgaattcttgaagttgaatataagaaagaaagcctacaagtatagaaagaagtgctagtatcaaataaacataagtagttgagtcagcataagtagtttattgcttacgccctttgcttcttctttttctcctagatcctatattgcttcccccttatagtaatgattttcaggtcagtttgagttacacactaagctgcttattacaaaagggcaactcgcttacgatccaacatgccaagcctggtagcagaaaaggcatgcaacaaatacctagcttgaaaactagagtataaagtagtttagtgaaaaggaaagtagtttagaaattgttacaagaatgaaaacaaaaactattaataaactgaatgcaacaaagaatacaaagctaacacccgaggaaggaccgccgctcctttcatatg

SEQ ID NO: 41499 - DNA, 1388 bp, Oryza sativa
gccgctaggactgctgcttttgctgctgcggctgctgccgatctgcttgtgctgctgccgatctgccgttgctgctgcttgtgcgttgctattggctgctgctgcttgttcctgcagaagaacagcaaggaggaagagaagggaaaaaaaagttagaagaagggaaatttggggaatttggtgaatatttctaacttctttgtttttcttacaaaattagtactgctaggtaacccgttttagtccctagttgtttctaatttatatataagacgatatgtttccggtagctctatttttatcgaacgctaggctgaaaccgtattttcaattctggtattaaaccatcgggattcaggttagttgtcttaaataaagtttgtagtcatcgtcgatatctttctaacgctgctggtttcacttgattccaataaacggtttaggagaaacaacagaaacagtactgctgaccgggtccggaaatcaggacaataattcgttttccttaatctgggattttcagaggcataatctgattttgtgctccacatgaaagttgtagacaattttgtctagatgtccgaagttgtattatttgctagattccgttagacggtttgtgagttacacataaaatagtaagggaacagctatatatatttaatataaatcggtaaaaaactatatattttaggtttcgattttagtaaatgtcccttgtaactatcattagttgaatatagtggtttattatgcgtagttttgctccataggtgtgtggagggttgcaacgttgaaggagttgagttggattatcgatgaagttaaggcaagtacaagacggacttgtgtggtggataaactgtattgctttgttggtttcatttacccaattattattcgaagcttcctattatcaattgtgtggttttggtattatgctacatattcatatttcacttcatgttcaagttcacgacgttattcatgtttcattcttccggaagttttttttacattattcaagtaccatgcgtggtcatgggaatgcaatttgaatctttttgtttacattattcaagtaccatgcgtagtcatgggagtgcaatttggatctttattcatgatccttgagaagcgctgatcacgcttgctcggcttaccggtaatgctaagaggatattcacacctgcccgggagggaactactaccttttgtctccttcgttttaaattaaaggaagtcaaatgtttcatattggttttcttattgcattaaacctgtgtatattttactagttcaatattgtacttgctgagtattctttactcactcttgtgtttaatttggttttcaagtacctaatgatattgatctgcatgggacga

SEQ ID NO: 41500 - DNA, 684 bp, Oryza sativa
ctgcaagcagttcatcaagataaaaggtctaaacttttttccaaaaaaaaaaagtattacagaaagaagagaaataaaacagtgaaactaggtcattaagtcatccgtgaatggtatgacatgttttgaactccctacgaattgccaaaacatctattcacacgtttcaacgagtacccaaaaccaaccatgatcatcatagtcacaatgcaacattaataacccctaataaccaacagagctaattgacagtatctgagcttatacagcatgtgacaacatgaaattcctaacagtacatgttggagttacctgcaaaaacaatatgtagcagaaggcaaattgcacctcagagcaacactagtcaaatgcactgaactcatgttaagtcccatcactctttggtcaaactgattggtcgatcggagaaatgagcacaaaggcatcacataaacgctcagcctagccacattatcaccatcctaactgatacttatgccgcattaccttactcccaataaaagaataaaatatcaccaatcttatgcaccaaaacttcaaaacctgaataccgcaagctgaaaggcaggcgcccatgccatcgacgcaaacccctgcagaaatgctaaaccccacaaaagtgcagcccagacccaaagcacaagtaggagccctaaactacag

SEQ ID NO: 41501 - DNA, 581 bp, Oryza sativa
  unsure (1)..(581): unsure at all n locations
gggggttgcaaggtgcggncggcgcgcgtgaaggcagtctggggatttcgcgtgggctttagtggattcgggcgcttttgggattattttcgcagctgcggggtgtcacgcaggcttggctttgacgaggaggaggtttgttttatcgttttgccccgcttttgattgcgggacgagttcgctgagccggaggaaggatgcgaaatcggtccgccgctatcgacccaagttgttggggtcgtctccgtggggccctgttgcagtgagagaggtacgtcggtttttcaaggagtactccttacacaggatcgcagaaacctatcactatcactctctatcagttgtgcggttgtgccatcttttgggggctgtgttgtaaatggcctggagggaacaatatgggtagttttgatgggctttctaatgggctctcaattacccgtctacccaattaaatttgccaagaccatcaaattggaatagctccactttaaccccctcaaatataggtctaatctaattcgtatatctcaaccgtaatgccggatcttgaccctccaagtattgatgaacgactgtac

SEQ ID NO: 41502 - DNA, 563 bp, Oryza sativa
ttggtgctagacaccaccgacgacgggtagcacttctccggcgtgggcgggaaacagcacaacttgatggtagacgcaggcgcagccgggaagcagccgaagttggtgctcgacgccaccaacgacgggatgcacctcgccggcgtgggcgagaagcagcacaacttggtgcttgacgccgtcaccgacggattgcacctcgccggcgtgggcgggaagcagcacaacttggtgctcgacgccggcacgggcaggaagcagcagaagttggtgctcgacgccgacgacgatgggttgcaccacaccggcgcaggcgggaagcagcagaagttggtgctcgacgccgccgacgacgggttgcacctcgccggcgtgggcgggaagcagcacaacttggtgctcgatgccgccgacgacgggtttcacctcgccggcgtgggatgccgccgacgacgggttgcacctcgccggcgtgggcgggaagcagcacaacttggtgctcgacgccggcgcgggtgcgaggcagcagaagttggtgctcgacgccgccgacgacgggttgc

SEQ ID NO: 41503 - DNA, 1128 bp, Oryza sativa
tacccccttgcatgcatgcaaaacacattaagctagccacatagattgatagatatatttaatatgggtataataggaaatagtcactctaattaattactcattggtatttgaactcttaactaaagcgtcaattaataaagaaccggaggactagtttttaatatgtcttcaacctattacactttgaccattagttttttccatatataatacattatcaacagctacaaaattaacatcataaaaaatattttcaaatacaaatatagtggcgctaaacatatatatactcgctctgtttttaagaattgacgactttgactttcccatttaaactttgatcattaataactcttaaattattaacaaacattttaattcttatatttaggacataacataatttaatagcatggccttatttctagtgtttgtaaatattaaaaaaagatgagtagttaaagtttaaaattgtacaacgctcacagttattttaaaacagaggaaatacgttgttagtttaattatcaatcaaaatttccagatactgattttcctgaatattgtatataacacatacttccttcgtcacagaatatagaaatctaaaactgaatatgatttaacttatggctataaatctatacatgatatgtgtcctgattcatagagtcctatccgttcatatatggtgtcttcctggctagctgcacatccgaacaaacgtacacactgtctcgccgtactacggccggtgcatgcatgcgatctctcgttctctcacgtacggtctctgagtctctctcgtgtgtactgtgcaatacgagtactccagtgtgtagtggtaggctagctaggattgcaatgttgcagccaaaggatggatgcagctagctagaaaagggacaaatgctgcgtgaaatggagacaaagcatatggttatgtagcaggcattaattacaaatgtatgcatgcaatgccagtaggccttttcaggtctcctttggaacgatatggaaaaatagaggaattttggagggttgttggttcctatgaaaaaagtttatatgtggtcttttggaacaaaggaatagtttctctcgatttcttctgaaattactatg

SEQ ID NO: 41504 - DNA, 1397 bp, Oryza sativa
aacaactgtggcagtaaaccaaacgcatatctaacaaactgtggtagccaaaagtgtggccaaccaaacacccctttagtacgtactaagttgctatgtttgggacggatgaagtactatttaaaggaatagggatagattatttcagcaaagattaagaatagggataattattttctccagtcatattgttagtcaaattgtaaattttgaattgcttggagtccccacaaatcatttgattacctgaaaatgctatactcagtgctatagaattagtgtcacagaaatgcttatgttacatacagaaatgattataattgtgaacggagagagtatatacatgttcttggaaaacctcctccgtcgttgcttggtgtaagtgtaatttgtattttttttcttaggtttaccttttgtttgtcaagatttgtcacttgatcgagaagtggggtttaagccctcgactgcgaacatattcctagaatacaatgaaaatgataatcattaaaattttataatcgggtaatagtgttacttatctcttcccaaaactagcaaggtcgaattttatcttcggagatacaccaaaacaaaaattccaattgcagattggactgcacttttttttggcctaatttgttatttgagttattttggttaatttcttcatgtcaacttacacggttactcctatatatgtaagatttttaaagaaacatttgtaattatttgggtcgcatgcaaaagaaaatgatggcttaaaacactttccagttttattggcactccatgtatgcgtacattttgtttattaataatttatgatgttcccctgcatagtgaatatatcaggcaaattctggacaactggagtaaaaaaaagaacatattatattgtcttggcaattgtgacttttaaaatttaaatagtgtcgcaaaacgttattcatcaccagataaaaccgatcggtccgtaggatcttgcaaaaaaaaaaaaaaaggtgttgctgctgtttgcagcaggtcagactttaaagacttcttgaggagcagacaccacatgggttttgtttctaacagaaccaataatatgggtggttcatatgtgcaaaacggagatggttcaggatacattcacttataaaatcctaagctaggagtagtaagtagtaaccacttcctccgtttcacaatatattctatttaattcattaacatcaatataaatatgggaaatgctagaatgacttatattgtgaaacggagggagtacttatttattatatactccctcctttcctaaatgtttgacgccgttgatttttttaaatatgtttgaccattcgtcttattcaaaaacttttgtgaaatatgtaaaactatgggctgcagga

SEQ ID NO: 41505 - DNA, 1333 bp, Oryza sativa
tgccaatgccaatgctcactctgctagtactctggtagctgatcaattattgtgcttctgcagtgggattggtcataggatgggccagcaatgatcagctatggccttgctagtacttccatgatcatgttgttcttggtgtacatgagatgacagtttttacattcagatatggttcttgagtgggtaccaataggtataagaaaattatagtaccttctactacttctcaaggatcatataatcactcatataagaaaaaaatctttgattcaaagcttgacatgaacaagactgtaaagattatagagcaaagaacagagctggttttcttcacaaaaaaaaaaacccccaaagaacagagctggtgttgtgacaatcctgaagtacatttcatgaccaagcatacatgaatgaaatgttctcttgttggacagtagatttcaaccctattcatcaatcatcagggtattgtatcagaacattttactacaagctagtggtagaatttttctgttgtgttattccacagactagcttcagttgagagtgcatgagcctgggtagtgatgctgcattgagaaaagcactatggaagatggtccagatcagaaagagagctgagtgacaaaaatgcagagctgctggctggaccatggccactgcaagtccaaacagtgccagcacttaattgatggatgaatagcacaatgggtccttcttctcttgtgggtgaaaatctctgaaaactttgggtctagacctctttgaccatgacctagatagggatcaaagtaattggggtccctcattctagtagctatcatctgaagaatggatagacactatatattatatggccttattaactgccatgctacttcactgtggtgggggcactctagccatgcagaaacttttggcattgtctaagccattttcacctcaggtttattcctggcacattctctccggtgaaagaatttgtaactggatagtggctcaataattccttgctatcaagatgaagcggctaaattatatacaaggaatatattgtacattctccatcccaacatataatgcgcctacaatttttggaaaatcaatatttgcaaattttggctaataattaaaccaacaatgtatatagttagtgtcatcatgcatgtgacattattagatttgtatctgaaagtacttttgtatgttgtctattaataatatactccgtattatgaaaacacgaatggtcaagagactgtaaaaaaacgtatacttttttgcagttctgctaaagagtattaaggcatgttccttttttactttggct

SEQ ID NO: 41506 - DNA, 3030 bp, Oryza sativa
gaggctccagcatccatgcgtgcatgtccctgaacacactaaaaaaatctttcatctttttggtgttcagttcaagcttctaactctgaaattctctctgcaattgtagttgtaggtcactgtccctgtagtctgcatctttgtgtgcatgtctacttgatggtggacaggtggatatatatcgatcaatcgattgatgcaaccatatgcccctcccatctttggatttcagtgatcacatcatcaatggaatcgctaattgcttttctttcacaaaagtagggaggggtttatctgaaccaacagagtattggagctaagcatatgtactgattcatgcatggatggaaatcgttatgaagtgtcgaattaaatttaaaaatatattgtttgttcgtttttctcagaaatattcaggatgcaattttttttacagaaatataccgtcgatttcgcacaacagttatacgaaaatgacacagacatgacgtcgcgagcagtatcgtactgtgaaagtgcgaccacgcggtctcacagaatggtcttgccgatggaaacagcgacaccgtctcgctgatgaacgtctccactttaaaggtaattaaacactaattaaccatttgaatcactatagcagtccggtatcgttgtctggttcagcgaaaccgttcagtctcactcttccattccgcgagaccgtgcgcgacgttattttcatgcaatgattgtacgatatcgacggtatatttcaataaaatgatttgcatcccgaatattaaaaaaattgaatgaacagtatatttttaaatttaattcatgatatgtccacacaaggctttttgcgtgtttcatctaaggaaagaaatcgttacgaaacgtcactgacaaggccgggctcgcaaactgaaagagagcacccacctgtttgcatgtctgggcttcgctcacagtgtcttctttattactccctatgtgtctaaatatttaacgctgttgactttttaaacatgtttgaccgttcatcttattcaaaaaatttaagtaattattaattctttttctatcatttgattcattgttaaatatacttttatgtatacatatagttttacatatttcgtaaaagtttttgaataagacgaacggtcaaacatatttaaaaaagtcaacagcgtcaaacatttagggacggagggagtagaactaaatggaaaataaaaagaaactttgtttgtagatggatcactttcctcccatgagcactgcatcttaatttcgttatgatgaaattaggacacgatgaggcaatcatgtcccaagcctagctagcagtgtactgatcccctttgaaggctagatgcaaacctgtcaccttgatggaaaattacatctggcattagggcaaccacaattgtgggcgggccaggtgtcgcttagcgaggtcatgcttgttttcttttatcatgatatgaagagccaaacatgttgtgacttatgagagccatgcattagctataatggtgacaataggcaagtaggagtggtggtagtacaagtagttgttaacttaggcacatcttcacgacatgaaatgtagggccagatggttaactaagactgcacaacaatcaaagtgacactaattattggtgcttgggtatggaaattaaagtagagtggtagtatatgtgtggataaagatggagagtgggtctggatcagtaggaatttaggagaagccttgcattggaaggcacaaacccaagaaagaagccaggttttgagcccactgatcaaactttggagacaatttgacatgctctaacccaccagcttgcaagatttttatcattgctctcagatatgttgaaaaagctttaggccggaatctgattcttgctggcccccaagtggttgtaactgatgaatcatgtaagcaaacaaatatggttgtctccaaagtcatagtggaaaccaggaataaagttgtggcagtgattgaggttaatttctcattattagaaggaaaatgtccacttaacctcatgtagtttggttggtcgcgatcgacttaacacctcaagtatgaagacagatgtgaaagggcatatagcctagtggttgcagtgacctgagtagcaccctaagatactgagttcaaattttcgtagaaatgaattttagattaggctatttgagggctaagtttctatttttttttaaaaaaaaagatgcatatatcatcctctaaatatgagaaacagttcaaaagatgttctatcctctaaatatgaaaatcagttcaaataacatttatcctatcagaaagaaagcttgggggggtgggtaaaatggttaatgcgtttctgcataaacaataccatccacatagaaaaactactcacaaactcatccctaggggttgcttaaaccggttttcatatattttcgggtgaatagtcagcacggtctttaaagtttcactctatagtcagtttagtcctttcagttttaaatcgtccaaacaaattcttcaaatttatcatttgatttaagatagtccttggacccataaaaacgccgtgtgggtgtgccactcattcttgcatgcaagggtagacatcaaataaccattctaccatatataagtatataacatggtaaaaagagagaaaaaggaaaaaataaaacaaacaaaaaattgagggtagaatggttcggcctcttttggttcatttcttttatttccttttcttgttttatcatgatgtataagggtagaatggttatttaatttctgtgcttgcatgagatcaggaggatgtggcatgcccatgtggtattttcgataagtctaatgatcatattaaacaaaatgataaattttgagagctcgtttggacaatttaattaaaacattagggagtaaactgaccctagaataaaacttcaaggaccgtatggtctgtatcggttgatccaccctttttaagtagcatttgatgtaatacaagaacctaacgggactat

SEQ ID NO: 41507 - DNA, 881 bp, Oryza sativa
tcataattattcatgggtcaacacagccatgatcagacaatccaagggggtttagtagctgtgcgatgtaatttgtaatgaacaatgaccaagatctagcaagtgttgtcttcagaaaaggattcaggcagccgaaagggggtgaaaagtgcactgaaagaacatctttttctatgaaatctggaagaacttttgtctgtccgtggtccaaggtgatgaaccagaaattcttctaataagattcttgctgacgctttatgcggcaaatggagagagcaataactgtaaaagatgcaggtcttgcactttgatgacgatgtcttagtgctaattcgagttggatttccaacagagctcaaaatttcgaatttgaaccggctgccctgccataaaacattcacttcaattccgggctgacatcaggtacacaaatttggtgaacataactctaacattgcagtaactcctgtttcgcatcacgcacagtaaattaatatcaatcctgcagccatttgcagccaataagatgtagatctgtttggggagcgagccccatcgtttgacatattagagaaaaaagcgaaacaacaatgtatatttgtaaataaaaaataatttataaataaaatttttacatacctgttcttaacgatctaagagcaaagactgaaaaataaactacgataaaaaaaaacttcaaaatcatttccaaatttaaggttgaaaattcaaatcttaacggataagtataagcataaaaaaaaatgaggctgttgattctgagaaacggatggtgggaataccagtgggtgagaagaaaccctcagcttatagcttctaatttattttttttagattttacaactagattttcttaaaat

SEQ ID NO: 41508 - DNA, 5718 bp, Oryza sativa
ctcgtgcacttgcagactctaggtaccaattgaaccagaatcatatgaaaactcgaattttttaaaaaaaataaaaaaattcggtcagattggtactagaatagaatcacctgtcctgctcttcttgaccgtgcaggattccctcctggaaaagctgctgctcctccactcatcctctcctcctcctcctgctccagttcagattattctcatcatcagagaacaaaaaaaaacaatcaaaatgcccgaatgtctcagcaaatttggatcaccatgccatccatcacaaaccaacccaaaagaaagaaaaaagaactgaaaaagctgggtcctttgaccagcagcagcagcagtgcaagaaaacaaaacaaaagagtgatctgatctccaagaggcagacaggaggtaggagagttggagtagtagtagtagccatggcccatgggggtggcagtgtgggccccacagctagacacactctgtcagtgagagagagaggggcgtggctagctactgttcagagttcatcaggctcactcactcactcacctctcctcccaaatgcagcagctgcatcatcgccatggaagtcataggacttccccctgatgttgaaccacttcagcacaaggctcttggaccatgacagctgcatcagcatcatcatcatcatcaacaacaacaacaagaagttggagaagatttggtaccaaaaaaaaacaagaaaatctgcctctttgcaatgtctgaagatcagatcatcagagaaagcaagaataacacgcaaagaaactcaccttgctcttcttggcgccatctctcattgttcctcaggggagaggcaggcaagcactcatgcaggcaggcaggcaggccaggacaagccaaagagagacggatgcttctctgctcagccacgacgctgctgttgcaagagatggcgccacaggtgaaggtgaggcagagacaagcaggggcactgtttgtctttctgtgcacagaggttgtgatttgatggaaaagtgcagagcagatagagagagagagagagagagagagagagagagagagagagagagagagagagagagagagagagagtgactgcagcaagagctgtttgggctggccaaagaaagattttgttattggggaggaagatgaagaagaagacgaagacgaagacgaagacgaagaagaagaagaagggaatggcttgtgtaggagtaggaggagaaggtgagcaaagtgcatgcgatgctgctgctgctactgctgctgtctgctacttctaggaggtaaagggcctaaagcgaggtagccgtctcactgtctccatttctagagagagaatgagagacagagtaaagttagagtgagagtgagagaggggataatattattattattatatatacagtaaattaccagcgcgaaacatttcaattctctttcgagtcaggcaaaaacagaaggtattctaattctaatggctgaatttttgcattcatttttgcagattgctcattgtttagtgtggccagaatagacgaaacggcagtgcaattggccggacacgcaagattaggggaggccgttttgttttgctaagtagctggattattggacgtacggctagtgttgcttcagctgctggtgcttcagttacaggggcgacctaaacaaaaaaaaccagccgactggagatcagttcatcagttgggcagaaacggccaccaccctgaattttcactggtttgtaagtgtattgccgtgttggatttagaacttgagtttctaaatggcatctactgagctgaaagtagtaggaaagtaggaaaactgccatggttttttcggacgtgaatgtgcgccggacggttttttcccctaattctagcctactaccttagtaccttctctgcaacccacataatctctctcttgcacattcgtctactcatgagtcatgacaaacagctccactactatttaaaccaccaccttcataactagtggcggagtcagaaattataaaagactagggataaaataggacttaactaatgaagtgttggttttcttcaggatttatatggtatttaacaataatttaagcacggttttaaaggtggcctagggctcaatccctagctacactaggcatgtctccaccctattaatcgtagtgttacccctaatttctttcttatttgacaaaccttcacaataggtttttttcttcatacactttcccgtttctagtcactatcgctattgcctcaaccaccaccctggcaccattctcaatcttacaagcatgttattggatcatttcatagttggttgtattgtggttgccaacattgagacacggattttgtttacaaactctataaaggaacctattctcgaacaaaaatgtgcaaatcaatcccctgggcaaaaaataaaaaaaatgcaaaaaaaaaaaactataaacttcgttaggccttctaaacacaattttgcattctataaaacttacatattcaaattacattccttttgtttttgcatcctagttgtcatagaacatgtcaagatgcaccccaaaatattaccagtattattaagacgtttttatggttcatgagaattttttagtgtaaaatttaacaccttctcaatgtaaaaaaccagaaggtagtgcaaattaacactaaaattatggtatcttctttaagagacataaaacaaatatttttaacagattgaccgtattctttttttggcaaatgtggccgatcgagctcaagacaatataaattaccttgaattcatgaggtcctacagccctaccttgtgaccaaattaagcatgcaacggggtcgactgcacgagcggtcgataaagatggctaatttctctaaagcacacaatctagctaggattagacccccaaagtaccctagttagttattaatcaaactatatataaagtacattcctggctagagctagcttagccctgctgctccctttgcaaggacaaagccagaggccttcctgtcttgtggggaagattttgaccaaggtcaatggattattaaaggattgatgagcctaattaggggatcaagtagggcattaaagtaattaagaatgattcagtgcataaaatgtgtcagcctaatggcaggccagagctagtctgatcagggcctagattacatgaaaaggccatcctgtggtcacgcatgtccctccccaattgacatatgttgggaaattaaaccggacccatgccatatatgattgtattacattcatttccgagcatttgctaactagattttgtaatagtcttaaaaaaacatgtctttttaattctaggtgaagctgttatataggagtatgttttttcccgcgcaatttcatattttttgataacactcaaaagttcaatatatttcacatggatattgaaggataaaagaaatcaccatttttttcactctaaaggtctagaaattattgtgttaattggaggaaaaataggaacgaaacatattaattactagatgaatacccgccgcgttgctgcggaaaattaagttagataatgtatataaataagatgcaatataattattaaaactaaaacaaattgatacttataaattttgagcttaaaaataattaagattgtatggtgttatgagagaggaaagaagagacaatttgaaccatagatctatcatctaaaggctagaaataattgggtggtgtggcttaataagataagagagaaatagcattaactacacttagtggggatgaactatataagtatataggatttggttgtggtggatctagattaatttataattgtgtagattgattgatagagttgtgtaataaatgataattgcatctaggaaaacagaagtaacctaaaagcttttgatgaaatctaaatttacttctaaaatatagttttatgcaaaattacatggaaagatctacttcaattaatccaagctatagaaataaaatcagcaacggtctcagtcgaacaaggagttgctaaaatatatatccttagccaaacatgcataatcctctctatgctttatagattacaaaattgtaaaagttcatgcatgctgatgtatatatattgattaacttaagcatgcacggtgctagctactctagagggggtaattagggcccagtgggatgtttaattgagctgttgagcgtgcagcacccttgcttaatcgatcggagagtctatttggagcttatttaggacaggcatgatggcattgttcaagtttccattgagcatgttttttttgtgggggcagtcaaaacaggatctaggtttgcatgcatgcttttggcaaaggggtccctctatgtctttcagcttttctctgctttgcagccactctccctcccttatcaaatgggtgtaggatttgcactcaacctctccttgcaaccaccatgggttgtatatgtatataacacatgtcccatatcagttttgaaaataaaatatgaacaaaccaaaacgtgatcttctccgaaaaactgatatggttaccacaatgatgtgtctgaagctagatataaacaggtcaagtgacagttattttgtttgttgtaaggatactggtcaaaatttcaaattataaacaaactgtatcccaaaccacttattatatatatattatgacacaggaaactgagcatattgttgctagctactcccttcgtcccaaaaaaaagccaacctagatggtgattttacaccatctaagataatgaatctggacatatagttgtccagattcatagttctaggtcattcatagttttaggtggtgtcaaatccccacctagattgtcttttttttttatggagggaatagctaccaggtactacctatagcttcgtataacagttgtgcagccacaataagctcatccaaacacgctaattaacagtctcgtacacattcccctctagatctcccccctctctctcccttacctcattggtgtcgctgtctagaagcctagcttaggtgacagtgatgtgttgatagatggactaactcccaagagcctaactaagttaaccaagatagagagattgatatcaccattgatcatgaggccccatgcatatctctgccattctctgatcacctcgatcatcctccttccttgcactgcatgcattctttgagctttcttccaccctaatccccaccctttgctgtctttccttccttttgtcccacatgcatgaattccaatgcaatgcaagccctagctaggggcatcacaaccccactcccctactagctacatcctccgtcccaaaataagttcatttctgggcttctgtgtctaacatttgatcgtctgtcttatttaaaaaaaattatgaaaaaaatttaaaaataagtcacgcataaattattattcatgttttatatctaataacaataaaagtactaatcataaaaaaatttaaataaaacggatatcaaatgttagacacagaaacccgtagataaatttattttagaatggagcgtgtactacacaactacacacgtctcctctctctcctctttgtgcatgcattgcatgggacattaattccttccttgcatgcagcaatggagtggggccctttctgcatgccgtgtc

SEQ ID NO: 41509 - DNA, 8239 bp, Oryza sativa
tgttttcctacttctttaacccaacaagcacattctactaacttgtgccaaaacaggggcaaatgtctggttaacttagaaaatacagggacaaaaataaaagcaaaaaaaattatgggtttacaaattgcgatgtacgtagagaaagccatgtatgtgggaaacgcaaattatgggtggatatagaaaataaaatcttgtgtattattttatactccatattgctacttgattatttttcttatattttctttcctctcctgccctttttttttttctgttctaaattagtatcattttggcctcttggcctgtttggcccgcttcctgatgcaaggaccagccgagctagttggccacttgtggcacttggcctggctcagcccaattggcttgcctagagctgattgagtatagctcagtcatctggctctttttgcggaaaagctaatatgtgcgcgctggtggtgcgtgtttcgggctcgcgccggcacgcgtgcgcctcctccaccttatttttttctttttttacagtttttttttttgcttttttcccccacttttttcgattttttttatctctagcatgttttgagttgaaaattttaatttttgagttaaaattttttaaatatgaacttgaaagtttttaaatcttgacttaaaaattttaaaaacttggacttgaaagttttcgaatcttgattctcaagttgaaagttttcaaatatcaagttgaaagttttcaaatctaagttaaaagtttttaaaatttgactttaaaatttaaaacttaaatcgaaagttttcaaatctaacttaaaaaattttcaatatgttagtaatgaaatctcccaaaaaaatctccagaatcttttctaattaatatcattagtgttaactatattaactaatatagttacttaagactagggggaggagtgctcgctgcacgcgccagctagcaggccttctctgttggctatctcccgaatcttgacaggtccaaatttgttataccaagatatgtatcagccatatttaagtttttttagatggagggtgtataagtcacttcttataaatgaaggtagccaaagagaaaaaaaaaccattgttttcttatccaacggtcgttataaactgcaatgggctttaggcagcccactgcagggatctaaattgcttcacaaatcgattttaagcccactggcggtggaacccatttgggccttgggacagcgcttgaccattcgtcttattcaaaatatttatatcatgcttaaaaacatttggtgataaatccattaacaatagaataaatgataattatataaattttttgaataaaacaaatggtcaaacgttggtaatcaatgacgtcatacgataaaatacggaggaagtaattgcagtgtaactacgtataacttgtatattaataatagaatactttcatagctcagttggtatcctgcgcgtggtgtgaacaagatgtgttgggtttgattcccatcaactgagaggtttgctaatttttttctcagctcagcacgaatcttcaagtacatcaaacggttaaaaaatcccagcacggcttcaaacgttgaaaaatcgaaagtttcaaccaaaaaaaaaagtatcaccagtcttttagcaaaaccgtaaaaatattaggaaatgcgcccacaataatccgtcatccgttggcttaagaagaactgaggacctcacctcgccatgatgcgactacacctctagaaaaaatggccatacacacaactggactgagatcctctgacgttacttccctatgacttggtggctgacatgtgggcccgagagtgatgggcccacatgtcagtcatggtaaacagtaacgtcagaggatctcaatcccacgcaactatacagggatcatacgaacacaccatgtgcgcacgcgagaaggcgatcgaatccaaagctctctctcgtcgcgtgccgaaaggcattttgttctcgatgcccaaattccctgtgcaattatctctacctttttatcatgtaaagctttgtcaagtatttgggcgtctcctagcttaagcttagtcgtctccatcatggtgggacccaatcagatgcacatctttgtctggccatgatcggacccaacctttctggcattaatggagatgatggtacttgcaacgccgtgggtcggtcgagttgggcttggatcttctgctcggaattcttttatcgattgagattccatttttcccagcttgggagaaaagagatgataaattattggaaggatttcttgtgaaaacctctcttgtagtaatatataggtgggatgcgtatcacgattcgtgatgttgtcgctgggcctgtttgtcggtgactgtttgtgtttatgttctataaggaattttgattgtgagtaagcgggtgtttttttttcttttttttttaacatatggggcctgtggataaaggaggcaacttttagatgctaatgattgtgtttaagcctgagctattttttactgtgcactaagactgtactggttgagctgctttttttgtggccaattctttaattctggaaactgatggggtaacaaagtctttctctgaagacttgctgccaaagcaatgggaagttactgatgacgttttctgaccggcaaatgagagatttcaggcctggaaaagccgcaaccccagctatctggggccatgccatgtgaattgtgatgaaccgttatatgccgttggatcgaaatcagacggcggtcggccgctccagatgtgcaggggaggatgatgactaggtactatgatggaccgcttccatgatttcagagacagtttgggggagacatggtgcaatggtagaggcagtggaccattgcaaactgatcattctgattcaggtttggggtgacagaagtaatatcattgtctgatttgtgtgcggctttcttgatcctgataaaattaacttctgttctgatttcagaagttacaatgatgttctgtcagtcattgcatgcttgtggttcttgaacagatcactgtatcaaattctactactccatcagttaggagtaacagctgttggaatctcggccaactggcttcttgtcttgctctgcttccttgatcacatctttttgaggaacttttgatcagatttgattagatggcctggtctctctctgaagaaaacaaatgcccaattcagctttgcagtgccaattgccaagctgctattattgttcttaaaaaaaaagcttttagaaatctatttcttgctgctggcaaatcatcaagaacccccaaaaagacaaatttccacaagcaattcttgcacagagacctcaaacacccacaaagcagtttgatccttggaagaactgtagtagactccaagttgcatttggattctgaagtctggtgatttttaagtctgaaacaaaggcctgttcactttgatgccaaaaaaaaacttatcaaattttggtattgccaaaattttgatagaatttcttatacagttactaaaatttgacagcaaactaaatgtagctattttttttagcaattttatcaaaatttggtaagattaaaaatagcatcaaagtgaataggcccatggctccatcaagcctatagcctagcgtggcaatccatctatccacgctgtcagattagctagaccggcgcctaatcagcctctccaagctagtaagaaattgcagccacttgtttggaaggaaccaaaatgtcagaatctttgctgatggtggctaacgactgacggcagcttatcatctgaccaaccaaaccaaccactcttctgctcatcatcagtttctttttattgatttccctttacaaaattgcgggcagagaaaagtttacttgtcatcaagtataataaaaaaaaaccagttggtacagtacaacatctatcttggatttctaccattgctgaaaaatgactcgaaaagaaaaaaaaatattgctacacgtactaaatttttcttactaaatttgttcgaacaatcgtctcaactgtttgattcaagcagatggaagttataaaaaatctagatacactcatagcatgacatgtcagtgttagtaagaatttagtaaaaaaaagttagtacgtatagacttttccaaaaaaaaaatcatttcatccgaagaactgctactcggaaacatgacactgacactgtgacacagccaagaatagttcatctacatctctcgactacaaatttgcgagcagatgatgttgagttgtgatgaaaatttatttgcacataataaaggccagcttctgtcggagcgaatcggaggcccgtcattgccggaggcttgggccggaaaaatgaatcaaaaaggaaattctcatttcttggattttcaacattgctggaaaaatgaatcaaaaaggaaattctcatttcttcttctgaagaagaactgctaatctgaaacatgatactgtcacagccaagaacagtgttcatctacaaaggagaaaaaaaatattaattttctcttgctgcaatgctggcatcacaaggatgctgtggctgcactcgctgagggtggggcccacatggccgccgcctggcggcgcccaccggccaggctttaaaattccaccgcgggattaaaaatgggtttgatttagtgtgagagataattaaaaccgtcgttatcctggggtatccaagagaagaataaattggttcaaggtcggaaacggcggcacgcagccactggagaaaattttccagcgatttgtttttgcacacccgatcgattttcgcctaccatttcatgtagcaaagttaatcatccgctctattatgtataagagtcttccaataaaacaatgtgatgcacattgacaatgatagcatcatgattagaagatactagtacttctctactattgttgaccctcgtagcaccgttaattttatctatagaatttacttaaaaaaatctatatatactaaaaaaagagtaattatgactgctcggatggcctgtatattggcgttgtttttaccttgcgagtacgagttacagacaaatttcatccaaattctatcagaaacgcaattttgccataatttctacattaggaacagaaaaaggtatgcctttctatacattgcagcatactactgaacggaagcaaaagctccaagcaacgtgaaatttgtcacggacaactctgcagccacaaggagctcacatggggatcattactctgccgcgtgtcttgatctccggattagactaatcaatcggataaaccagcggcctacaatgatccaatcgaagcaaatcccttggtaaacggcttaattaattattaggagtagacaatactaccagctctggtctggaatggactctggcaacttgtcctgatggagaacccaagaaagaacattgttgagtgacacaatcacagtggggaggcttggaggttggatcacatggacatgacaaaaattaatcatattggttactcaaggagtgatactgcattttagtagtgattaaaaaaataaaaaacatggcacaaccaaatgtcattttaaaggctgagatgaaatgtaagcagtagaaaaatgaacgaaacttatttttaagataaaactctatatctgtattattactggtttaaaaactcgcaatgaaaaataaacaattaaaagtcccaaaatcaattctaatattaaaatttaagaaaataaattttaggtgcatataattttaaaaccaataagacaatggaaaccatttgataagctcatggattaaatccacaccttcattgtactctaaaaatttctacatacgtctttattgtactctataaatcttgctggaaccaccattaatgtagtgcttaactgcttactaatgagctacatatatactttgcttacacacaaaatcatagttaacatactaaccgggtaatatgcacatgatgggttacgcattaaaaaatagtatgaaacgaaggatgcggactaagcatgaaaatgcttagtgtgagagcaaagttacggtgcactttatcatgtagtatcatacaaagttcagcatgctttttaagttttctttacttatctaaaagattcctgtacaataggaaaatgccacaaagggttgtccataacatgaaaaattctgttcaattaaatgccaaaaaattcaagacaaaaattcaaacacccccctataaaacccatcatttcgattcgaatcaacaaaaaaaagctaacctttttcagtagtcaaacaaaagagaaatgccaacaacccaatacagagtttgcttaaccaaaaaccatcaattccaaatattaaaaccgttgcaccagcatttagttttagatttcacccaaataaatactccaatcccagtaatgacgcagttattcccaaaaaaaaaaaaatcacagctcatcgcattagtattaggcagcaaatcaaatcactggaatcactcactgctcctgaagaaaagtttccccttttttattcttcttgctcaattttttttttctctcttgttgggacctaccaccaccttcagtggtaaggcagcctttcttcttggtggcatcgaagcaagcactgcacagcgcagagcaagaagccagactccagactgtgagagaaggggaggcaggatgggttgaggaggaggaggaggaggaagaaaggaggcgacttggtggatccaaggaggccactgcttttgctttgctgctgctgggattccacttggtatgcttctcttctctccctttctatatcccctcgatttgcaggattggatctttggtttttcttttctgctccggttactggtttattgatctttgtttgttggtgcttgaaagatccgattttttttgtggttcttggtggtgtttatgtgatttgtttctgctggggaggaattgtttggtgttgacggggtggtggtggtttggtttggttggtgggacaaaagaagagcagtcggtgccaagcctaaggaatgtttgtgtggaatttgatcatgtgatgaatttccttccccccggtttcttgcccttttcttcttgatgatttggttggattgcttggttcgtggttcgtacgatctcgtttcttcctggtgttcttcttccgtaacatcgctgttcgcgatttcctcgaggagcttatggaattttgactctgggctattcttctgttttggaatcctgcccggttttaccggtcatcgttgagagaattctgtgtttgtttgcatcggaggatgggaattctgtgttattagaggataaggtggctactctggtggtgtgtttgcttttttgtgcatgcaacaattattttttcttatttttcctcatcttattgttgcttgatacatttttatgattcagtttcagggagttgcgacctgccagtgtatcttcctgccctttcaattaattggagaattagaacctgtaagtactactctagactactgttgctcatagctgtgtatacaacttgtttagttgatattatctgtaccatttctgtttctgatattgtaggtacaatcattgccaaattgcagtggctgttctctgtgcctttcattctcttaatttcggtttcgctcctgttctgaagagtgggggaaaaaaattaaggcagttcttagctttgggagctgcagaatattgcattgttgcataattcaagtgctgaggaagtgaggtcttaattattgtttggagttttgcttttgtggcaccaatggcggccttggtcggtcatgacgcgaggcagtattcatggtggtgggttagtcatatcagccccaagaactccaaatggctccaagaaaatctcaatggtgggtcttcttctgtgtttagctcatttagtcatgtttatgcatttctttgatccatatcatgaaattgtaattagcactgcactttatatttgctcaccaaaccgtcagtagtatgctattctttaattgtttctatttagcaatacatttccaaggcacatggtgtgcatgcaaaacactttttcttttttttatccccgtcctgattagccttgatgccaggttcaacacagtctgtatctaatttagcatttgagtatgcatatgattttttaaataggattaggtaaataa

SEQ ID NO: 41510 - DNA, 3168 bp, Oryza sativa
ccgctggatttgataaaagatcttggcgtccggggtgatctgggccgttggatcgggtgtgggaggctcgaatggacggtgatcgtgcgggggagggggtggcttggggctgaggagtggggggctctccggtgttttggggttaatcacggatgtgtgccgcttggggagttgggttattgagcacttttgttggagctaatccacttggtcatttgtagaaagatgcttatcaaaagtgctttccttttttttcttgtaggggtaatccaaagtgctttctaaacaagtgtttgctaaagtatcctcaatgagcaaatactacctccatcataaaataattgtaattctagattctttagtacaataggtggattagtagttgagggtaaaacaagaagaaatttgaatgaaaaagtaattaatgagactattagtactccattgtgacaattaatttgggacatattcaaatcctaaaaatacaaatattatgggacaaagatagcagtgatacgtaactaagcaaacgctaccagttatttagtttagaataaattttatgagtcacattttattatcgaagtttcgatttggataacattttaaccaatatttttatttggatcatattttattaccgatgtcggtcgaatttaatcctgacatggaagttagttttccccttttccctctttgcagaacttttttttctagttatttacaaacagggaggaacgcgaattgaaattaacaaagagatggacttgaaagaacatttttttcacaagttattctcaagtggaatggaaagtaaactatctgcaatttggctattcatgtccaagttgagatttccctatagttgtaaattttgtcttaaggcaaattttgacataagacacttaaaattgttatactttgctggtaaatattgtaaaaatgtgtgatggttgaaagacacctgaaaaattgataatttgctagagaatacttctagcctgatcaaagagaaaaactctttaaaatgacgcgaatgcccctaaaaccaaaagcttctgaactgacgctggattgatatgatgtatgctagcaatgtgcatcggatgatagaaaatttagaattggcttgcatcctcatggacattctcatctatttgaaaatttcttcaattggactaaaagtgtcatccaacaaattaccaaaatttgagggtgtcctcccactgcagcatgtatttgtgatgtttgccaacaaattacatacactataagtgtccttttcttaaacactttttaagaaaaatcttcatccagggcggcaaaaatcatgagtcacgtcattttgctagttcaacagtgtcaagaacatgaatagtaaactgttgtacattgaccaggttaaggataaataatgataacagatcagaatgtgatcaggtactactagtaccatgactgtatttcaaagacttcaattgcactaaacaagaattttctaaatccttcctgtgagtctcaacatcggcaagtaaagccacacgtcgagtatatattcctcaccggcactgcacataaagcaacactacatcgacttcatccgtgcctctgaattctgattctgggtgctactttacagtactgaatatataccttgtgttttagactgtaatccatcagattacagatgaatccacttcaaaaatctctcaaattagttaagcataccaaagtttaattactctgagacttttaactttcagcagtggcactggcaaacactattctgaacagtaagcttttggccatcaactctgtcaagagagatgggcagcttttgaccagatgatcaaatccatcagccccttcatacaccagggtgggggcaccagtgagagagatcggcaggtcatggggccatccgaatcggtgaggtcagcaaacggaagttcactgcgacaacgagatcggcgttgtcttcgttgaggacagagaagaggggatgatgcgaggctgagagtgtggggggcgaggacaaggggcaccatcgacaaggtggaggtggtcgtttcctggtgtgggaggcgattctggtgttgacaaagtagacaggaggtggtcgccaggtgcttcctgcatgtctcaagcttgccgcatcgtgctccttgctagctcctcgctgctcgtctccattgtttacaggtacgtcatcctcagctaattatcaggtaccagacttgataggtatcaagcctgatacccaccggtattagacttggtacccaagtatcagccgatacccatagttatcaggtgccaagtaccaggtatcaagtatcaggtgccaagtactaggtattaggtatcaggtgccaagtactaggtatcagttatcatgtcgcgaggaggaagcgcaggttgtcactttctagccggctagttagccatttaccaccgatttctcctctcctcttctccctcctctcctattctccctttctctcctcgacacactccctcctttccctactgttgatgcggctcacgaggggaggagccaactagcggagctgtgcatcacccgtgtatgaaagctgccatggctactccagctagatgcaacgatgcatagacaacgctgacgagctgtcgggtaggaacctggttggggaaggcgcggtcctgctcaaagtagttgcggcggcgctccgcgccaccgcaggcgaggtattgcccgtggaggcgcatgataccgagtaggctcttggatggggaaggcgtcgccggcgaggtttttgcgtggaggtggtaggtagggggaatcgtgtggatggcgtggcacttggtcgaaaatggaatgtattaaatcggccgagggtgtttagttatcccgtgactttcatgttgtaacagaatcccatgcggtagctgccctctttgtttagtgtctttcaggaaaactatattcatcctttaagagaatatcccattatttttacatttcacttaaaaaggttatcaaaaaaaatttagtaagatagattaatataaaaatttagtaagatagattaatacgtgacatgtcacttcacaaacatgcatattcaaattcaacttatataagtagaaacaaaacaacaaatgggactatgaataaaacgcataatt

SEQ ID NO: 41511 - DNA, 699 bp, Oryza sativa
gaaaaaggctactggtcacatttcagccttccttcactctgcaggaaaatgtgttgctaccccctttccctccttttgctgttctgagtttctctgaaggaatagtgaacaaaagacacaaaaggctctgtgttgctggaatctgcagggaggttttaaattcttgtttcctgtgtttgagcatctttcaaacttcctcagcccattatagcttagcacaattggaggtagcttctgcattctggaactgttcattgatcaattgcatcttcagtctctgagaatgtgtgcttctatcagttatgcactcatttatgatttatcatgagatcttgctgcaatgagacccaaacatcatgcaatctctcttcctcacttaggggggtcctctttttgacacattctttagaaagaaaaaaatatatgaggcaaaattaagtgtctgaattttcaccatgaaaggtagagaattcagagaaaaggcaacagcattcctaaaaactatcacatctcagacgtgtatgtaccaatattattccagcaaagcctcagtaggccactttaaccatgcacgttggcagccttacaaattatacttcttttcacgaaaacagtgcttagtagtagctctaacataaagatgcgagtactctgctgtcttaaaaggtgcatacaacgttcttgtcactgacagatgga

SEQ ID NO: 41512 - DNA, 5233 bp, Oryza sativa
atagcaccctgatactaggtagggatgaaaatgatcaaaatatacacgaacaattcccataaccatttttttttctttgaaacagaattggagtggtagagctggaaacgatgacgatattgatactaccggaacataaaaaatatcgggaacataattattgaaatagagcctctgaaacaacatatgtatcaagggcaagcaagtcatattcaaatttaattaaaactcctcattttcaaaatataaggcataactactttttcagatatttcataatatatggtgggcatgcatgtatgcatgcaactaactagcacattctctccatcaaattattattatttaaatcatttactctcaagatctctgatttggatgcatgcactgtatttattagagtgatccaaacgaggaggtgataataaatatatattgtgtctacagattaagggtggttatgccttatattttaaaatgaagggagtatgtgaagactcaaattaaagcattaagtaactaacttgaatattttataacgatattaatcataacatctccattaacaacacagggttatggtaatcggtaggtttctcttatcctaattgtttgtcagtactatacgctaatttcttcggaaattccgaatgaaaatggtataccgtcaaaatggccgggaaaaatacctctacaatttttgttccatttctaaacaatacaaaatcagaataaaacgattggtaaaaaaacagaaacaacagccactatggttgggcaatctccgtaccattttcaccactaataccaggtatgactatgagggcaccggctgaaggatagttcagcatccatcagcatgtgagcagaacaagaaagaaaagaagagaagaaaagaatgaagaataagaagacaacgacagcgaaggttgagttatatggcaatttttttacccatcctttgggcatggaaatgactggagtgaaagcaaagagaagacatgacccttgatatgagagaggagagatggatccatgcaaccctagctatctagtctcctagaggcctaaagccatccatggcagcaaggtggccggcctagccgaaagcacaaagctcagcagtacattttttgcatggggccaagccaaaacgatctcatggacagtgcacagcaaatgatgctagtttggtgaatggtgatcatgcatatggattgaaggaaaaaaattgcaaaatcaagaactagagatccattgttcattccaaaacagagctagtagattttttccacacaattttgcacgaggctggttttaaaagtagaaatggattagctatacaaactcttgcttttgttttaatcaatataattgtattttgtatgtaactaaatcaattaaatctctgttacaatctaacctaccacaatcaaacgacattcttacccttttcttctgattaaggtgataaatttttaggcattcagagagaacatggtatttcttttcctccatctccttataatatagtaatggaaacaagcaaccccatctcttcgcttatgcatatacttataagctaatatttgagttttaatatttaatttacatcatagtttatttgtacatcatttgtttttgaatcgctaagaacatgtatataaaagttttacatttattgattgataataagccatatgagaataagcacaagcataagaacgatggggctatccatccacggatccaccatccacattccctaacctgccctgattttgcatgcagttctgaattgattatgtcttctgctaatgattggggagtgccacaaactgtcatgactcatgagctgggggctgctgctcttttcacagcatcatgtcctagctgccctgataactgatctcacctccctcaggtcaggatcaaaaagcccctcattctggtctctggccatgcacaaacaacatagcctcatatattgatttgcaatagctaccaataattacattgcatggcatttatgccttgtgattaatcttttttatatcttgaagaaatcagtagcatgggaataaaggaaggagatcttacatattggatcggaaggcaatggagtgaaagtgtcacgcaaccaagataattagcttgtgatcctacttttaagacaagtacgtgcaaaaacaccatcaattggctcacaagtacgcatgcacgatgaagaacaaaagagcaaagtgcttattattcgatccggcacgaatctcgaggcacggaaagtagtgatatcagcacgacagcacctcaccttcaacttacagccttccaagggaaataaatccatagctcatatccgctgttgcctcaacaagaaggcctactgctacttcacaaatactgcattcttttctccaacttagctgtagtgctttgtcatgaagaattatggatcaaaatgcacctgcttttgatcaaatggtaaatgcaatttgaactacatgaaaagaggacgccgcgaaaacaaagcttcagttggtacccatagccaaagaacatttcaggagcaccctagacaaggcaaccagcacatcagccttttgggttgaaaggacttcggaatcggaattggagaagaacttgtgaagtgaagcccacctttttttttttttttggaaatgggagttttgcttggagagagagagaagcagccgggagaagcaactgtagggttttatcctctctaagagcaaggataataatacagctagctgcttactgtatagatctttatagtctatctcttaactcacttatatagtggttaactcttcactataaatatatggcccacctgtctgtatcacagattttcttggctcctgcgcctaagccgactgtaaacttacaccccgcttctcatctctctcctctgctctctcatccacctcagcattcagcctttttatagccctcttacttgctctaatcagtctaatgtatggagaaacttcactctgcatttctgttgttcctggacagataagaacacatcatgcatgttagtccactagtaaatagtaacactcaaaaacaggtttgcactcgatatttactcttgtacacaaactgcgtttggttcttgaagctgcatcaagccaccaaccatcttttggtggtttttacagacaagagttccaagttaattgttagcctgaagaccttagcatactggagacaatctacctagtgtgcatttgccaggcaatacctcagtacatatttgataacaaactagatctttatgactgctgcaagtagcacaaactaagttttttcttttaggcaatgcttataaattggcagtttgggaaagctttttgtaaaagtgaactcagctggattcatgcattccatagttatctacagtacacagaacacactcatttgaaaatgtttctcaaaaatcagcattaagttaaaaataaacactaaatatagtagtactgaactttataataaaatatccttaaaattctcaataatcatattgcgctattgtaaacggttaactacatggtcgtgcagttaagaccacttgagtagcagcattgcagcacatcaagcttcgagtggcagattgtgaagataataagagcagtcagatcaaccaaaggtgtaacttttattaccacggctatgtacaaaatcattatggtgagcattgtgctcattgagatctcccctaggcactagctagctatttcattcatgttctggatctagtagttgaagtgacattgttttcaagacagttccttttgtaacttgacttttccgtctaatgtgcaaatatgttaaaggcatctgcctctggctgagccaatctctctttttgaaagaagataaaacagcctgcgtttgttgatgaaggactgtgcaccaggaaggaactatcaagagaagctgtcaagaaagatatagaaatacctttatcaacaaatcgcccctttcaccaattgagctcatagtgtttgtggctaagaaaccatatatttcatatgcaccaggcccatttggaaaagaagccttctgccttcatgtatgtcactttgtgactggcaaaaaaggaagaaaatttagtagatactactaaagttgttagtatatgaaaaaagtaagtgcatttgaagtagtagtgcttgttaaacattttcatcggaaattaattattaagagaacagtaggggaaaccctatagtaatataatataaaaagcgcacagatgatctacaagactgacaaggaaacttaataaaagcactaacaacgcctaagctaacagcacaaaagagttatggagtaaggcctgatctaagctttagtgcccaatacaaggtacataaattgttaataattatggtgactattgtttgacgctacatatccatgccacaatgtcatgcttgacgcagatacattattagcgtcacagtgtctctgatgcaagagaaataaaagtgacgctaacgagatagaagatcaggtccagaatggatgttatattgataattgtagtcaccaatatttgggcccatatgttagtaatgactttttcttgagatttgaagtggtttttcagtacggcgcttccctactgggcactatgcaaatggaacaaatttaggagaataccacaggtacaccataatatgggaagtagccattgctgtctgaggtgttcattgcagcaaacagaacaacctaatatcaatatagaatcaagatattatttctgattatgaacctcactagcaggaatttacaaaatatcttaattatgacaagttgtatctgtcattagtagttgacattgcgaattaagtgtgatgcatgctacattgttttgaatcagcttttcctgttattatgctacaaatcaagccatgataaatccccatgctaataatagaagagattcttacaaacacatgatagcagtagacatgtgcaatgaaatacaatattttcaatgaagcaatgtatcataaatgtatgcctacgtatagacttatctgcatagttaagttaaggggtgcaagacattgaataatccttccaattttagagcagaaagatgtgcaccctattaatactaccaatccttgttatgtaagattttattaccagaggtttccatacagtggtgtccatccatacagtggtagca

SEQ ID NO: 41513 - DNA, 684 bp, Oryza sativa
agttaattgttctatgattgaagtcacaagactattgcattctttgttcagtttggaggagattttcagccccaagcaaaaaaaaaaaaactcattaacacatgattaattaattaaatattaaatataaacttaaaaatgaatttatttatttatcgaagaacttatatatatatatatatatatatatatatatatatatatatatatatatatatatatatatatatatatatatatatatatataaataaaagaacgtatcgtttaatactttgaaaaacatactaacggaaacagaaagttgtagttcgaagttaaagaaaagaataatccggagttaaaacaattttagcacaatactcctaatttaatcttaaaattaagttataattcaaaaatgattgcagcttataagctaaatctgaaacaaatagaccagctaatctgaaacaaatatgcgaagtattgcttaccacatgttttgtacttttaactatagcaaagtcaagacaaataattaactttacaaacatatgaaccgtgctgctaaaaaatcgtcaagccgtgctgctaaaaagatgtcgcatcccttaggtacgacaataaacgtccaacaccctaacatatatatgctccatcccttttccacgagtgcgcgtgaaatttagcgaatgatatatc

SEQ ID NO: 41514 - DNA, 1313 bp, Oryza sativa
ttaggggggcttgtttgcaaaactgggtgcatgaaactcagtgaagtgtgctctaagcattgaagtcactcatgtattatgttcttgttaacaacgaaatattgcatcagattcggattagaagaagaaagattgaggtggatttggtgtggaatcgagttgatctccaagttaggctacgcatcggctaagtatcgtatcggctgaagaccggacaaaatcttgacttggttgatatagcaagcagacgatacggtacaacttgggcttggtttgggcctagatttagataaccgtcatttccaataatagatagagcccaattaaggcaattgtatctatttattagattagtttaagtcgtttgtgactaattttgataagagaccactgtatatggtcttgtttatattttatctttagaaaagtttgagtcatatccataatggactaagtttgtactcagggtataaatatagacctcagagctctatagtacggaagacaatccaatacaacttcgatgcatcgccaccctttttattcttattttcggcgagttctctcgacaagaggtaacccgtctcgatgtcttgtgctatcagcgctattatgtcgttttagatgtttagtccttttatcatgaccatctgttatcatatgtcttagttaatatagtcttagtatctcaatttagccttattggttggttttcgctttaggattcctaccggtatcggctaaattgccttactagattagattagctaaggtatttaccatcttgaaaaatggttaattcctagattgtttagactttaggtttctttacttactttgacatgcatcatctctagtcttatctagaaacctaaaaactaacctggaattaatcaaaattagatatagcatcagagtttcagccaatattatctaatatacatgcttctttattggttttatgtatatttgccacttatatagacagatcatcccataaaatcatatcaagttagatcagtatcggttgggctatttgaattactagctgatcatgatttgatatgtccaaatagattgatttggttatataagtttgcactaaagtattagctagtactttatcattatttatatattcttctctacatattgttccattggctattttaaaaatattgtcttaaacttctttatcaaacctagtaggcattattatagccgattaggcatgtttagggtcttttgttcattgatctatccagtcaatagccgatttggtctaactacatggattgagaccgatacgttat

SEQ ID NO: 41515 - DNA, 1707 bp, Oryza sativa
ccgccgcggcggcggcggcggccgcggcgaggagctggccgatgctgcggcggctctggaggaaggcggtggtggcgcccgtgctctggctctaccacctcggggaggacatcatcttctacggcttcctggcggcgatgatggcggcgaacctcggcggcatcgtgcccgagatcctcggccgctgggcctgcggcgagggctccgccgtgtcggccgctggcgaggaggtcctcgcgagctccaagttcatcatagtgcgcttcctcccggctttcgtcgtccagctcttcgtgcgcatcctcgcccgcgcccggttcgaagccagggaggcgaagaaggagaaggagaagagggagaacaacgagaaggtagttgattcttatcactcctaaaattttcttcacttgttgtattgagtggctagctagatctgtgaataccattgtacaattggtggaatttttgctcggtcatgtttgggaattgggacgacgccataatctagtcgtcaattttcgctttttatttcactcgttgaacctgatatgacaatattttctcagttgtgtgcaatttgtattttgtatttatatggctacatagcagttcattgttcatgacttcatgtgcagtaatagcccctttttcctgttcgtaatagaaatctagtctctcataccaatctgtgccccacttaacgatttgtttgttcttgtgattgcgaatcctgatagcagacaagctcgaccgccatcagggttgaatcatctaaggaacaacgtccagaaagtcgaggagcacggcgctgggggcccaaaggcttcatgccatatgcaatctacctagcccctcctttgattcaactttcttgtcttggcattaagatgaaagcccatcatgaggaaggatctcttgaatggagggtgggctatgtgcttgatgactttgcgaggttcacttctgctattttgatttcgtttgttggtgtcccaagcatgctgctcacagcgatgattcccaaggtgaaggatgatgacacttcgtcgcagtgaactgttgaaggtacccactctttcattttttaccataatgtatgctttccttgtgatcaaagtgtatctatgcttgaatgttcacagtggtaattataattaagaattcaaaattgttgttcacacattcaattagtctttgttgtttgtccggtggttctatgtctaccatagtttagttaatcaatgtgaaattgaatttgaccccccctcccccccccccccaaaaaaaaaaccaaaaaaaaaaaggtttcctcttgtgaagcaccattttggacttattttgctttatgtcacttattttgaattgatgccggagctctttgttgtaactcaattacttgaaaacatgtggtcttagaaaatgtacttgatttgttcacaatattaataagtttgctaatgtttgaccttgcaatattattctcaaaaggcagattaaattcattaaaattcggtgggcaattaagtagaagatccatataaagtgttgttgaactagtcattatatagaagcatgggtctgaccaatatatcataatttattcacttctactcgtgtatggaatattcaaaattttcaaattgtgcaagtgcaacaatgaaaaaggagttaaggttccagtcttaagtatcaggggggtgcaggaat

SEQ ID NO: 41516 - DNA, 6855 bp, Oryza sativa
catatgaatttggactatggacacatatgaagcacatgtatgaatctattcaaaatccaaaatgtcttgtagtgtgaaacataggtagtagttggtgcttaaaaactgcttaattacgtgttcccattgtggataatcagttgctaaaaattccatgtttgcatttgttgaaaacggatggattctaggatttatggatgcaatacctctttaattagaccttttttagcaccatgcatggttcatgtagcatggatttggtttatttgcattacttggtatagttatgcttcaaactttgtggacaaaacatgaggtaggctacacttgcacaacgttgggccaatttgttccagcttcggcttgtaaaccatcctaaatatacttatattttaggaacctacgtagggagtataatatttttcacgcttctaaagaaaaaggacaagattggttgcatattatggtgttcaaaatcaaatcctactatccgctttttggccctatatatgcgtaggtcagacaaacctaattaaggtcacaattaaatgttcaaagttttatccatttggccctcctggtatattttgccgtattttgacaagagtaaatttaatttccgtaggttttgcaaaaaaaaaaaggggggtagggtggtatagaaatcattgcttccaaaattattcaaaatttgttcattctggtagaatacaaattggtactgctatgtccatctttaaaaaaaatgatttgtacaaacagaagactaattaagttggaggaaacaacaccaatatacccctcattaacaggtaagcggtgttgaagtgatcatcttattttactacaacctccgttgaaaaagacaagatagatgctttagatcaaataagataccaaaaggctatcataccctcccttagtatagagagagagcgagcagaagggactactaatgttgaagtagtgattagaaggctaaaatgagaagaataagataaagtgatattaagagttcgagtgtacctacagctaaagagacattctttttttatggagactggagagagtactaccttaccacctactaccattgtggagggagggtagataaggggcttcaaatcaactctttgtgataaatttccaacaccaaaaataattcattttggagtacatcaagctcgtgcatctagcctaaactctcaaagtattgagatcctctaacttacaacatctataaaagaatggtcaaatggctctccaacgatctctccatctagctggccaaaccccacgactcactggttaaacttggagagccattttgccttgccaaccatgggtcgcaccacccctccaccccgccccgcctcgctcacccccccccccccaaaaaaaaatcactcgagaccatggtggcagcagtattgcggtatatttctgactcttcctgcgctggtattattcgctgttgcccgtcatttagagctttagccatcaacagtgacggacacaggattaaaataaagatggggcgaagatgctcgtctcaataagaacaactaaatgaaaaaataccatatttatgttgtaatcatataaacatatagtataatcaataaattaaggcaaacaaaaaacaaaaatgatattaaaataaagtaataatttttgctccatacataattcatcatacataaaaagatactagtaaacatatcaatttgcaaatatgagtcaattcataaagcatggttaatagatatcttttaaaaaataaatatatgagaagatatcgcatacctagaataagatgattattattttgcttagaaaggagagagagagaaaaacattaggcacctaactatagtaggggacgggggtgagcagtgtcgaggaattgactgaggaaagcatcacatatgcaggattaaaattggacacttgagctgtttatttatgggccaattgtgaattggatgtggtggtaagcggcccaaaaaggatatggaggtttggggcggcccgggccgtatctgggccggccgcccaacctcgcctaatgggtggtaccgcccctggccaccaaccctctttatggtattataaagggtttatttacaagcgtttgttaaattataaagggtctactctcgtggcatcgcaatgtctctaagctttttttttccgctgggcaccaagctctggtttcctcttgattttagctatcaaaacggtaggtgtcgaagcgaatcagtgaaaatcatagttaaagctaaatatggaaattaggttgctgttaaatccagtttaacctaaacggcaactaattgaacatatctggaacaaagcgatacaaaattgattttgtaataggttgaaaaaaatgactaacagatgattataagcggtaacgtttattagcaataaagaatagtttatgcataaaaagattttatataatgttgaaaaaaaaaccacaataaaaaagcatcaaaatcatctaaaattaagatttaaaatttaaattccgactaaggctaataagctaaagaacaaacgatgaagctggaggtgaatgttgtttggtgtggagttgttgctcgtgctgaatctccattctggatccaacggccgaaaatctcacaaaggtgataatctttttgctaatgagatgataatccttttttagagagaagttgataatctttttggcttcccaaaacagtacagttgcgttgaactatactctctccgtactcgtaaaaaaagtcgtttaggacaaagtttaagtcaaatctttagaatataaataataaataactaatacaaaaattatattaatagatttgtcttgaaaaatactttcataaaagtatacatatatcacttttcaataaatatttttatagaaacaaaaaatcaaagttatattttgaagaccgtgtggctgttctaaacgatttcctttacgagtgggggagtatgtgcagctaatgtttgaacgcccatttggatcggagctcacagggcagcccgcaccggcaccgtcttgctccggtacgaacccgacccgatagcccgacactctccccgcgtccaaagctgaaattaataaactcgttctcgcgtccgcctccagccaccccactctctcccactccacgagcgctgcaagcgagagcgagagctcgagctccgcggaagctagggtttcccattccatggagttcaccggatcatcagcggcggcggcgcgggggtggcgccgtcaggtgatgtcggggaaggtggcgtgggcacggagggcgctggcggcggcggcggcggcggggagggccctgcccgccgtcaccctcggcgtgggctgggtgaccgccgccgcgggagtcctccccgccatcgccgggcgctgggtcggcggcgaggcggggctcgccatggagcgcggcggcttcgccgtcctcgaggccggccagttcgcgttcgcgctcctcgtgttccccaccgtcgtgccgcagctgttggccatggcgatggagaggctgcgcgatgctgggcctccgaccctgatggaagacagggagatggtatgccgcgaggatcgtttatgcgttctctttcaagtttttcgtgcttttgcgtgtatcctaaaatattctgtttgaactccctccaaatttagtttgcccagagctgatcagtgtttgcgattttggttcgaaattcccaaaattttggacccccggaacaaaactatttcgcccaaaagttacaacaaaaagaacaattttctgttaatttggtcaagttttatccaaattcagccaaaatttgttcaaatttgaaagaaattcgttggcatatctgaaatctcggaaatttgactacccctggcacaaatgttcaaaaggaaattgcaaagcatggagctgaggaatgcatgtgtcgtgtttaatcatccagatatgtcaattgcatttcagaagatgccttgcttgagaatactactgtttcatactttcatagtccatggcagataattcctttgggctgatgtctccaaacttatttgtggctggttcattatagatgtagaggctggggatgtgatcatcttccttattataaaaaaaaaatcaccacgtctttacagagccaattgcagcaagttctggaatttcatacataattgagttttacttgcacatgacatagcagctttacgccttaatgatgtggaatgacgtgcccctgttttttgctgtttactgctgttctcttggaacgatacttggcatcctttgacgtccttcaacgtttgtagtctcaatgatgttttaatgtgtggtggtctgagttcaagatcctagcagtgactggccggtcactgcttctaagccggttggctggttaccattatacaagccgggataattcaaatttaaaatttagttttgacattatgtcaagtcaatcttctcagatgagtttatttgttgttacacacttacattccaataggaaaagaatgaaaaaaagggacatgttccattttgaaactgtatttattcttacagtaatttgtgctggactatatcagattatatttatgatgtgtatcccttcatgtgattgccttatgatcattttgatctattttttttatcttctaatgtattatgtatgtcggatattttgaaaatttgtgctttagtcatgccaaaaaattccggttggtgttgtctggtaacttagcttttttgaataacttttttttgggaatagtggtatttttggtgaaaccaatgttcaaagtcttggttgtgtataaacattagctgattggatgggccaaaacctttccctgtaccgatatataaatgaagtttgaaataattgtttcttattatgtgttacatatgttccagtcttccagagccatatatatatgttaactaattatcgtccattttccctactcgaattatttgcatgtgatggtgatcgtagctggtaagcacaaatgcagcaatggaattgccaccggagcagcatcctgaatgcagagtaaaatggaaccagatcattaaagaaatcgagttcccatgcaaaattggtttcgttcttctagggtttgggatgattggcagtctgatcattggattttcaccagaaaacgaatttagcagacagagtattggctggatacttgctgatgttggattatttggttggcatgctttatcagtattctttctacttccaaaagtgatccgcgcagtttggatacattcctagattggaagtgtggctgctgaggtagcattatattctggtacaaggtacgtttctcttcactgcacatcttaactagtactggtaacgttgttattgtcatgccctatatatgttatcctctgttatgtgactgtacctttttttaatgatatatcgtgcttatactctttgtgcaaagaaaaaaaaactttgatctgcaaaaactttacattgtactaacttgatccttcctttgcctgattgtctgttagcgcaaaatttgtagttcgtaggtgcattttttgcttggagtgggctacaagttatttttgttcatcagtcataattaaagtatcaactttcctgctatttatctacccttgctcaatattatattgttgtacttactttatatctggtacaaaacacagggtccaacattagacttgtgatattagtctttaacgtggaatcttagatcctcagtaataaatgaacatgcatgtttggaaagcttgttatatcactttatttagtcagattacactggatgtgtatttgaaaatcggagtatttgtttggtagatatttagagtagttatggacttatggtccatggtataaatattacctcatttaatttatctgttatcaattgaataaatactgccttctctacttaatattcttttgtcgctgggtcataattggcattggcagaatcaaatttttgacggaattctgatggcacatgcctagaagattacaaatgtaatgaatattcatctgcctcctaatttcctagtagttcttagttatggcccatcgatcaatttaagcaagtatctagatttgaataggatgattgtaatataattttgccttctgatctgactattggaaatttggatgtttggcacacacacttaacttttttttttgacaataccttcaaggaaatgctactgacattacttcgatgattgcagttttggggacctaggagttattggagcatactgtgacaaatccacttcccgggatctgcgagctattggattacatgcatgatatctcgccctttttctttatgattcctatgatactatgaacaatgtttggaattaattaccagatgcgatgcttatttattttaggtgttgctttgagttagcgtttctcctgcggttaaaaacgaaaacattgaatgaatgagtcgcgttcgtattttaaattcaggcatgttttgtattgaactaggtgatctgtttatgtactggcatggttgatacttgatggaccttcggggaagtgatttgtgtctgggtttcttctgctacaatatttctgtgataactgcagtttgtagtatatctgggttttggtccctgttggtaactagaggtgactctagttaatgtatcatactacaaccgcgagttttcagagttaacagacaggtcccatgcatgtgtattaggccacaaccgtcacacaaactttggacttgatactgtagctgcaacaagtgatttgctcctgatattttttttcacctcatgcatggtt

SEQ ID NO: 41517 - DNA, 3437 bp, Oryza sativa
agggtgtggagggtgaagctacctggccatggccaccgtgttgttccggtgtagccaagctgacaagccgtcaaggtatagtaattaatctccctttttattgtgtaattctgcgagcaattccctttttaaccgtgtttattagggagaaaataaagtgttctgtgtgttcttagtccactgtgcccactgacattgatcgcattgaattgattcatatattttcgcgaaccacgggcattctttagtttttaactgcagagtgactggatgagactaatagcattgttaacatgaacaaattttgaattaggcagtcccttatcttaatcctacttgcttaattaggcagctttcttaattaggcaacaccttatggccttaatcatcaaatgctctagtttcactctagaggcacagctgtagtcctgtatttgtgacttgtgaatttgaagaattacggtgttctctcaaatatgtatgtctagctgcctggtatgctccatcaggtctgaggttgcaggaaataccttctcctgtcagtccagttaggtgaaaactacacagtaggatagttactgttgtccaaatgtttctttgataagctgcacattcaagtgtgtaattggtctacttacggaaaacttactgaaattcctacaagtctaacattgtctgctcttttggtttacaaacatttacacaccgatcttatttaatttgggttattctgttaacagacaaagacttgaagagaagtacggctgtgaagatggtcagacagggacctacaggatgactcttgctgatggttaattatgggcttatggctgatgccatcagatcaaagttttgaaaactatatttggcttttacgtatactggtttctagtactttttttgacatgatggtttctagtactttgcatctacgaacttctattttgtaacttagttcaatgctagtagtacagtaggacatgttccatgagctgatctgcgcatttggcaatttggaattaaggtgtttattctgttggaatgacttatgagcatacttgtcatggtaagaccttatttggcagaaaacacagtcaatgcttctctggacataatatcgtaattgaaatgttctgtgattgaactagttgatatgctgtttcgttgatgttttatggacctttcagtaacaagtgattttgtgtctggagctgctactgcaataatttctgtgataactgcagtttgtaggatttctgggttttgatagctacaaggtgaatagttaaatctttctcactacaaccgcgagatttaaaagttgacagacagatcaatgcggcgcgtgtgtgttttattaaccttttggaccgcaatggtcaataacttaacaggtgatttgctcttgacattttgttcagctcatcgatcgttgatgctgttgcctgttggtctgctcttaactagagcttgaaacttgttgggggttacatgcttaggcgttataatttctgataaatcattcgctaaatttcacgtgcattcgtggaaaagggatggagcatatatatgttagggtgttggacgtttattgtcgtacctaagggatgcgacatctttttagcagcacggcttgacgattttttagcagcacggttcatatgtttgtaaagttaattatttgtcttgactttgctatagttaaaagtacaaaacatgtggtaagcaatacttcgcatatttgtttcagattagctggtctatttgtttcagatttagcttataagctgcaatcatttttgaattataacttaattttaagattaaattaggagtattgtgctaaaattgttttaactccggattattcttttctttaacttcgaactacaactttctgtttccgttagtatgtttttcaaagtattaaacgatacgttcttttatttatatatatatatatataagttcttcgataaataaataaattcatttttaagtttatatttaatatttaattaattaatcatgtgttaatgagtttttttttttttgcttggggctgaaaatctcctccaaactgaacaaagaatgcaatagtcttgtgacttcaatcatagaacaattaactatcctttggttcttcccgttggttcatttaaataacaggattgaaaaaaccatttgaattgtcgcattgaaaaaaacgaaggaatatgaaaaacacaagattctggcatgaatgtaagtgcaaaataaaaaattacaaaacacacgaaaaatataggaataatcatttgattagatcatagaaatcaaatgagagagataaacttaagggaaatttcccaaaaggttaagatcgacccctttggttcgcaggaatgaaaaacgaaggaataggaaaacacatgattctaacataaatgaaagtgtaaaacagaggattgcaaaatataggaatgacagtaggaaaaacacagagatcggataagagagatagactcaaaggaaattttccaagagctttgagctcttgctaagtttcctccaaaatctctataggattgtccattccataggaatttcaaaggattggatatgatacaatcctttgatttaaaggtattcataggaatttttcctatagggttgaaatcctccaaaatttgtattgttttcctccaaatcaaaggagccctaaagctctagccaagtttccttcaaaatatctgtggtattactttccataggaatcttaaatgattagataagattgaattctttgtttcaaaggtcttcacatgaaatttttttgtaggattaaaatcctccaaaattactactccctctgtcccaaaatgtaagtatttttggaccctgacacgatctccgagatgctattttgaccaataatatctataaaagtgaggtatttcaaataaaaagtgttgcatattatgatagtttgtttaatgataaatctaggaacaccaattttacatgattgatcttttttttattttttttattaatagtcaaagttaaaaatatttaacttatcactatgctaaaaagcttatatttgggacggagggagtatattcttcctacaggtcaaagggcctaacaaccccatcttttcgcttatgcttatacttatcagccaaaatttaaatttttaatttaaatttggagttgattttgaggtttttcatcgaattttatttttcagtctttgcttttagatcgctaagaatacgtatataaaagttttattcacaaattattttttgtttataaatatgccgtttaataagccaaacgactctagtcatcatagctgcttccggggtatagggcctgttcactttgacgcaaaaaacaaaagccaaaattttggcaggatttcttatatagctacaaaatttttttat

SEQ ID NO: 41518 - DNA, 2022 bp, Oryza sativa
acattcggacccatgcataccacactggctcagattgtttgatgtacggttgataggccgacaaaaaattaaaggaagcaaccaaaactaatttatcggaaaaagtttaatatattactaggaaaaatacccgtgcgttgcaacaggtgaaatctattttaaccttattattgttatatgatttaggccctgtttgtttcagcttaagattattgtaatttagattattaaatcggattactctaagctggattataataagctaatctaaaataagctgcgagttatttgtttctctggattattgaagacatctaagggtagtgggtctttagccacccaataatctggaaaaagctcctccagagaagattattagattataataatctggcttacagattataataatctatttgtttgtttcagcttactcttaataatccagattataataatcctaagttgaatcaaacagggccttatttaagataaaattcactgtggaagttcgtttggatatatattttttcagaaaattatgagatgtagttaagagtccgatcatctcaagttagcatgcgagtttttttaaacagatttcttatatgattccttctgtattaccaaaagtgaacgatcgtaaaaaccgactcaaatacggatatatatttccaaaagcaaacgaacttaaaaaccgactcatacatggatggcataccaaaataccggcaaaaacatctttaatttttataatagtagacatatgttttaagttcattaaaagcaaatgcagaaaaagaaagaatgataaaaagaccttaacattaagttttaaaattcagattttgtctgggactaaatggacaaaagtaaacgatgagaaggttaccactaattagaattttctttttaacatttttcatttccttatctagtttgcctttgctaaataaatattatcccttatgccattcataatctaagccacacctagaattatctctagagagggaatgccccatgtagactgagaccacacctcctatcccacagtgcaaagttgtttcaggagcgttttcaatttttcatgtcaagccttaccatcttctattttagtcatcatgtgttttcattttacataacgtctaaaatttagcactacacaccctaaaatctctcccctcccctcaatctctccgttcctcaaccaaccagagaccgacgacggccggcggcacaacgagcttcaacctacggaggccgacagctccccaacctccgcccaaccacaagtcgcaggaggccaatgacaattccactgataacggccggcagctcaagctaccccgtcatcgtgtcattgcttcaccatggcctcctctcccctctccccgtgccatggcggcaatcaaggaggctggggacgcagcggtgatcgaggaggccgaggtggtggcgaggcgacgacaagctcaacagcgcgtgactggtgccactcactcgtggcgacgcaatagctcattgggccccctcctatcccggccgatggcgagtagacagcacattgaggactcggagggcgatgacctcgacaatagtggcgtggatccggagtgacacgagagctcggccgccaccatcatcgcctctctcctcttaggtgtcagatctgacttggagctcagtaatatcgcctagatctagcccgcgggacagtgagctcggggcggatttggcagcgtcagtaccctaccctccccccgggcttatgagctttttcagtagagacggtttcggcagtagatcgggtcatctttgagcaggagaacggacataggatgatgttatcgggcgacgagcagatcaggtcgatgatctccaagtcggccagtgttcttccccatgtctctctcctgttttctagactcacttcccctttttctaacatcttctgtgaggccctgaggccctcgttaccgacagagggcatgcgaactcgacaagaacatggtccctggg

SEQ ID NO: 41519 - DNA, 1885 bp, Oryza sativa
catatatatatacatacatacatacacatatatatatatatatatatatatatatatatatatatatatatatatatatatatatatatatatatatatatatatatatatatatatgtacatctagtacatatatatgtatatgtatgtatgttgtcgcgtgaataatccaattattttaggtaaagcaagcatcggtaaggttgtcatcgttgaggttgggccattacattaaagatgttccaattttcacccgttgcaacgcacgggtattttgctagtataattaaaagattgtaccagttaggctattactacctctatccatattgataatactattatactattgagagacgtctatgagatgggataggaactcagactacaactctaaacgataattttcttattttccataaacacgtttcccgatccgttaaatatcactccatttattccaaaatgtaacgattttaaccttttaaaggttgtctcaaaatataacaattttcccatcaacactctttccaaccaattacaacatttcaccatttaattttcacacaatactttcaattcttatccaatcacaatctttctctattaattctagccaattttagtaaccgttatattccgtagcagaggtagtatgttttttctaaaaaatatcgaaaagtctcttttaaaaaattaaataaatcaatttttaaaatttataatagttaatattaataaatcatgcatcaacgaatcattatgttgtcgtgttgctaaactagcaatagacacgcgctacgctgcgtgtagacatggatagaatcgaaatgagctcatgacatgcaacacataaattatgttcaatatatattagtagttttaatgtacaatatatacgctgtaaaaaattgttacaatccaaaatacgcatgacaagcatttagattataaacgaacgcccaaacgtctgcttgtttttgtttgtttactaatacattgacaattttgaaagagaataataagatcttgatggggcacacaacccagtttttttttttttatcaaatgcacaaacagggcctatttacatgctttacctgcaaacacaaaatagcaatcaatacatagcatatattattttgtctgtattattcttaaagttaaatattatcttgactccatcacacatatatataacactgaatgataccccgcgcgttgctgcgggatatttgtattgaaatagaatttaaaaatctaggtacactttgtgagataaaaacaatagtatgtaaagaagggaaattgccgcaatacaaactgcggtctgaaattctggatgatagtggggcaactttttgcacaatgcttcactttcagtgcattgagagttgagacctcatgtaaaacagcacgatagtacctgacagaaaataggagtatatttatttacgatgaaccaataggataaggttaatggtaaagtcagtggcaagagctgaatggttgtatatgttttttttctcatctgctgtaggctagctattcccgaactcagtttattatttatcaaacgctagcttccaaacctatgggggcaagaagaacaatactgaaaatactcgatatatatatgtagtacagatggaagtttgaagatgataatcatatctaaaaaaacaaacaggattcacctaagatacaaagacatgatggtacctcatatgaggaaatgggattcatgaaaagttgataaattatgcagtttctcagtacatgaggaagataaacttgatatatgaatcaatgtaagtttgagataaaatagacagtaacttatttttaagttaattagagaattttgagatcatactattatgac

SEQ ID NO: 41520 - DNA, 5180 bp, Oryza sativa
agcatcgactccttccaccggaggtactcctcggcgccgttcagcggcttgacggtgactgccgccgccatcgcctcgatcaaatccgcacctgacgagacaacaagagcaaaccaagcgtcgcgtcagcgtgagcgaaccgtggaactcgaaacggaagcgtttcttgttcctcttgagcattttcacgaacaggtggtgatcatacgagctgtactccgatgcggatcgacggcgatgttgatcgggaacctgtgtgttcgtacttcgtagttgttggcgaggaaggggataaataggctgttcttctgaaaagaggtaactgccgatttttctgccagactgatcgagtgccgatttttattttagatttaaattgattcaaaacgccgccgatttcggtctttcaaaatagtgacagtttttgtttgaaatatttagtttggaaaacataaaaagatggtatgtgccgatttgtttgtaaaaagcacttttatagtctcattaagttatttatcaaaattataaacttgttgtaatgaataattatgagcaaagttgtatgattatgttggaaacagagcggctggtttcaggaaatttcaattggtctgagagagctgtgaaagttctgaaaatgtttgaagcaaaagtgtcacacaatttcataatattttggacggaaagttccaatagaattgccgggttttatgttatatacgaatgagttctaaaaaagaaaaagttacacaaatgaggaaccggcccaacgatggcgggaatgacattacgtttccgggccaaaattgaagttaaatgttttacagttttccgggccaacattttacggtggataagttcacactatgtcccacaatttgtcacccagtttgatttttgtccttgaactgaaaatccaaacacaattcgtccccaaacttataaaaccagtgcaaacgagatctctcgatagtaagttgatgggctagtcggtacaggctcaagcatcaccatctcttaataaataaacatcgatataacgtcgagagcccctactctcatatccagcttaataattttcctacttggcccctgaaactgctagctggcacacatgggatctgtttggagggaggttctggcagctgcagcttctcctaaaatcttcagctgtaagaatctctctcaaataatctaaatttttacccagattttaagaatatatagttgtagaatctaaaaaatgaactagaagtcagaagctagaaaacttagctttttcatattcttatcagctatttctcgtaatcttcaactccctaaagccttgtttggttacgccgggatttaatctgggccgggaatgaaaagtatagtaagaaatttatgatagatacaatgagagatcgatatttattccggacctggaaccaatttactcatgatagggacaataagagaccgagaatcaatccactagttaagaggtgtggaaacaatccggatattttgttgtcttgtctctattatgagtaaattggtttccgacccgaaataaatcccggtccctcattgtatctgagttgaggctccccgcattctatacatctgttcatttcactcattctagatttctgcatatatactccctttctgcacccgtgctgccaagtgccagccactactgcaaactgcacccaccaaacacgtccactacgtacgtaccactacccccgccgtcttctccttctccactgcgactaacaaccataccccagcttctctcactctctcttcccctacaccaattcaagataagagagccaccgatcgatcgacgtccggccaggcgtcgacggtggtgccggccccggcctcatgggggcgccggcgaccgccgccagcggcggcggcgacgacgacgacagagacgtcgtgttcgagtacctcctttgcacggaggaggacgccgcctcggccgggtccttcttccagcagctacagggcccggcgcccgccgtgtcgtcgtcgccatcaacgacgacggcgacggcgccggctgctgctggtagctgcgatgatggcggagaggaggaggaggaggaggtggggacggtcgacgtcgtcgcggagctcatcggcggcgaggccgagcgctcgcactcgccgcgggcggactaccccggccgcctccggtccggccgccccgccgacctcgccgcccgcgccgactccgtcgcgtggatcctgaaggtgattttaaacctgattaggagtactaataatcctaattaaattaaacctcagtaactactccctttctgcttacattcacatagatacgagtgaatatgagaaatgctagaatgacttatagtgtgaaacagagcaaataatggacaaagtgtatgaggattaattaatacaaaacacaaattattagcagtaattaataatacttgtgtgcaggtgagagagttgtacggtatgcttccggtgacggcctacctcgccgtcagctacatggaccgcttcctctccctccaccgtctcccggtacgtatcttatacgtgcgtatatacgtacattttgtacgtgtgagttaatcattatctcaacccatgcatatggttcgttttgggctgtgtatatctttctaagtagaggccgggttaatataatccattatctgctggactgtcgtatatatgtatgtatgtacgtgcgcggtgtgcgtaccctgcatatgtatcgtccatcttaaagtatactccctctatttttttaatatatgacgttgatttttgttatagcctttgatcattcgtcttatttaaaaaatttgtacaaatcttaaaaatatgaataatgcttaaagttcagttagcgataaatcaaaccacaacaaaataatagaaatttactttaaatttgttaataagacgaattgtcaaatattatataaaaagttaacgaagatatacacacacacaattttgcgtggtttattgtctacaagtaattaagttgaatataatgtcatagaagtaggatgttcggcaataaatttagtctaagtttaatggtctaagaactaataaattttactgaaaattctaagtttaattggctttagagcatgttcataggtaaagccttccatttagatactattgtagacgataaaagctctaactaaaataaatttgtattaattacctttctttcattttccctattcccatatagtaaaattttctttcacaaacgttagaagttcatattaagatgttcagcttaatatcgatttttctctctcgttttccctctcctcttcatgtcaacaatttaccttattttccccaaaaaaaaacaaattaccttattaacaactggagtataaaacctgttattatttgttgttgtacatgctcatatatgtgtacgcgccacgcatgtctttttaagtttggagatagttgcttaggtaggtcaattaaacaattctcagttaagataattttggttgagtgagcactcgaaagtcgggacattgaaattggattaattagcttgcggaccgtactttgattaggccaatcatgagttcattttcttttctagtttaggtatacatgggcacttcacgtgcgcacgcacgaatttttttatttgttgaacctttttacttttttattttaaaactaaactcttttgaaatttatttgtaaatctgaaccttttgaccacgccagctcgacaaaacaacactggcaagccacctgcagcgaatatatcagttttgtcctgccacgtcagcgagagtggcgtggctaaataacgatgccatgccgtggacaaataacgctatcacgccagcaggagcagcgtggcggtataattttgccacgccagtttggctggtgtggccaaaaagttcagattttgaaaataaattttagatgggtttatttttaaaactaaaaattcaaatggttgtgttctagcactctgaatatctgattaattagaggtttaggtttacatggcaggcatacactttgatcattgaatgcaccaacatatgtatgtgcttcttctcaggatttaatcccaaggaaaatgtggacattcatatgctgaatcagggacgagatagaacctgtgggatgggctggttccatgcacgacaaccacaaggatgaaggatcctactccctccatttcaaaataaattaatttttaaaatttaaattttatctcaaaataaattaattcctaccaatcatggttcatgaatcgagaaattttgtccctcaattatctctcacatactcactcatgaatattgcttttctattaatgaggggcattatagttttttatcctactaattttaggaccaagagagcaactagctgcactagcaacactcgatttataataataaattattttttatctttaacaaaaatataaccatacgaacatttttatgcttggataaataatattgcattattatgaagttttataaatatattacaatataaatgtcgcaaaaaatgcactttacaggctgtgtgttgatgtccaaaatacatatagtcccatgaatataacttcttagccgagaacctggagtaaccaacaaaaaccatgtagtgcaatattactaatgctagcagacataccattaatcagagatataaaacctaataaaatccttgcactccctgtggtatatgaaatattgcgaagcaacattctttctaatcatcataaaggcctggatcacataacactaatattaactgctcttataggacagaaccataatattaactgatctgcaacaaattaatgtccctcttaatttccttggatagtaccctctcaagctagctctcataacaaaccaattaatccaacaaaaaaaaaaggctctggaagctatcatgcaattctatatgtgctggtgatcatgtggaaatcaattaatatccatgaaattgaatctacatggtacactagtacaaagcccagctataaggtggtccattaattgcacatacttcatttcaagattaaaggtgctcaccaggaccatatatgcaatgattcaattgatgcatgactcatcttgttcagttatatacataggagtgtatatatcatg

SEQ ID NO: 41521 - DNA, 1579 bp, Oryza sativa
catcaatacgaatgtgggaaatgctagaatgtatctatctagattcattaacatcaatacgaatgtgggaaatgctagaatgacttacattgtgaaatggaggaagtatatggtattttctcaatcttaaactgggactcactgaggaaaaaaaaaactctatcaagtaggattgtaagagcaagtacagtagcaagctataggttagttaaaagcacatctggaggagagaagaaaagaaaagtgggctcagatttatcgctgcagcacgagctccatgtgtgtatgagatggacaaaatattaatgatataatatatatttatataaaatgtatacataggctattagagtggttgtagatgatttatcaatttttagagttaacaattaactatattattaaacttgctccaagagcaacatgcatgttgcatagctattatttatttcttatggcatcaccaatgtatatagtaaaaatgacccatatagataagacgtacatacacatactttaaatatagcaattcacacaatatatatagatcaagatgatattaggagaagagagaaaagtagagatagatgatattatttattccatatgggtagtcactatgcatatggatatttttttgttactccctccgtttaatgttataagacgttttgactttgatcaaagtcaaactgctttaagtttgaccaagtttatagaaaaaaataataacattttcaacccaagacaaatttattatgaaaatatattcaattattgatttgatgaaactaatttagtattataaatattactatatttgtctataaacttagtcaaacttgaaacagtttgactttgtccaaagtcaaaacgtcttataactgaaacggatggagtattttctttatatggaccagttgcataatggtactagatggttgaatgaaatattatattatctatgaaatacttgtgtactacattgtaaatgccctaagtttaaggatgcccataataatattatgttctttgcttctttcccaataaaatctggttgaataaaatacatacttttttattccctgaggttatttttcatgcaatattgtggatgaccttatccatggaaaaccggaggaaatatttttcaattctccacttcgcacgtactctacattcgtactacctcttcttttttccttgtttgtttcattgaaatgttcccatcccagcagttcaatagtacatgtttgatcagacaaacattcacacgcacaacagttttgagctatccagaccatcttgggaggaagagaaaaatacaccatttctgtcatagcattagccaccatacttaaattaatatgcctaacgataaattagtgataccttcaaacaactactcccccgtttctaaatatttgacaccgttaacttttttaaatatgtttgaccgttcgtcttatttaaaaatttaagtaattattaattcttttcctatcatttggttcactgttaaatatgcttatatgtataaatatagttttacatatttcacaaaagtttttgaataaga

SEQ ID NO: 41522 - DNA, 614 bp, Oryza sativa
tacaaggcaatcgtaacatttgggaggaactgtggcactgttacatatattttttggagctcgcgagtaactagcttttgcatgacagccatcactaccctttggatttaccttattttcgagctactattatcgcgagattataattaactcatgttacttggtgatcgactaatggctgacaatcaaatactccataatatatagtgcggaaactcaaaaaatgtgaacgatagtgatataaacaataaccgcaaagttattactttcaatgatagagcaccacaaggtggacatgctatatataatggagagccatccaaccatgcatatccgacacattcacgcataagagaattctgacataccgtgctacaacattacccgcggtggtatgggaagcatagccactcacattgccattctcaccatcagtggtgctgtagccattgctaatagatgccacaagccatggtgatgaagacgactcataagatggaggaatttatatcatacatcatatacttccgtatatgatgtaattatattttatattatacaaaatcctattttagaccgtcgttctttccaccgggactaactacacatttttt

SEQ ID NO: 41523 - DNA, 8814 bp, Oryza sativa
tggaaacctctattaagggaatccgtttcattttttgttccaccaaaaatgttttaactagtgtactcacaatgtttcactatgtatagatctaatgttacagtaaattgaaacattcttttgcaacaaatcacccacatattatagaaaccctctattaagggaattcgtttcattttttgttctaccaaaaatgtttcatctagtgtacttataatgttttactatgtatggatcaaatattgcagtgacttgaaacattctttcactatctgctgaaacattgtttttatataaggtgaaacaacgtccgatttaaacgattgaaacattttcgatctacttagtgaaacaattccgatatacttggtggaacagcgtgcaacatttaaaaataattcaataataagctaaatttttttcatcggaatatatccatgcgtggtcttgttttaaagatttaattgcaacggatttaatggtgcaatctaatcatgatttggataaataatttaagagaaaaaaatagtgtaaaatagttttgcatacatgcttgcttgataacgtcatgctgacgtgggcacctgatttttcccacccccgatcgggcgcccggcgcgtagtcgtctcgcattaatttcttctccttcgaatcatatagctcttcttgtactttctcttctttctcaatttgtcttgaaaattagaggcgtatgtttctgttacttgcccgactatttccttctagttttgtggtatttccaaatgcattgggaccatatcgcagtattttttgaaaggtgggatgtttttgtggtatttattggcactagctgaaattcttctattgatgataaatttaccctttctatatatgtacactagctaagagaaggaaacttataccgctgccatgtttataatgtgtggtagctagctattccttgacacttattgttctgatgtaacggtgtaagtgttaacactttcaggccaagccatatatgcaacttgttgaacgccttcattttccaaaacacaatcatacacatacacattataaccaagtgtaaattaaaccgtttgaatgcgtccgagagttttcatttccgacaaaataacatctgaaacaattaaaagctgctgcttcgatcttttcagcactagatcgatcaagctccgtatcatggagtcactgctagtctcttctactgcttgccaacaaccacatcaacctgagcaacaacacactagtcatgaagcgtcctattcttcttttcacatctcaaagacgagctaagctagctctctgatccattgcactgtatatatatatatatatacatacatacatatatatatatatatatatatatatatatatatatatatatatatatatatatatatatatgattgccatggtgattgggaggctacgacattattgaataaagcagaaaaagatggatggatagatggtaagataggatgcatccatgaaggaaacacaaaagcctgtacacgtccccatgtccagatactcctatcagacacagctaagtatgagacgatatgcatgctttccttttcgctcggagtgagaggagagattctagcagcttagctttggtagcaatgtagtacggtgatcacatgcaaagcaccgaccaatgttgtctaaggcaagtactataccattttagcattgcaagctagctcttgcaagtaaagctagaaggtcaacccaccaaaggcgcacagtgtacactaatgcagaactgatcttttatcgtggtacccaaaacacaaatatcttggttagatttagaaccggtactaaagatatttttagtaccggttctaaaagtccaagtcctaaaaacatctttagttccagttggtaacaccaaccggtactaaaaatacatctttagtaccggttgggtaacaccaactgagactaaagatggaggatctttaggtactaaagatgcctataggggttagttcaaaacaaaagtatctctatccaagtgatatgtgtagtaggtgggatggtaacgcctgtggccaaagtaagagatcttaagttcgaatcccacatcccacatatttttttttgacttcgtatgcatctttagtaccgattatttcaaccggtactaaagattgagatctttagtctcgatttgctacaaccggtacttaaaagggttctcaaccggtgttaaaatcagttctgcactagtggtaccagttcaaccattcgatcaccaaggagtttcccctattgccatcactagtgaaaatgtacacatttgtgataaaatattatcatcatggcagatgctaattctatcgtaaagaacttcccgtgatgaaatggtgatgaatttgggttcgtaaaaaataaagcgtcacattggtttcatcatgacaaatcgtcaaatttcgtcatagaactcagctcattttatgacaaaactatgttggtcgtagaacctaccccttctatgatgaaagctactatcgcagaaattttggcatcacatcatagaaaaaaggaagatatcatcatagaacggcttgttggtgtgacgtggctaagttccactccgcatcatccatgcgtgtaactgtttattaataatatgtacaaattttgctatagcaggctactctagttttatacctttatggcatttgtagtactaaaaatgcatctagaagtcctaagtgggttttggctaattgatgctaaagcgattaagggactaatgtggttttcaagtacatgagtaggcattagcttcattggagaaataatcaataacacttggtaaaaccctcaaaacaaatgaaaaggcaacacatgaagtttaattcattttatcttttgaaatagagttcaggggcacacatacgaaagacttgctagctagcatttcagtgctcaaaataatcctttgatctttagatgagagacttgcacaacacaaacatggggttaaaagttttctctaggtatggagaccaaaaatttaaggtaaatgttctcggctgcaagtactactggcagggttttcaatctcctgctatagctgccgctatctcccgctatagttgttttagaaaggttccagctatttgctctcatgtacaatttagccactatagctctatttagcccgctacagatgccgctatagctgtttgacaagctaaccgctaaatgccttagcctgctatttaaaacggtgactactggaagccctgatatggagaatgttttaattatgtaagggtcttctgttcagccttgtgccttagacaagtttcgagtgtcaagatcggaaattctagtcatatgcactctttgtttggttgagaggacctgaagttttgggcttgaatcgaaagtttcggtcaagggttctcattttggccgaggaggcttgacggggtgtttttgttcttctagctggaaggttttcaaatatgtgagtaatgatttgttttttagggctggggttggctgctttccaaagttgaaccctagctcatagcattctagctctctcatttcttctctctttgcatctagtgcttctagtgagagttggattgggagattttgggggatttgtgcttgtgagatccaattgagtacttgagaatgtttttttgtgtttgttactcttagaggatctcatcctagatggttagctgttacccatcgattggtgagaattatggttgagatacctggcacttgagagtccctcaatagagatataagatctatggatccaaacttcagtaaacaaattagttgtctcatctccctctttactttgagcctttgtcgcttttgtgcaatttcactcattctaatatgtgtgcttggttgaactagtcaatgactttgattcatgcttgtatacattttttctgtgggttgtttgcagcagcgacaaaaaatatactaggctacaggcttgctcctaagtctggtagtgtcaatttgtcaccttaatgttctttgagatactttgtgaggttgagtgaattttggagatttaggtacatttcatctagagcttcattcttgagcatttgagttcaacgccaagctcgtgttcgtgtttgttactcttagaggtattcctcataggcggctaagcgttgcgagcaaacttccaagtcatgtggagagctcgggaaagtttgtgaaggttctattttgcttccacaaagaaaaggggtaaattgagttgaaactgagcttgatttttgtggtcccttggtgaggttgatggttaaacgtgaccgagcccctcaatagagaagtaggatcgatgatcccaacttgggtgaaaaatccttgtgtgttctatctttttaccattcttacttttcttttgtatcgatctatgcatgtggtagcttgaactaacttgtagctttgcttttacaagttcctaacatgctagttaccttttggttctagtagttttagggtttgtgtttggtttagctcgagctagcttgtacctgctttctatgcaccggcagaacatctggaggaatgatgcctggaagtattgaccgattgaacaaaagttccaacaagtttaatccactgcgaaaagaattttctggtcaagcctattcacccctcccatcctctaggttatccaagtaactttcacatataatcctctaatattgttactaaaacaaactacatcattatttcaataataaatcatggtcaattggagaatctaatacttgaaacattagactccaggcggatctcgtcatcaaatgtgcggtcccaaaattgtggaaggttaatttgtggatgccttaggcaccggaggacacatttctacaaacatgtagggtgcaacttgtaaatgcctcagtctccactcctactcacttggggatgaattgatttagtttattttacggatatcataggttcatctaaatgcaccccctcaattattgaaatcatcaaaaatacctccttaagggcaatacaacccaattttaacaagtattttcatgcttttgaaacaaaataatagttttcctccttgtatgaaacctagttagcaagagattaaaagtagttaactaaatataagttgaaaacatatatttggatgtcaaaatcatgaaaacccctattaaaaccaggttgtattgcacttagggggtatcttgatagttaatgggtgtaaagtgtttgggtttaatagttgacagatgttttatagacaagcacaatagttgagaggagtaatgctgacttacccctattttaaaatgggatcatcgatctatatttcaagtgatttattttttttctcatctataaatgaatcattgatatgcatttttctttctgtgaacaaagaatgttggaaaaaaaatacttttgtgtttatccttttcaatttgaaagggaaaggtgcgattaaatggatctagattaatccaagaagtaaaaaactcgcaatatatttatactaaatggcatcaccattcatggtcaacaaaaaatattacaaaacaagtttttataggtcaacttttgggttatttcttgctcaagtttaagtatctgaggtgagttaaaatcagacaaccaataaataacaacgtactattttgggtcctattttagaattagagtaaattacacacacggtgtatcaacttggcatgtgggtgcaatttggtgtaagaacttgagaaatgagtgttctaatgcaacaacttggtaggtatgtgcaatttagtataagaactttataagtgatcgtataaatgcaacaacttgtgagatatgtactattttgatacagtaaactaagaagttatgcgacaacttaattatttagagcatttttatatagattcaattttgaagcaattattttgacaatatactagcgtggatttgtataagcatatttatatttttatcctaataactaataactgaaagtcaattaaactggatataaaaattattatatttcggttgatatttgagaaggtgaagaaaataaaaaaaaatctgaaagggatgtaaactgtatgtgcagtataaatattaaagattaaattcaatatttaaggtaatatccgtaggattactatgtaatggcatattgacatcgtgaaaaagactcaccttttagccaagttgatgcaccaaaatactaaattaccaagttcttgtactagaacgcatccacttgtcaagttgttacacttggacgttcaattctcaaattcttgcactatatcacacccacctgccaagttgttgtaccatttgtacaatttactcttagaattaagtccactgttaatgttccttgggcgactctcaactattattgacccactgacagaaagggtgcggctcatgcatgtatgcaattgcagctttcattcaaggttattgatgtaaacaaagttcaaacacagtcataccttcgttcacatttcatacacatgttcatggcttgattgatcatgtaaacgaaggtgcacagttgcacacatcaatccacaggagaactgtagtactgtaggatgaatatggtgcttctttttttttttgaattatttgcatccctcttatgaaagtacgatttctgcaaatacttcttatatcagcattgcttaattacagcacttgttctgtttgtttgcttaattcaatagcttctctatgcatttgtttctcctctaattcaaatggagtcaacatattacaagatattggacggctcgaagcttctctacatttgttttctttactctttatcgatgaataggatggcaattgatcatgatactaagtaaatactctctgtatttaatattacaagtcactttagatttattataaatcaaatatcttttaagtttgactaggtttgtagaaaagtatactaacatctaaaccactaaattagtttcattaaatttaacattgaatatttattatagcatttatattttgtgttaaaaatgttgctatatttctttgtaaatagatgtttcacttgggataaatctaaatagacttataatattaaatggatggagtagcttaattaatttctattatgaaaaagatagcgtctgtgatgatcccacttgtagaatcttagctgtccaagcaaaggaacattgattggaacagctaaagagcggacattagaagtgggaagccgcatccagtcttagcccagggaaactggctcaattacctttgatagttaaggggtgtagagtttttgggtttcataattgatgggtgttttatatacaagcacaatagttgagagtagtaaatatatgctgacttacccctattttaaaatgggatcacctaagttccaagtgattttctttcttatttaccaaccactcttgatatgcatttttttcttgttgaaaaacaaataatgttactaaattatatttttgtgttgatacttcttaatttgaaaaaaaaaatttagcattaaatggatatagattaatccaagaaacaaaaaacaagtcgcatgcaatacatgtatactaaatggcatcacaattcacagtaaaaaaaatattacatcacagttttttatagttcaaccttttgggttatgtcttgttcaggttcaggtcactgaggtgagtaaaaaatcagagaacctagggtgtgtttagttcatgctaaaattggaagtttggttgaaattagaacaatgtgatggaaagttggaagtttactccctccgtccttaaaaaaaaaggcaaaccctgagtttccttgtccaacgtttgactgtccatcttatatgaatttttttataattagtattttcattattgttatatgataaaacatgattaatactttatgtgtgacttatctttttaatttttttcataattttttcaaataagatggacggtcaaacgttagacacggaaactcagggtttgtctttttttttgggatggagagagagtatgtgtgtaggaaagttatgatgtgatgaaaaagttaaaagtttgaagtaactaaacaagcccctagaactaacaaaactaatttggacctgctttagaataaagtcagctgttaatttatgctgactgaccccactgacagaaagtgtgcggctcaggtatgtatgcgattgcagcttttatgcaaggttactgatgtaaacaaaattcaaacgcagtcataccttcgttcacattccaaacgatgtaaacgaaggtgcacatgtcgagccagacatttggttattagttttatcgcaaggaaaattgtagtaatgcgaaaaatctattcatcccttaatccccttgtttttcatgtcatgtaaaaagtcatcaaaaaaattttaaaaaaatttagtatgatagatcaatatgtgatgtgtcactttcacagacatgcatattcaaattcaactaattatataagtagaaacaaaaataacaaatttgactatgaatagaacgtgtaattcacggtcaaatttgttatttttgtttcgaattgtataagtcaaattttaacttgtatatttgcgaaaagatatatcatatattgatttatattgacaatttgttttaaatttttttgataactttttgaacaccatgcacgaaacaaggggatgtcccctcaagggacgaaaatctacttccgcagtaatgtaggttgtatggcgtgatttttcaggattgcaagcatattgttttgaa

SEQ ID NO: 41524 - DNA, 1528 bp, Oryza sativa
tttataaggacttgtactcttagaaccggtaataaagcatttttaggctgtgttcgttacttatgtaggggagcaaatccctctcgcacggaaaacagagcggtttattagcacgtgatttattaagtattagctattttttttaaaaaatggataatatgattttcttaagcaacttcgtatagaaactttttttttaaaaaaacataccgtttattagtttgaaaaacgtgcgcgcggaatacgagagagaggggttgggaacatggagcaaagtactggtttttaatctagctgaaatatttttgtttttggtaccacaaagaaagatcagttctccagtagtgattacacacactgtaacagggaaaaatatataaatatgataaactaaaattagaattatttgggggaaaaattattttcactctggatccactcgtctcagttctttacctcgttaagagaaagaaaactcaaatgattgagaaaatataatagctcgtaatagttaattttgaagaaatcgtgacatagagcggtgtaggctcggtatgaacaccagcgactacttgttgacattgctgtcaagtgtcaacttatttattatttcttatttttgaaaccgagcctgcaattgctggtgcatggcctcgtcgagaacctatgggagcattttctccttcacgcgcacgacgttatctgctcaaggatgacatgcggcgattttgatggttttgcccaagactaacagacacataaacacatctagtaaagataaacataaacacaaaacacacttgtatagaaggaactctgctaactcagctcaactcaaattctcattcatatttacaaagcctgacatatatataggttagttgcagctagtgcatcatgtaattaattaggaccagtactataatatcccatatattgcctctaaaaatgtcacattagattgagtgacgaggtggagaaaagaagtgaggagagagatgatgagccacccctaaatcaagattcaagaggcaacctagctccacacaaattttaagaaatgtgtgaaaatattagagatatttgtatttgtatactaggggtgatacattgtatgggttgtctcttagttcatgagtaaataaaatagataaatttggagatggtagttacatctaacatagcacttgcccttagagcaagtttaatagtatagcccattattgcctccaattcatctatagccaatctaatagccaattcatacaatagttgcttactatactattaatatatggtcccacttgtcatacacacattgcgccttgaagtccgtgctacagctggctaagatctgtagcacgctgctattctctctcatctcttatctcatgaaaatatgtttgcagctaggtaataatctgctattgtacctgctatagcaggctataagccagctataaccacgtattgagaagaaaagagaagagagagaagaaagcagctataaccacgtatcgagaagaaa

SEQ ID NO: 41525 - DNA, 712 bp, Oryza sativa
ggagacggtcggcgaggagaagcgattccctccctgcttgcccgtggctggttcttctacgtgtagaacaccgcgctcgcggctgagcgccgccgcagccgcctcccccgccactcatctcgccgcggccactgccggtggcgcttccctcctacgcgactcgccggcggggccgagcgggaggcggcgctggcggtgccggtggggaggggcatcaggagggtggggcgcgttgggagggaggggcgccgtgtggggaggggcgtcgggaggtggggcgctgacggggaggggcgttgggagggtgggtggccgcccggtggcggtttggagcaagagggaaggggcagcgcaggatttgacgacgtgggcggggaagagacgtgggagcgttaatctaatgctaatccgagtgctaatccctgtgttaatccaactcgcgatgtggatcgttggatgagaggatctgacgattagaaataggtgggtgtactgaagaggaaactggtgctttttatatcccatcttctagaaagtcaagacgatagttctgcttagaagaagccacatcatcgatttcttttctcaccataggattgattattgatggcacagattgccatctcatcaccttgcccctatccatttcctctcctttccgtttctgcttgagaaattagagcgaaaactaacacaattaattagaccacga

SEQ ID NO: 41526 - DNA, 561 bp, Oryza sativa
gtatactttaaaaattttacacccaaagaactaaacacaccttatatgaaatttattgtcaaaacttttttcttggagggaaaggggatttaaaaatgtttgaaaaggaaacttgttcactaacactactaacatgtataaatagaaacttgtagattatgatttgtttttacagtattattgagcaattcaccttgaaaggagatgatcaaaagtctctcgcagcaatagtctaatgacacggtggatatgttgcatttgcgtgcaatttttctaacattatgaatattttcattaaattttagcatacaaactttatcgaatgcatgcttaatatggtagggaactgaaataaaacctaaagaaaactaacacaaggtcatcatggacaaacaactttcacaaaaagtggtagccttccacatagctaccatcaatcaaacgccaagacttgaccaaagatatctgagagccgatcattccaacaaacccaaaccgaagtgaccaattcatcgaaggaaccaaccaaccaacaagccctgttcctcccaagcattattt

SEQ ID NO: 41527 - DNA, 2130 bp, Oryza sativa
attcgggtaataagggagaaatgtgtaatacagacaaattctaagaggattcttttggaagatgcggatatgtgatcatgtgtacaattgtttactgacaaaggagacctagggtctcgtgtcagaggaactatattctaacctcgagttaataaccaacctgttgatggaaagaaaaccaattaaactgtgttgggttaaaaagccaatgagatagtagttggggataggagtttggatacgcctttttacagatcaagataaggattgttggatgaaacccataagggtacccgccatgcctctacattgttaagttcggatatacctgcaaacagttaagaaaatccaggagacatcaatatttgagaacatagtagtcgatggttggtaattagtttatctggtatcagaaaagggtcaaaggtgatatggcagaagaacaatttggatgctccccatctcgaggaagcactaaagatgaccatcggcaattaaaccctagtggtatagatacagatagcaggcaatgtatttccctgaaggtagtcagtgcagctttttgacgaaccacatcaaggtttcactgaaaggcagcaagccaaaggacctcatcgtccccagaagcgtccgcaatccacattaaagaataccacctgttcgagataagccaaaagatgattgataaaagagattggcaaagatgttctccagcatgaaagaagtaggccgaaaggtgattgataaacagaaacatgctctgcaccgctcaaggaagacccctgattgtaattgccccgcaacagtcaccttgtcattaagtaagcaagatgacctaggtaaaagtgtttctatgaaggcaaagagtgaaaccttcaactcggtatcagatgctacacggagtgaaaagtgcaagcaccggttaccaggtaatgccatgtcttgggagatgatccaatgggaaagagcacatcaaggttaaaggtgtaaaggaatacgttgaatgctaactgaggacaacctgaagataataatgggaagtaaactgaatgtaaagaaagtgaatccgagttgcttgttcatgggagctattcccagttatgaaccaagtgatatgttcgaagatagtttacagaggtcagattaaaatcacatgtaacagcgaagcttcagatttggcagggtaacgatcaaacaataacaagtccagcagtaaagtcatctggaaaggcgtcaaagcatgtcaagtgggataagttggctctgttgagaaacataactgaaaggcgaaaattatcgacccttgcatcgaatagcagaagtacctagcaccggagaccaggaaagctaatatgagacagttaatggcaagttgtcaatcatggtatccttagtaagcgggatatcatagtctaaagcctatggtggtaagctggaaggaaacgccaagcctggtattctcatgatgacaagcatggtatcctagtaatgacaagcaggttacggcacatgacatgaagttgataacttgtatgaggttgactccaaagatatgaactatgcgaagttctggaactgaagccccatcttcaagtgccgcaacccagtcgaagtcagctaaaggttcaaccctggttcgagtcaggtgaaaagaagattccacctgcaacaggagatcgagccaagcagtccagagtggagaagctttgttaggcaagtttgttatagaaagcggagcggaagaagtcagacaagaagagaagaccgcccaacctatcttcatgctagcctcctcgaatctcggggacgagattcttgtaaggggggtggatttgtcacgtcctgataaattcatcccgaaataaaaatcattttctaaaaggaataatagaattaattaaaattcgaaaagaaattggcaaacactaaaatacgtacaagaaaaattcgaatgtggcccggagaatttttgttaaattctccttggtctaaaaggagccctcaaattttagtggaattttcagagcacaaataataattattaagaaataaacaaagttaaaatggttttataaaaagaaaaaccctaaaaagtcttcttttccccccttccccctcttgggccggctc

SEQ ID NO: 41528 - DNA, 1209 bp, Oryza sativa
agaatatactgtagtgaattagtgatggcaaaaggacagaatatactgaagaccaatcgaatcgacctacatgcgaatatagtattgctactgcaatactgcaaattgagtggtggtagactggtagtagaatggatgcagaggcatatatatggagcaaaagaagcataggaagcaagcatgcataagcagcaggtaactaatgaaattaaggcgaattgaagaaggatcactgatcagttaccgcgtgggagtgagtgatggagcgcaggatctgcagcttctcgtgtagagcagctgccttcttgcgttctctcgacatcatctctaaaattctactcaagtgtgtctgtgtctttctactttatttctcgcttcaatggagacgagcgagcgcgggtgtctagctagctacgacctgctgcttcaaaggaaggtgatgagtactgatgatgagaggctttctctacgtctttatagtggtatcctgcgcggtcgcgtacccacgtgatgttatggtgtctttagctagctaggaaatgaaatgaatgaattgaaagggaaaccaagaggacgaagaaaagattctgcacatgcgaactgttcatatatatagtagcaagtcaattatgctagctagcaacgtgagagacgttttagtttcaggaggccaggattgttggaggagcaagaactagctagttaaattggagtttgccccgtttactaacgtactgcagagagagtctttcagagtttttccctgcatatgcactcagttttcatctgctgcttgcccatgcatgttggcgaccgatcgatgctctaaattgtttaatggtatctgcatggttgacaaacgtgcggttctgaactgaaatatttgggttgcgtatacaatgaacctataagatcgatgagagaaacatgcattagtcaacaaattaaacacgtacaaagcaatgtggacagacctaataaacacgaaagtaaacaaaacgatagaactagatgtgtctatctatccttactactccagtatgtaacagaaacaattaatgaaaccgatgaataaaagcagatggagcctgagaattgaagtggacaggtcagaaaatgcgcgcggttgctagctaggagtactctaaagcttagctagctgtgcgtgcgttggagggttgcatgccacgggttgcgtggctcggtctt

SEQ ID NO: 41529 - DNA, 788 bp, Oryza sativa
ttaagacagtaaactgaaacatcaatgaacaatgaatgaactgaatagtgaggttttctgaaagttaaattttacactgatgtcataaggaatacatacatggaagaacagcaaaattacagccaataaaatttcacttcagtttaatcaatatcagcaaattagacctatttttttgcatgagattatggtatgttagtgtataccaaaagataacagagcacctggtgctcaaaacttttaacaagcaggagaatttatttagtacacaatgaaaaagcttttcctagaactggaggtcagtcaagtcctgaatacaggtcccacttctgtttgctgaatggcgttcaaggaaagataattgcaaaagaattttatgacaagaccactctcaccactgctctttgttctggaaggtgattctacaggatttattgaataaaaatatgcatcaggattgatttcccttaaatatggacatgaagggacacttcattctctcatcttctgaaatgatgatggctatagagttataagagaatctacaaataaattattgtttctcaaaggaagcttgcaaatattttttgatttcaaggtttaacgtgaataattccaaatattccagtccctcttaacttatgcccagataatatgactctacttgctggactgagtagatgaaaaatgagtctttttcatttacattggattgtcactcacagttgagacccaaacttaaggccttgttcggtttggaggggattgatggggaataattccacacc

SEQ ID NO: 41530 - DNA, 822 bp, Oryza sativa
acattttcattccggtcaaaaacatcgcacccatgtgggccaatatatgccaatattgacattatttgacaaaagttagccacgcgaatcacgaaatgtgtttttgccacgaacacacccgatacactccaatatgtccaaaaatcatgttttggtgttttttgaactttttgattccagtacaaaacatcgcaccctggtgtgccaatattggcattaattgacaaaagatcgccgcgcgaatcacgaagtgagtttttgccacgaacgcacccaatacactccaatatgtccaaaaatcatgctttggtgctttttgaacattttcattccggtcaaaaacatcgcacccatgtgggccaatatatgccaatattgacattatttgacaaaagttagccacgcgaatcacgaaatgtgtttttgccacgaacacacccaatacactccaatatgtccaaaaatcatgttttggctctttttgaactttttgattccagtagaaaacatcgcaccctggtgtgccaatattggcattaattaacaatagatcgccgcgcgaatcacgaagtgagtttttgccacgaacgcacccaatacactccaatatgtccaaaaatcatgctttggagctttttgaacattttcattccggtgaaaaacatcgcaaccgagtgggccaatatatgccaatattgacattatttgacaaaagttagccacgcgaataacaaaatgtgtttttgccacaaacacaccccatacacaccaatatgtccaaaaatcatgttttggctttttttgaactttttgattccagta

SEQ ID NO: 41531 - DNA, 2647 bp, Oryza sativa
cttcagttgctgccgactgagatggaatttggcaatgaggcttgatgcattggaaagagaactccgagagctttccatcaagtactcacgggctgaaaacggaggtcgtatggagtttcggcggccgtttgaagtcagcagtgtagcaggtggccgaattggattttggcacttggaggactcgaacttgatatcttgttgttcatccatgatgtgagcaacggatgtatccgtagtagccatggtcacatcagaatcacgaagtgagtttttgctacgaacgcacccaatacactccaatatgtccaaaaatcatgttttggcgttttttgaactttttcatttcagtagaaaacattgcaccctcgtgtgccaatattggcattaattgacaaaagttcgccgcgcgaatacactccaatttgtccaaaaatcatgttttggcgttttttgaactttttgattccggtcaaaaacagcgcacccttgtgagccgatattggcattaattgacaaaagttcgccgcgcgaatctcaaagtgagtttttgccacgaacacacccaatacactccaatatgtccaaaaatcatgttttcgagttttttgaactttttgatttcagtagaaaacatggcacccttgtgagccaatattggcattagttgacaaaagttcgccgcacgaatcacggagtgagtttttgccacgaacgcacccaatacactccaatatgtccaaaattcatgttttcgcgttttttgaactttttgattccggtcaaaaatatcacaccctcgtgtgccaacattggcattaattgacaaaagttcgccgcgcgaatcacgaaagtgagtttttgccacgaacgcacccaatacactccaatatgtccaaaaatcatgctttggtgctttttgaacattttcattccgatcaaaaacatcgcacccgtgtgggccaaaataagccaatattgacattatttgacaaaagttcgctgagcgaatcacgaagtgagtttttgccacgaacacacccgatacactccaacatgtccaaaaatcatgctttggtgctttttgaacatttttattccggtcaaaaacatcgcacctgatgaggacatcaacaccatcgatacatccacgtccccccatatacagcatgatggtcctattacccgcgctcgtgcacgtcaactaaattatcaggtgagttctttcttgagttcatattcctcgtctttataccccggagacgcgtgcactcgtgttttactcaggaacgatggagaggatccaaagggaagaggattcgcgcggggtggattcggactgcagggcagcgccaacttctgacggccgccacgacttcatgcgaactccgatttgggcgtgcaagtactacatggaaagcttatcaagtctactttcaaatggatccagccacatgtccatatctgttctggagcggccgcaattgtcattttactcccgactattttctgtccattgtgctgcgtcacctcttttggcccaatgggctgtgtatccatgttgggcccattaggggcgcgtcctatggttggagcacgaccctatggtcgttcttcccctctttttatacctctagtcgccgccaagaacaggcgggtttttgatgatagagatagcttcttgctactggctcacagcgcgcgtgttggctaaaccgcccgtctgcctgtaatcggaaccccaccatattgtgtttgatagtgaaactttcatctttatctagcaatctcagtgcttgtcctacttgttcttgcttgttcttcgattgcttgcaggacgagtgccctcgtggccgggttgacgcgcaccacaagttcgcggtgaccattggagacggtgtatcggttgctaaggcgcagcgtctttggacagttgtagtcgggccgtgaacgtcgacttcatctaatcgagttatcccttacctctcatcgaaagatcgggccacaaaccctagcgggttcgcatcaggtggtatcagagcgtggttcatcggtgagagaatttacccttcccttcgtcattaatttttttttccgatagtccagaaaagaccaacaaaaaaaatagtagattagtttttccatgatcctatagaccattgtgccttttcactagtactgcttagttaaggcttgttgagttttcgattgcatcggttgtgttaatttgctggtcttagtgttaggcgattacagtttcgagttcttgccaccaccgcacaacgctaccttcatcaattttgccgtcatcaccaccgtcaccaccgtcacagtcacccaccaaatcactttctatttgtgtttgatctgttgccgatagcttttgttagttgccttgtatcctgccgccactagaaaggaaatagaaccctgattcgagtgaccttccttaaaacagtcatatctttttcatacggactcgaaattaggcttataatatatccacgaacatctacaaaaaaagtacatccgattctccccgctttgccgggttcggcaaatttaaaatcgccaaattcctcttgcaaaattctgtttttgtggcgagaagcttcgggacctattcgcatagaactttgaaaaaattcta

SEQ ID NO: 41532 - DNA, 1365 bp, Oryza sativa
tttgggaccccggcccaggtggggcccatgtggggtgcgccccaagctggtggagcacgaccctaggcacccctaggtcgtcctcccacccctatatatagctagttaccccttcagggtttcttgggttttgtttagatgaaagtttagccattgctacttcgcttgcagcgcgcgtgtcggctagaccgtccgtctgcttgtattcgaaaccccaacttatcatttgtattaaattcctatttgcaatatcagattgcttttatcttgttcttgcttgtttcttcgatttgcttgcaggaatagggttgatctgcaccggcaaaatcagcaacccacggagaggtgtatcgatcgctaaggcgcaacacaacgtctcgtacggttgtagtcggatcgtcaacgtttctcccaaatcgtagttatcacaactcaccgaaagatcgggccaacaatagccttgagtgtcgcgaacttttgtcaattaatgccaatgttggcacacgagggtgcgatgtttttgaccggaatgaaaaagttcaaaaaacgtgaaaatatgatttttggacatattggattgtattgggtgcgttcgtggcgaaaactcacttcgtgattcgtgcggcgaacttttatcaattaatgccaatattggcacacgagggtgcgatgttttcttcaggaatcaaaaagttcaaaaaagtccaaaacatgatttttggacatattggagtgtattgggtgcattaatgccaatattggcttatttcggcccacacgggtgcgatgtttttgaccggaatgaaaaagttcaaaaacgcgaaaacatgatttttggacatattggagtgtattgggtgcgttcgtggcaaaaactcacttcgtgattcgtgcggcgaacttttatcaattaatgccaatattggcacacgagggtgcgatgttttcttcaggaatcaaaaagttcaaaaagcaccaaaacatgatttttggacatattggactgaatcgggtgtgtacgtggcaaaaactcattacgtgattcgcgtgggtaacttttgtcaaataatgccaatattggcatatattgtcacacatgggtgcgatgtgaacgaccggattgagaatgttcaaaaagcaccctcgcatgctgttatgacatattgtagagaattgggtgcgtacgtagcaaagactctgttagtgatacgcgcgcgcaacttttgtcaattaatgccggcattgcacatgagggtgccatgtgatgactggaatcaaaaggatcacaaagagccaaagcttgattttaggacctaatggagtgcatggcgtgcattagtcgcaaaaactcactacgagattcgc

SEQ ID NO: 41533 - DNA, 2469 bp, Oryza sativa
acatattggagttattcgggtgtgttcgtggcaaaaacacatttcgtgattctcgtggcgaacttttatcaaataatgtcaatattggcatatattggcccatacgggtgcgatgtttttgaccggaatgaaaatgttcaaaaagcaccaaaacatgatttttggacatattggagtgtattgggtgcgttcgcggcaaaaactcacttcgtgattcgcgcggcgattttttgttaattaatgccaatattggcacacgagggtgcgatgttttctgctggaatcaaaaagttgaaaaagagccaaaacatgatttttggacatattggagtgtatcgggtgtgttcgtggcaaaaacacatttcgtgattcacgtggcgaacttttatcaaataatgtcaatattggcatatattggcccatacgggtgcgatgtttttgaccggaatgaaaatgttcaaaaagcaccaaagcatgatttttggacatattggagtgtattgggtgcgttcgtggcaaaaactcacttcgtgattcgcgcggcgaacttttgtcaattaatgccaatattggcacacgagggtgcgatgttttctgctggaatcaaaaagttcaaaaagagccaaaacatgatttttggacatattggtgtgtatcgggtgtgttcgtggcaaaaacacatttcgtgattcgcgtggctaacttttgtcaaataatgtcaatattggcatatattaacccacgcgggtgcgatgtttttgaccagaatgaaaatgttcaaaaagcaccaaagcatgatttttggacatattggagtgtattgggtgcgttcgtggcaaaaactcacttcgtgattcgcgcggcgaacttttgtcaattaatgccaatattggcacacgagggtgcgattgatatatactggcccacgcaggtgcgatgttttttaccggaatgaaaaagttcaaaaagcaccaaaacatgatttttgcacatattggagtgtattgggtgtgttcgtggcaaaaattcacttcgtgattcgcgcgacgaacttttgtcaattaatgccaatattggcacacgagggtgcgatgttttctgctggaatcaaaaagttcaaagaagccaaaacatgatttttggacatattggagtgtattgggtgcgttcgtggaaaaaactcacttcgtgattcgcgcggcgaacttttgtcaattaatgccaatattggcacacgagggtgcgatgttttctactagaataaaaaagttcaaaagtgccaaaacatgatttttggacatattggagcgtatcgggtgtgttcgtcgcaaaaatacattttgtgattcgcgcggcgaacttttgtcaaataatgtcaatatcggcatattttggcccacacgggtccgttgtttttgatcggaatgaaaatgttcaaaaagcaccaaagcatgatttttggacatattggagtgtattgggtgcgttcgtggcaaaaactcacttcgtgattcgcgtggcgaacttttgtcaattaatggcaatattggcacacgagggtgcgattggtacatattggcccacacaggtgcgatgttttttaccggaatgaaaaagttcaaaaagcaccaaaacatgatttttgcacatattggagtgtattgggtgtgttcgtggcaaaaacacacttcgtgattcgcgcgacgaacttttgtcaattaatgccaatattggcacacgagggtgcgattggtatatattggcccacacaggtgcgatgttttttaccggaatgaaaaagttcaaaaagcaccaaaacatgatttttgcacatattggagtgtattgggtgtgttcgtggcaaaaactcacttcgtgattcgcgcagcgaacttttgtcaattaataccaatattggcacacgagggtgcgatgttttctactggaatcaaaaagttcaaaaagagccaaaacatgatttttggacatattggagtgtattaggtgcgttcgtcgcaaaaactcacttcgtgattcgcgcggcgaacttttgtcaattattgccaatattggtatatattggccccacacaggtgcaatgtttttgaccggaatgaaaaagttcaaaaagcaccaagacatgatttttgcacatattgcagtgtattgggggcgttcttggcaaaaactcacttcgtgagtcgcgcggcgaacttttggcacacgagggtgcgatgttttctactggaatcaaaaagttcaaaaaacgccaaaacatgatttttggacatattggagtgtattgggtgcattcatggcaaaaactcacttcgtgattcacgcggcgaacttttgtcaattaatgccaatattggcacacgagggtgcgatgttttctactggaatcaaaaagttcaaaaagcacaaaaacatgatttttggacatattggagtgtattgggtgcgttc

SEQ ID NO: 41534 - DNA, 1525 bp, Oryza sativa
cctatcgtgcatagctaccttaagttcttcccaagtagtaggtagtaccccctcatcagataacccagcccactacatgatagcaaaatccttgaactcactactagcttgtttaactctatgttgctcaggtacaaggtgggcattaaacttttgttctattgccatctcccaatcaaggtatttctcagcatcataatatcctgaaaaagatggtattttaaacttaatcttagcataaggatcatctggcacacgattattattaccttgttggtggcgagtgccacccatacctgtgcggtttatgcgtaggcgacgtcatagccgtgcttgccttgtagctggtgtgtcaatatagccactggaatcatacaccgtgtcttccgaatgagcatcgtcgtcaccactcaccacttcctcattggaaggtgtctccaacgcggcaacccgatcagttagcgtggatatctgcttgtccaacctctccatgtggttcaggaagccaattttagtgaaggcatcttggacagactttgcaacggcctctgataccacttgatgtgcactagggttcccgatcttccgaaaggttctgataaaaaacgatttgggcggagtcgcgacacaaatcgatccggcttcttgaacgcgcacgctcttgagccccgcaatcacaacaccacgtctcctctggttatcacctgtgtcgaaacgcggatgacctcgccaagaaggctaatccctatttgccaatcgaagaacacaaacaagaacgagatagaaaacaaccaaaattgcagatgaatgataagctcacgagatggggtcttacaaaccgatctagcggcgaaactgttctcgacagaataatctaagcaaaactctaaaacctaaagatggtagcggtactgatatatagagtttaggctcgtgcaaccccctctcgacgcaaccctaatgggttccaacacgatacacggcccaaaggcccaaatacggtgacacagcaccgggacggattctggatgtcaacttgttcagtcgatacccattgactcggaaagtatttggacgtgggaccaaaaccattggaaagaacgccccaatccgagcacgtatgcgacctgggcgcccgttttagtgcagactggtcctggactccgaattgcaccgaggtcgaattggtttgggcctccacctttacttggacgtcctcgatgatcctccatggctctaagtccttctccaagtgtctccttgtcccctctattatttctaatcacaatatattcattaggtagcaatcttttctcgaattcatacaaagaagaacataggaacgagctcacctctaaatttaattgtcgcgcacgagctcttgttatcagtccttgaatgaccattggaggattgttgtgtgtatccgaggtagtgatgtccgtatcatgtcgcggagcttcggcgtcttccatcaagatattagctgatgaacgagtgctagacccgtcatgatgacttgatg

SEQ ID NO: 41535 - DNA, 1001 bp, Oryza sativa
tttgccacgaacgcacccaatacactccaatatgtccaaaaaatcatgatttggtgcatttttaacattttcattccggtcaaaaacatcgcacccgtatgggccaatatatgccaatattgacattatttgataaaagttcgccacgtgaatcacgaaatgtgtttttgccacgaacacacccgatacagtccaatatgtccaaaaatcatgttttggctctttttcaactttttgattccagtagaaaacttcgcaccctcgtgtgccaatattggcattaattaacaaaaaatcgccgcgcgaatcacgaagtgagtttttgccgcgaacgcacccaatacactccaatatgtccaaaaatcatgttttggctctttttgaactttttgattgcagcagaaaacatcgcaccctcgtgtgccaatattggcattaattgacaaaagttcgccgcgcgaatcacgaagtgagtttttgccacgaacgcacccaatacactccaatatgtccaaaaatcttgctttggtgctttttgaacattttcattccggtcaaaaacatcgcacccgtgtgggccaatatatgccaatattgacattatttgaaaaaaagttcgccacgcgaatcgcgaaatgtgtttttgccacgaacccacccgatacactccaatatgtccaaaaatcatgttttggctctttttgaactttttgattccggtcaaaaacatcgcaagctcgtgtgccaatatttgcattaactgacaaaagttcgccgcgtgaatcaagaaatgtgtttttgccacgaacacacccgatacactccaatatgtccaatatcatgttttgttgcttttcaaaatttttcattacggtaaaaaacatcgcacctgtttgggcgaatatataccaatattggcattaattgacaaaagttctccgcgtgaatcacgaagttagtttttgccacgaacgcaccaaataagctgggctgcaggaatt

SEQ ID NO: 41536 - DNA, 617 bp, Oryza sativa
gcccccgtgtgggccaaaataagccaatattgacattatttgacaaaagttcgccgagcgaatcacgaagtgagtttttgccacgaacacacgcgatacaatgcaacatgtccaaaaataatgctttggtgctgtttgaatattttcattccggtcaaaaacatcgcacccgtgtgggccaaaataagccaatattgacattatttgacaaaagttcgccgagcgaatcacgaagtgagtttttgccacgaacacacccgatacactccaacatgtccaaaactcatgctttggtgctttttgaacattttcattccggtcaaaaacatcgcacccgtgtgggccaaaataagccaatattggcattaattgacaaaagttcgccgcgcgaatcacgaagtgagtttttgccatgaatgcacccaatacactccaatatgtccaaaaatcatgttttggacttttttgaactttttgattcctgaagaaaacatcgcaccctcgtgtgccaatattggcattaattgataaaagttcgccgcacgaatcacgaagtgagtttttgccacgaacgcacccaatacactccaatatgtccaaaaatcatgttttcgcgt

SEQ ID NO: 41537 - DNA, 926 bp, Oryza sativa
ctcacttcgtgattcgcgcggcgattttttgttaattaatgccaatattggcacacgagggtgcgatgttttctactggaatcaaaatgttgaaaaagagccaaaacatgatttttggacatattggagtgtatcgggtgtgttcgtggcaaaaacacatttcgtgattcacgtggcgaacttttatcaaataatgtcaatattggcatatattggcccatacgggtgcgatgtttttgaccggaatgaaaatgttcaaaaagcaccaaagcatgatttttggacatattggagtgtattgggtgcgttcgtggcaaaaactcacttcgtgattcgcgcggcgaacttttgtcaattaatgccaatattggcacacgagggtgcgatgttttctgctggaattaaaaagttcaaaaaagccaaaccattatttttggatatattggagtgtatcgggtgtgttcgtcgcaaaaacacatttcgtgattcgcgcggcgaacttttgtcaaataatgtcaatattggcatattttggcccacacgggtccgttgtttttgatcggaatgaaaatgttggcacacgagggtgcgatgttttctgctgcaatcaaaaagttcaaaaagagccaaaacatgatttttggacatattggagtgtattgggtccgttgtcaattaatgccaatattggcacacgagggtgcgatgttttctgctgcaatcaaaaagttcaaaaagagccaaaacatgatttttggacatattggagtgtattgggtgcgttcgcggcaaaaactcacttcgtgattcgcgcggcgaacttttgttaattaatgccaatgttggcacacgagggtgcgatgtttttgaccggaattaaaaagttcaaaaaagccaaaccattatttttggatatattggagtgt

SEQ ID NO: 41538 - DNA, 674 bp, Oryza sativa
attgaagcaacaatgtgttgcatcacctgtcatgggcctttgggcttgtaacttcgtttgggaccccggcccaagtggggcccatgtggggtgcgccccaatccggtggagcacgaccctaggatcctcatggtcattctcccacccctataagtagctagataccccttcagggttgctggggttttgataaattgtaagtttagccattgctacttcgcttgcagcgcgcgtgtcggctagaccgtccgtctgcttgtttggaaccccactttatcgtgtatcaattcatatttgtgcgtcttgtctatctagcaattcagttgctttctatcttgttcttgcttgttctcgattgtgtgcaggaatagggttgatctgcatcgacaagatcaacaacccatggagaggtgtattgatcactaaggcacaacagaacgtcttgtacggttgtagtcggatcgtcaacgtttctcccaaatcgtagttatcacaactcaccgaaagatcgggccaacaacagccttgagtgtcgagaggaactcagggttcatcaggtggtatcagagctttcgttgctcggtgagtttttttctacctataatcagaaaatagctatacaaaaaaatttacatcatgtccctagccatctttgtgccattgctttgttctat

SEQ ID NO: 41539 - DNA, 1755 bp, Oryza sativa
aaataagctccaatatatccaaaaataatggtttggcttttttgaactttttaattccggtcaaaaacatcgcaccctcgtgtgccaacattggcattaattgacaaaagttcgccgcgcgaatcacgaagtgagtttttgccacgaacgcacccattacactccaatatgtacaaaaatcatgctttggtgcttttcgaacattttcattccgatcaaaaacaacggacccgtgtgggccaaaatatgccaatattgacattatttgacaaaagttcgccgcgcgaatcacgaaatgtgtttttgcgatgaacacacccgatacactccaatatgtccaaaaatcatgttttggcattttttgaacttttttattccagtagaaaacatcgcaccctcgtgtgccaatattggcattaattgacaaaagttcgccgcgcgaatcacgaagtgagtttttgccacgaatgcacccaatacacaccaatatgtccaaaaatcatgttttgttgctttttgaaatttttcattacggtcaaaaacatcgcacatgtttgggccaatatataccgatattggcattaattgacaaaagttctccgcgtgaatcacgaagttagtttttgccacgaacgcacccaataaactccaatatgtccaaaaatcatgttttggcttttttgaactttttgattccggtcaaaaacatggcaccctcgtgtgccaacattgacattaattgacaaaagttcgccgctcgaatcacgaagtgagtttttgccacgaacacacccgatacacaccaatatgtccaaaaatcatgttttggcattttttgaacattttgattccggtcaaaaacatcgcaccctcgtgtgccaatatttgcatcaactgacaaaagttcgctgcgcgaatcacgaaatgtgtttttgccacgaacacacccgacacactccaatatgtccaaaaatcatgttttggcttttttgaactttttgattccggtcaaaaacatcgcacccgtgtggtcctatatatgctaatattggcattaattgacaaaagttcaccgcgcgaatcacgaaatgagtttttgccacgaacgcacccaacacactccaatatgtgcaaaaatcatgttttggtgctttttgaactttttcattccggtcaaaaacagcgcacctgtgtaggccaatatataccaatattggcactaattgacaaaagttcgccgcgcgaatcatgaagtgagtttttgccacgaacgcacccaatacactccaatatgtccaaaaatcatgttttggtgctttttgaactttttcattccggtcaaaaacagcgcacctgtgtaggccaatatataccaatattggcactaattgacaaaagttcgccgcgcgaatcatgaagtgagtttttgccacgaacgcacccaatacactccaatatgtccaaaaatcatgttttggtgctttttgaactttttgattccagtagaaaacatcgcaccctcgtgtgccaatattggcattaattgacaaaagttcgccgcgtgaatcacgaagtgagtttttgccatgaatgcacccaatacactccaatatgtccaaaaatcatgttttggcgttttttgaactttttgattccagtagaaaacatcgcaccctcgtgtgccaaaagttcgccgcgcgactcacgaagtgagtttttgccaagaacgcccccaatacactccaatatgtgcaa

SEQ ID NO: 41540 - DNA, 926 bp, Oryza sativa
caaaatatgccaatattgacattatttgacaaaagtgtgttttgccacgaacacacccgatacactccaatatgtccaaaaatcatgttttggctctttttcaactttttgattccagtagaaaacatcgcaccctcgtgtgccaatattggcattaattaacaaaaaatcgccgcgcgaatcacgaagtgagtttttgccgcgaacgcacccaatacactccaatatgtccaaaaatcatgttttggctctttttgaactttttgattgcagcagaaaacatcgcaccctcgtgtgccaatattggcattaattgacaaaagtttgccgcgcgaatcacgaagtgagtttttgccacgaacgcacccaatacactccaatatgtccaaaaatcttgctttggtgctttttgaacattttcattccggtcaaaaacatcgcacccgtgtgggccaatatatgccaatattgacattatttgacaaaagttcgctacgcgaatcgcgaaatgtgtttttgccacgaacccacccgatacactccaatatgtccaaaaatcatgttttggctctttttgaactttttgatttcagtagaaagaatcacatcgtcgtgtgcaaaaattggcattaattaacaaaagtttgccgcgcaaatcacgaagtgactttttgccatgaatgcacccagtacactccaatatttccaaaaatcatgttttggcgtttttgaactttttgattcctgtcaaaaatatcacacccgcgtatgccaacattggcattaattgacaaaagttcgccgcgcgaatcacgaagtgagtttttgccacgaacgcacccaatacactcaaatatgtccaataatcatgttttggcgttttctgaactttttgattccggtcaaaaacatcgcaccctcgtgtg

SEQ ID NO: 41541 - DNA, 679 bp, Oryza sativa
actccttggatttattttttaatttagcgagtgagtctgatccatgacatgtgtataaaaatatttaatcacaaaattgctacaatgtagctgaggtatttgcacggaatctttttgtcttacatcatgaacttagaaaaaaaatggaagaataatcatttcggcaatatgaaagaataatcatttcagtaatatggtaaaaaacaagatgctagagagatcacataacccagacatgattacaggactaatcaatatagcaatagaaaaggaaaagctcacacgaacaaatttaaaataatctatacagatagactacattgggaattattattgactactgaagactggcctaaactcatgtttgcttggactagaactgccatatgttgcttagtgacagctgcttgttcactttcgcttgccgaaagaaacagtaacaccccgatgccacctggccatgtaggaaaagaaaccaagttcatcagcaaagacatgacatttcttttgttgttaaagaagacatggagatagcgagctgatcaatagaatctagaaagacagataccttgccaatgtaactgcgtctgcatcaaaataatggacctgaaactaaacaatatagagcaaagaatggacatgaacatgcatgaacatgttttaatcaatcagaaataaa

SEQ ID NO: 41542 - DNA, 1229 bp, Oryza sativa
tttttggttgttgctggagttgggggattttgcgtgtccgggtggttggcgttgggggggaggcggctggttggagacgggctggaaggggggagcagagctttggtcgtggccacgctctacttggggcccacttgtcagtgactgtttatggactcgctagccaggctatgctcaagattattgaaaggcctctgctcgaattctatgtttagaatggattatatttccattttagtattgagttaaatccttagcggatagttttaaatgcctgtttttttttaaaaaaattataggattgagaaaatattaataaccgagaaagagcacaggaaagcgtggagagaattaggttgtgttcttttgagtgttgaaaattcttcctctcgacatgcaaaacggagtggcagattagcacatgattaattaagtattagcttaaaatattttaaattgaattaatatgatttttaaaataaacttttatagaacattttaaagaaaagttcagaaagagagtaaggtatactagtaagcaactagcaaaatactagacttctcaatttctcattgccttgctgtctccgttgcacttgcacttgatgtcatcaaatgtttggcacaaaccttaatatcatgtttattgatgttatctttacgcttatattttcgtgcaaccagatttggtaatttaaggttgaaacatggtgtgctggcctaggttcatcctcctcctcctctcattgaggatggtgtcaccatagctgaggcttcccaatacggagaacagtgcagtgatgagtagggtaaggccctgttcagggtaaaaagttttggcgtgtcatattgaatatacggacataaatttgaagtattaaacgtagatttaataacaaaacaaattacatattctgcttgtaaactgcgagatgaatttattaagcctaattaatccgtcattagcaaatatttactgtagcgccacattgtcaaatcatggagtaattaggcttaaaagattctgttgatgtgaaaaacacacactggcctggagatctgcttaactcatatgtaggtccaaaatcttgcttttaggttcgtgagcgtgccagttgatttgatcctgcaatcaacaagaaagaaagacaaaaaaaaccacgattaaatccataaatgatagccgatcggctagttgccgatgacatatcatttatcttcgagccgat

SEQ ID NO: 41543 - DNA, 1321 bp, Oryza sativa
acgggcgcgcggcgcggtgacgggacggttgcacggcggtaggcgggcgtgcggcgcggcgacagcgtggcagcggcggcgcggggcgcaaggcggcggcacggggctcgaggcggcggcacggggcgcgaggccgacggtgacgatggcgacggcgatggcgcgcggcgcgtgatgacggcgacgcgacggcgacgcggcgcggcagcggctacgcgatggacgggctcggggcggctaggggcagaggtgggagaggagggggaaggttagggaccacatcgaacaccttaggcgcaatgacagtgacttttcctatttatcccgattttagtgtattttccatctaaatttgattccacaattcctaattttacatatatgcattttactcaatattcgtgttatcttaactaatgaattcaccctagattaatattactcatattttatttttatataatttatttgagttttaattagggttaattcttattccatcgcaatgaaatttaattgatccaaatatggtcgcgataatattttatttattactatccacacctaatctttatttttaatttatatttattttaccaatttgtttttaaggtttatttctaattaactattctttactcacgattaataatcttcgagatcaactccagataaaatagaccaataagatcggcatgatgcaattagtttaaaaaagtttttgaaaatccgtatttttagagttttggttttgtcggtcgaattttcagggtgttacacggcgtcagaccagtcacagaccggtcattcttgtccaccacgtgtcagttcagcatgctacacgtctgcccttcttcatacaatgacttccttgcaatggttgcgatgaagcctggaatgtatctggccggggctgacgtgccaactccaggagttcccacgccggctccggctagggacgagtgcctggaggctctcatcattccgacgggacggggcgaggcgtgtgtcaggccgcctgttgccacctaacccgcgatctgaccggtctgtgaccggtcacacactgtgacctgtcacggaccgaacgagtgtgctgcgctgcattaaatgtggcgtggggcgctcgtccaacccgcaataaacgcggttaggtgagcgccgctgtgctcacctaacccacacacgtggcgccaaacccacagggggtcggggcgccccagccctcggggccgaaacgggagcggcccgacccctcgggaagacagagggaggggcggccacatcaccctcgggcccgacccctcccgaggggtcaggc

SEQ ID NO: 41544 - DNA, 582 bp, Oryza sativa
gcaactgtggtctttccttcctgtccaaacagttgtatcatacaccatgtctatacttgtgtgcgtttgagtgttacacacattgttctcttaaatataattgtaaatataaataaagtgcacatatgacgcctttttttaaaaaaaaaaatagttaccttatgttgtgctagtgctatgcataggataccgttgcttcattacagtgttaatgtgcttcatgaaataacatcaccaatttgttgttcaggaagttggaactttgctggttccacaaatggttcttctaggtttcttgagtttacaaaattgaagggcgatgcggttttggaactattaagtacaccgacaaagataagcggggtgcactatgttcaggtaatgcagttccccaccccaccaggtacatgaggccattctagtttactttcatttataagtccagttgagctgatgtcacatcctggcctcccacacccttcaaatagtccctgttgagccattcctacattggtgtaactcctttatccctgtagcctaaacttaattctttcccccgcccccttcatctcaatcaacttg

SEQ ID NO: 41545 - DNA, 726 bp, Oryza sativa
tccaataatcttatactaaaactcaaatagtcatgtattctaagtgtaactgtcgtatattagaacactacacaatcttatatgctaattaagtctaattacaaatctaataatcttaattgcattacaaatataacaatcatatatatataattatgtcacttgcctgggcgaattcctttgagggctagctctaccactccggcttgagggacgactccgacaacgtcttttctgcaagatacaaaaagatgtattaggataaacgcgaagtaacatatattgcatttgacgttcacgtttcgttcacgatatcgttcacgttcgcgttctcgttaaggtcacgcttcattcacctacgtttgttcgttcacgttcattcacctgcctataattgcatttcacgttcacgtttgttcacgttcgttcgctcgttcatgttatcgttcatgttcgttcgctcgttctcattcacgttcgttggctcgttcacgttcattcaccttgttctcgttcaagttcgttcgctcgttcacgttctcggtgtggcggcagcagagcggcggcggggcggcgcggcggcggcgtggcaccgcgcgcggcatcgggccggcgcgtggcgcggcggcgtggcgccgcgcgcggcatcggcttggcgcggtggcggcgtgcggcgcgcggcgcggtgccgtcgtggcgctacacccggtggcggcgcgttgcgcg

SEQ ID NO: 41546 - DNA, 1244 bp, Oryza sativa
gcactttactccataattaattacgttggtagttggttatgggcttgtggcttacaactttcagaagcttagaatatgctgggctgcatcatgatttctggccccaattagtattaagccactagcttaaccgggagaagatccaggccactttgccctaatgcccaacagatctccagaggctggcggcccatatagtttagttagtcaaagggtagcccaacaaaaaaatttctcttttccataaaaaaagactaacaaatctttgatttttcctagaagacttttgtaatttcaacggggaaaaatgaagaaagtgagaaaaactgaccctgaatttcaaaggggagaaatttcacgagaataaactagcaggactcgtggaagcacgcgtatcgtcgcgactcgcgactagccgagctagcttccttagctgccacagactagccagctagctgatgatatgatccccgattgtgcgtggaattccagggacaatgataaaaacggccaagaaaacaacgattttaatttgggggtaagatattgatggatgatgcgagtctacacatcggtctcaaggattatttattgacatgagagactaagggccagtttagtttgtcgctgaaattaaccttatcaaaatttattatttggtacactttggcgttatcaaattttgacaacgttagatatattcagtttgtatctttacaaaagaaaaatggtagtgtttgtatgagaagaagctttcaaaaatgctaaattattagtaatctggcaatgacaaaaatatatttagtttgttaccctactaaaataatactcctaccaaaactaaaattggtaggattaaaagtgaacaaatcgtatttgggagatgctcatgagagcacgcatgcgtgtaaagacctattgctaatttgttaatttgccggcttgacggtattcctaaatcttaagcactaagaaatgctgtatgattaatccagtgcatgaccattattcgtcagttggattcgggactctgccaaaccggaagctaaatatagctttcttggctgcaccctgcacattgttcactaattcaattaatctatcccatgaacaatcaagttttcttctcttctgaggccgagtttagttttaaaatttttcttcaaacttttaacttttccatcacatcgaaacttttctacatacacaaacttacaacttttccgttcacatcatttcaattt

SEQ ID NO: 41547 - DNA, 545 bp, Oryza sativa
atacgacagttacacttagcatacatgacaattttagtcttagcatataagattatttgagttttaatataagattattatatttgtaattagacttagtatataattattgactgctagggtcctataatatacgtcacctagacttagcatatatcactatttgagttttagtataagattattagattgtaattagacttagcatgtaagattatgtagggttctaatatacgacagttacacttagcatacatggctattttagtcttagcatataatattatttgagttttaatataagattattatatttgtaattagacagtatataattattgactagctagggtcctataatatacgtcacctagatttagcatatatcatcactatttgagttttagtataagattattagatttgtaattagacttagcatgtaagattgtgtagagttctaatatatgacagttacacttagcatacatgactattttagtcttagcatataagattatttgagttttaatataagattatta

SEQ ID NO: 41548 - DNA, 2037 bp, Oryza sativa
ccgggactaaagatagcgatctttagtcccggattggtagtcccggtttggaaaccgggactaaagggggttacaaaccgggactacaaagggtttcaacacattaactattcattctttgcataggagtactcattatttcactacctacacccataaaaggcacaaattaagcaaggcagcgttgaacaaagcagattaatatatgcgaagtagtaagcgaggtcaatggatgttgaggaaaaggtcagcgttcctaatttcacactaactttattgtgtcgttcaatagagctcggcggaactggtagccgcggttacgttgatttctaacataaccacaccatgccaaaaaaaaaaaagtttataaatagaactaaaacgtacgacttacataaaccataagtgaattaaacgaaatcaacatgactgcgagcgaatctacagtgatgaggtcaggtgacttggacaaaaagccgtatatatgatgcgggttcaaatatgatcagtactgctccctccgtttctaaatatttgacggcaaccattaactttttaaaatatatttgactattcatcttattcaaaaattttaagtaattattaattatttttttatcatttgatttattattaaatatacttattgtatacatatagttttacatatttaataaaacgaacggttaaacatgagctaaaaagtagaaacggagggaatactagttatgacaccaataaatacatatggcaaagatggtgtatcattagttttcggtatccaccactgttgcttgatagcaaaaatgctcaagtacttgcctctcatcggatcgacctatccgagaatattatcacgaattattaacactacatctttaaaaaaaagatatgttttctcattaagaaaatattttatgaagcctattttaatatggatgaattaagatacgagtgaaaagtttcctacagaaagaagaaagaaggttacatcggaagaaagcttataccagaagatatcttatcgcgaaggaagaaagcttataccagaagatatcttatcgcttaaaagaaacttacgtcgtgcaagaaagtaagcttgttgtggaagccatttcgcgagaaaagcaactttatggtgcaaaccaacttacatcgcaagctagcttacgatggaagtctttgatttcctccgcctataaataggaccccgaggtcgaaggcgatgacaactactctctccaacacctatcttccatctttagcttgtactcaaattcaaaagaaataaagtttctactcgtccatactttatgtgttccatagcttctatgtttatctccttttgtgttcatcagtagaatagcttggttccttaacacaacttacctagaccataagtaaattaaacgaaatcagcatgacagccaaacatgaggggatctacagtgtggtgaggtcaggtgacctggacaaaacccacatatagtatggtgcaagttcaaacatgattagtaattcagtactactagttatgacaccactaaatacattatgacaacgatgatgtattattagtttctgttatccaccactactgttgccgccaggtactccctccatcccatagggtatttgaatggatgggaccttgtccaaattttttttttgctagaatgtgtctcattcgtctaaaatctattttaggatgaaagaagtagcaaaaatgctcaaagtattcgtctcttatcggatcaacctgtccgagattgttgtcacgaattatttactctgcatctttaaaaaaatacgctctctcaaaaagaaaacattaccgcacttgtgttctactcccttcgtcccataatataagggattttgactttttatttacattgtttgaccattcgtcttattcaaaaaattaaatcaaatataaaaaacgaaaagttgtgcttaaattactttggataataaagtaagttaaaaaataaataataattctaaattttttttaaataagacgagcgattaaac

SEQ ID NO: 41549 - DNA, 1309 bp, Oryza sativa
tcagggagcgcgtcgcgtccgcaggggccgcctcctcctccggatcgtggggcgatgaggtgaggacaccgaggcgcgattgggaggtttcctccccacaccatttctgtcgcgggggtttaggcgaattcggtcccgacggggtagtgcaattgaagagaagaggccggggggagttggggagagatatatgctttgctctgcgctaaatttggtactccatgggtttaatttcgtagagggcttattttggtgccttgtttccttgcagtacaaacaattcgatggaaacagataactagtgttgaatttggaaaggtactgcaaaaccaaaatcggcgtctaggtttacaagtcaaattaggctattctgttcttggtaggcaccttgaattggatatgctggcatcccaactgactgtacgtttgtacctacatagacaccaggtgtagttggagtaagagtctactaggcgtctataagcccttgggaatatgaagaaggggcactcgaacagctcgcacttcaagtggtttctttcatttctaacttggttgttatctgatcatgcccttgagcttgtctgtttatcacttttatctacaactacgaattctacttgtatgtctgcagttgagcttattactcattatctctatctttatgtgcttctgcagcatgcattcttcaagagggatgagaatgagataagtccgtactcatggaatatcacagggacatataaaggtaacttctgggtcatagttacacttacacactcgatgttctacctgcttctttagctgaacatttgtatcactacagcatgtgctatagtgatatgttgtctttcgcttgccatacattttattgccgctgcatgtgtttggatgatctactgttgtaggtattccaggaattaagtatgtgctatttgctcttggaatattatttgaaacatgggaactgccctctattccctggagttcagtactgtacctgcattttaggtgctggaatgatttaattttagtgctaccaatttttctttcgaagattataagttaatgatatgctattcaaaccatatgatataatttgatcatgccttatcttctttgcacttacttcttttgtttcatgatattccttgtgcctaatattaattcactgctgttgcttgcttgtcataatgcttagagctttcttggatcttaggttaggacgttcagccccaaattgaaatgtttgatactttgattttcctgctgtgtatctagttagtaacaggagtcttttaacaatttg

SEQ ID NO: 41550 - DNA, 670 bp, Oryza sativa
atagcgtgaaaagtcaaaaatgccctaaccccacttgtcattttcttcttccttcttatttccccttttctcccagttccacgatgccgctgccgacggtgtctagaccactagcttccggaacgacaaccgtgttgggcgagcaatgctggagtcggacaggatgtgaggcaccttgaggcaacacggcccgccgcggggagccctcaccgctatcgtgacgaggctgctgctgctgctgctattgtgactatggggcggtggcggcggcagcgccgggtggtgcttggagagcagcggcgtcggtgacgggagcgaggaaaacagaggaggctaggtggttgtggtgaggagcactggcgcagtgtggtgggacacggagttagtcggcgtgggccgaggcgagctgctaccgcgacgccaccgtgtccttcatgtgtcaccgccgctcctcgcaccaccacaccatgtcctcctacttgtaacgccccgattttcgttcgggaataaaaatcaattaataatacattttctggaaattaaataaaagttaaatcaacttaatcaagtgaattattgagggaattaaaaatttcctttaaaaattattggccgggaatattttgtaatattctttgtgccctaatgtactctccggaattttccgtga

SEQ ID NO: 41551 - DNA, 684 bp, Oryza sativa
tgtgccgtgctgtgccccagccgcgccgcccctggccgcccgatcggcttgggccgatccggaccgtcggttcccgtggaccggtggtggaccgcctcggtggtcccggtccacggtggaccggcgcccttgtgccgctgaccggtggggcccgcttgccggcgccgcccatctcctttgctgacgtcagcacagccttttcctttgagaaaataaataataattgcgcaataattcgtgaataattatagaaattcatttaaatggctcaaaacttctaaaattcatatctaattcattcgaactccgaattgagccgttcaacttgcaaaattcatctaaaattgagctctacatgtttgtttactttttatgtactgttttcttggtctttattagagtttttcctcgttttgcgtgccagcgtgtagttcccgtgtttcggaagatcgcattcgcaaggataagagttcagaagatccaagtgaagaagcaaggcaagtcacacattccccttgagcatgttgatcccaatttataaatgttttaccgtttacaaataaatatgcatgttttgctaattacatgggatccgggtattacctatctgctcgcttgtgccatgtttacttgatatctgttctttgtcaaccttgggtaataaatcgactaggggtgcaggaa

SEQ ID NO: 41552 - DNA, 801 bp, Oryza sativa
gccctcaagacgggcagcagaaaagatagtctcctacaaggaggtgcccttgaatattaagatgcgacgaccatgatccccacttgcatgcaaagagcacaaacaccattggcatttattttatggtgtagaatcaagtttgttgtgtatctatctgttttggtcgctgtcaataggtaggttagctcctctatctaccccaacatggatactcaccctgcatcccagtttcaaactgaccatggaatttatctgatttagcctcagtctggactgatgatgccgataacaaccagcaaaccattgttcctgttctgatgaagtagagaccagacaacaataatgtggttagtactgttttattttcttgatggttctcatatgttgagagatcagctgtatctgttcagtttattgcgtgttcaagcgttggctgcttatattatgacttgcttacctgacaatcctaaagcaaacatgtaatgacctgggagctactgctggacccgatagatagatagatgggtactccagatcgctggagaagaagcatcaacgaaggataggtttgagtcggcgcacatacagacggcgaatcgatctcacgcgatcaaaatcacagtgggacatcacgatcgtgagcatgcagagatccagcctagtactgtacatctgatctgaccagccaatctcatgaaatcatgacctttttaactgactgatttggatggtttgttatactgtactcctgcatggtgacatttcaaatcaatcaacatcatgtttagtttcctcaatcag

SEQ ID NO: 41553 - DNA, 578 bp, Oryza sativa
acaggaggaggcagtgacctgctactggtaccactacattaagactgtgtttagttcatgctaaaattgaaagattggttgaaattgaaacgatgtgacggaaaagttgatagtttatgtgtgtaggaaagttttgatgtgatggaaaaattggaagtttgaaaaaatattttaaaactaaacacggcgtcactagagaatttggcagtgcatttgcctttataaagtcggcatatatagctgtctaggatatgaatatgatgcacttttcctagtgccttcaggtcagcgaaggctggtagtacgagtagaataaaagtttcttcagcaacaagttaaggtaatttgcatatgcgtgtctttgaaattgaaacgtgtgtatgtacactgcaaacagttgtcggacaaccggtgcttttgtgtgtacaggtatagctacttggcaatcacgtggtcactcaaataactaatgctaatttgtcttataaaaatactaactaatgctaataattaatggtagtaatggttaattagttccgctagcctatatgcagtacagtgctttactgactcaactt

SEQ ID NO: 41554 - DNA, 4112 bp, Oryza sativa
ccatttctagagagggcgttagtaaacaaaacacccaagaatgcacaaaagtgcagtacagcttagtatttttcaggcaaaacagacacaggagcatatgacttgacaaaaaaaaggcacaacagttgtgacaatatgataggactacagccactccaactgttaatccctgttaaactaattagtactagagccatgaaaatccaccaggtgttcattcttccgcaacactccataatccatttcctgcttgcaaccatcattacaagataaagcgacaaagatatcccatcaaggtctaacgacggggttcacagttcatcagaagatatattatgtagtacttctagagctacaaatcacaagggtcactaagcattgtccaaacaacagtcttaaccaggaggccagcattttaagaaaagaacatttttcttggcctcaactgagagagaagtaccactgaactttaccagtactgatttattgattgacagttctgcatgtaaataacatttgacttctaaaggcataacatcacaaaggacattctttctaatatccatttggtgctctacttcttgatttgaagagaaacaaagtacactactttcttgaattctgcagtacagtattaagagagttcatttctgcttggtacgaagagttttcaggtagtactcactgtcactcacatgcataaaaatcttatcacagcatatcagaatcagagcagatacgcatgcgcacaagatgcagtagtacgaacacatcaactgaaaatcccacacgacttctcgccacagaatcaaaagtacaggagaacaacgcaatgcgcaagcagacaagtcacccacaagctacgacaaggcaccccaaaaaataaaaagattgtgtttttcacgcaatctgaatccctctctcctagaaacttcctcttgccgctgaacaattcaaagcgcatcttcccattcacaccttccgttcaagaacaaacaatttcctaaattatttgctgctagttgttactatactaaaaaaacgttgaaatattatattatattaattgataagggagttcatttatttcagtggtactaataaactaactaatctctcctactttctccagatttccagacaagaaaagaaaataagaaaatagaagcattcgggcacgcgaagagtatacccaacgcaaccacctcagttggatttcccctcaaccgatcatcccaacacccaaagaaaagcatccggttgcgaaatcaaatcacaaacgaatgcatcaagaacacgagaaagaaagaaagcaagaaagaacagggagcttccgaaatccgggagtttactctactcacctcgaagtctgccggtgttgtctcgagctccgcaaccccaccaaaatcgagcctctctgcgccttcgagttcctccacgcacatgccgctgcctgccgccaccgagcctgaaaaaccaaccgcagcagctgccgctgccgctgcagaatcctggtcggagcagaggaggaggagaccgaatcggagacggagaagaagaagaagagcggaatccgagcggagcaacaatggaaaggagaggagagattcttgggaatatctaaaaaaaccgagtttaatacggaggaggagattattaagcgaaggcgattttgatgaggaaactcgcgaggagaggagagagtatttatggaggatggaagagcacgtggtgattgagaccacggcaccagattttttttttcttttttcttttctcttttttttttggttgagacttttgggaattggagccttgaggggtcacgggcctaccactttacaagaatttcaacccttttttgaccagtttaggtgaaatgcttccaaaaaaatgggtagggtgaaagaaaaggaaaatctaggatgcacgggagggttattaatctgtgtactgtgaggtattattttcattaaaaataatatttgccacgtaaaaagtggttcttttgacgtaaggataatatacgacattatacatcgagtcatactcgtgctcgatggatggttgtatgggtttgtctcataatttgttgctaaacaccataaggcaaaataagagataaggcaaacgtgcacggtagagttgtgagtttgggtactgttgggtttttttttcgtaaagaaaaatatagggattgccacataaaaagttggttctttagcaataaaaaattgtttcttcaatataggataatataggacatcaaataatcgagttgtaaagtattcatggtagtgctaacccttatgctaggtggatggttgcgtgggctttatattggtgcacataagggtgcacggtagagttattagttcatatatggtacgtgggttctttttctttgaaaaagctaggattttgctctaaaaggcggtttcttgatgtagcacattatacgatagtatacgtggagtgatagaatactcatgacaatgctagtcctcgtgctaggtggatgaccgctgggttctatattaatcatcacgacgtgttgctaaaagttagtagggtgaaagaaaagaaaaattaagggtgcacgatagcgttacgaatatagctatcgtgtactccttttatcttatccaaaataaggaggatttattatgcaaaaactggtttttttgatgtaggataatataggacagcatacgttaagtgttaaaaatacttgtagtcatgttagtccttgtgctaggtagatgtttggtaattaaaaacaagttggtgaaataaaagaaaaaaaatgaagggtgcgcgacatagttatgattacagatattacattacttatttttcatgaaaaagtaaaatttatcacgtaaaaaattgtttcttcggcgtaggataacacagtacatcttacgttgagtgctagaatactcgtgacgatggcaattcttgtgcatggtcgatcgctgtgtgggctcagtgttggtgcccatttgatctattgccaaaaaaatattgagttaacgatgtagtaggagctctctcgttactcaggattactttatgtaccataggtagggataattgggaacattaatatacgagtggtggcctgcgaaatatatgtacttaaacaaacttttgagcaatctgccaatagaccacttcaacatttccaatgattgctaattgttgctaaattttatgattagaagaaccaaggagggggttaattaaggtaaatatatatacgtcgcctacctatggcatgacctccctccatttggtatagttgatgtgccaggaaagttgcaaccatatgccatttctccaacattttacactggcatggctatttctatctccccagtgaaaaaggcagcatgaattctactccaaaaacgaaaagaactactcctccagtaaagaaacatgttttttttaatagaactataaacacatcaatgtacttttttgggggtggactttcctgcaaaagtttggaaaaggtagaggggaccacatgcatgaggttgctgtatgggagtaataccttttcttttagagcaagtttaatagttagccaactactagctccaattcatctatagctaatctaatagctcattcatacaatagttatatactacactattaatatctggtcccacctgtcatacacactgtgtcttggagtccgtgctacagctgactacaaatctatagcccggtgcccttctctcttctcatttatctgcttaaaatatgtttgcagctggcttatagcctgctattttacctgctcttagcattttaattctccattaatctcagagccaatgctggggccttgggagaacgagaccaggagatgtgatggtgatatgaggtcatccattatccttatgatattcttttcctcccctaagaaaatatctccaccttttcttaattaatctcaacaggccatatatgcatcaagaacaattcttccattctgtgtaaaataaatatatatcctggttgttcttttctctaggaatgcattatatatataatcaattatatcatagtatagtatataacataagactatccat

SEQ ID NO: 41555 - DNA, 1044 bp, Oryza sativa
caatattttctacgtttttatgttttgcaaaatagtgatactagcagactaagctcgataaattgaaagaagtaggacttctaccaatgctagcgacactgctaccaaaatagaccgaacgttcagataatgaggttccttgccgccctctgtaagggttgcaatggggcaaatgtaattttcgccatgccaaaaatgcatttttctagtttttttccatcgtatctgtccctcacgtcaccctgccgtccttctcgagaacggcagggtctacttctgtaaatattattaccggtacaatattttctgtaaatattaaaaaataaaaatgaaaaaaaatttccgttctctagctgtctagcacaaggggtatttccctctccaattgccctgatgggccggaatcccagcccatccaaataggccgagaagctcaatatgggctctacttacacttgatggtagctttttttttttcaaatttacttttggagaaacaattacttcctctttctcattctgagagaagaagaaaataaaataaaaataaaaagtattgcaacttggcactgagaagtgagaacagatagaaaaacatcaggaagcacaaagggtggctaggtggagcagaagtgcagaacacttcgtttttccagtgaaaaggatgtagtgtcctttcttctgctcatgataagaggattcctccaatcataatctgaagaaaaaaaaagtttcatcttatctagaatgaagctataggactgtactacaggcagtagcagtacaaaagacattagtaaaaattcccagcttaattaatcagtttgtgtagctttagttatattatgtcattatatgcagagcacagtattttggttgatcattgttcaggcataaaatctgttgatgcagcactgcagtgacaaaaagaaacaagagaaatcgaattatatatttatatatctggtaccctaccagaactatataagaagcgatcaaaagaggcagagtgatgatatgcatgctcatggttggagcataata

SEQ ID NO: 41556 - DNA, 1011 bp, Oryza sativa
tagaaggggtgaggctcggaatctagatcgtctagcccaccaccttgtgtagctagccgaaagatccctgagagtttctctaactcgcaagctaatcaagggccaacctgagggagatttagattctgataaacaactagtgggatggaattcagctaaagagaatctgaaaaagtaaaaaaaaaagaactaacttttagcttttttttctatttttttttaaattctgtaactatagcttttatttggacaaaatgctaaactgtgaagactgaagagtaactttcaaattgtaggagaacctgcatcggccataacctcccccaaagcctaagaacgcgtgattaattagccagtaaactggggcacatgcagcatggagatcagcattgtactgctcttgcagctgactgaatccttttggtaattaattggtgctaccatacacattggccgtcagctttgacgcctggtgattcttcagcttaaattgcccttcgcccagggttgcaatgcacatgtcagcgtcgtcgtgactgggcgctgccgcggatgattaaactaatccgagtcagatccatggatgaccatcctcagacccaggcagctgcaaccttccctcttcacttcttctgctttgccatggtcaatgacgacctgaccttgacctagttgttgttacttctagtagtaccaaatgcaagcctttagccttcatcttcccacaggagagttgataacaaagtcgttaaaagttggttaaattttgccctcctgtatctgcaagacggcaactgtaacttcagttaatttgtttagttgatgaccatgtgggctagtgaaactaactgcattgattttttttttcgttagaacatggattaaaagagggatgaccacaatcacaaaaattctcgaccaaccgagcgtcgttttatataaaatttgatatatttttttctattttctttcagcgtcgtatcgctgtcgacactgaatatacttaaattg

SEQ ID NO: 41557 - DNA, 1560 bp, Oryza sativa
agcagagaatatgtccccatatttagtgggacactaggtgagaattggtgaaaagacattacatgatgacatgatgagcattttttcaaacgatggtccagcgcgtgttagagattcaagcagcaatgaaatgaggaggagccatagaagggttttgtgggacacattttccagacgtagttcaagaggatatttagattctgataccgatgatctgggattttacagcagatggctagaccttggtgatgaactttttgcggatgagattgaggaggccggttctttcatcggagacgccatggttcaatcagagtaagccagtattcaagatctcgggtaattgtcatgcctattgtgtttgtgccacaattacacatttggaataatgttgttggtgctatcataaccaaaaggtggtcatgaaatgtaaacgtagggttacactggtttgaattgtcacctaatataatattagtagtacacaaatctgcaacaataataacttcctctcttatctgatcagtatatttataattatgtgaagtaaaatactttttctctgtctgcatatcccgtctcatgcaatttcacactgtccgatgtggtcttactcctggttcattgatgtgctgaaattgctgttacggtctagtgtcagcattatctgccgcttgatctctcatgcaaacatatcattaacttggtaatgttttctgttacagattagggagcatcggcgtgctgtttttgatagcggtactgaccaaagtaccgttgcttgtcctttggggatccaccaaattggcagatgcacctgtgattccttcttgattgctgaagaatctagtgcccgtgcaagtatatcaagaattgtcatgttaaccgaggcattatttgaggtttgttcgttccctatctttctaaaatgtagctccttttgtatcagtattctgatgatactgtttcttctgcatggcttacctattgtttgcgtgtgtgttcttttttatgtttctttctttttttttgtgtgtgtataggcttggccagcccaaatcattgaagtattgagaagttttttttgttctgtatattcaggtcttattcgttaaataataattcccagcattcgaactatgcacacttaataagatagtgatacaactgaaactatctatgtgacgaagtcccttagctgccattatacttttgcggatgattgacctccagttccatccttcaagttcaacctagcaatgctgtagtcacttatactcaaatttgaaagcattaagttaggctgcatgaactccaagtatgttcatgatttaaatttgatgttgaatacattggtcatatcaacatgtttaaatttgtatcacctggcaacaacacaatacagtttgtcatagatgtagtatcaggacaacaatattttgaaggcagtgtttcatggctatattgtgaagccaagactgagcgagaaaagcaagaatcaaactctggatttccaggcttgttatggaacatatggggaaattagttaaactaggaaag

SEQ ID NO: 41558 - DNA, 741 bp, Oryza sativa
cttgcccggttgtggttgtcatgctggctgccactgacagcgcgggcccacgtgtcagggaagcagggataaggcgcgcacgtatggggcgggaagggacacgcgtgcgacgcagggccaaccgatcgtgtcgagtccgcgtggtggacacgtcacttagtacgtactagtactatactgtatacttacatcggctgtcgatcgatcggccgcgtactccctccgtccaaaaaaaattaacaacctaggtttccatatctaatgtttgaccgtccgtattatttaaaaaaaaatataaaaaatttaaaaggacaagtcacgtataaaatattaatcatgttttatcatctaacaataataaaaatattaattgtaaaaaatttttatataagatgaaaaatcaaacgttgaacgtagaaattcaaggtttgtctttcttttttttacagaggaaggaagtacgtattcgcgtgagtagaaaataataaaatttactaataaaatagtcgcgcttgacacgacacggcaaccgaaaatccgaaatatcccgacacgttttgctcgctagattctgcatgcaggcatgcgtacgctcacgtactcctatcctagtacctactgtgctgcaaatatactgtatacgtacacagatcactccatatgtcccttttaaaaaaaaaacttggaatgaatctgcagtctaaacacacgtgtgttcagatttatccctataaattaatt

SEQ ID NO: 41559 - DNA, 691 bp, Oryza sativa
tcccgcttctgtactagtctagctagtgataaacttgggaaatgcgtttagcaagcaccggctggctgctaccctggaccctgaacaatgtcctcaattggaaagttggcatgagttaattggtagcccgaacttatggacatgtatataaatatcaacgtgtacaccgtttctcacgatggtaccgcagaacaaaagggggtggagttcacataaacaaaccattcacaaaacttggtccagtgtgttttaaaaattttggctacaggtgaaacacaaccatctttttgtcaaaaattaaaattaatttgattattttataaaaaaaacttctgctaaaccgagtagtttgtgtcctcgagctggaccaagaaatctagttctcatgaaaaccaacaggttctcgttagttttgtaaatccttgtagggagatatgtgatcggagatcttaggactcatttggattgaagtgatttcaacacaagtttggtggatctcaattgtttgggaaaaaaatcctatcattttatttgaaatgaaggaatatgattaagccattccctaatatccacgtcttttttttctttgaaacgaaggaatatgattgacaaaaaaaactaacaatttgcttctcataccaaactaaacgaattcatacttcatgcttttatttttatatgagaagcccca

SEQ ID NO: 41560 - DNA, 1048 bp, Oryza sativa
atcacccccaactctttctgcattgaacacatgatcgagatgctttgatctcgatttttttctctctctctctctgaaagttgataaggatcctagcctgcaatagcaagccacccactttaaatttctcgatttcagaaatctctctttcatacatgggctccacagcaaaaggcaaatcataaatcacaaattgacagatcaaagttgggctcgatcgagctaaacattccaagtttccaactcgccgtcagaagaaaagattctcgccgccgttccatgaacctgacacagctgagtttgacagatacagttacacatgatcatatcactgcttctcgtggatgcagaggccgggtttcttaatccattatctaaaaaaattaatcatatcactgctaaagccaccagctgcaggttgccaaatggaaatggtttacgggaggagagatggatcgatctaaattaatcatctttatttttggattgacgatgacacattccatacaagccatacaggctatgatgattacggccacgtgaacttcaggctgggagtattggagtagatagatgtatttatctacgcagaaaatgtcggtagattatcatcgcagctctctgaataatctgtgctgaaagctcggttactgaaaattcagagccaagaaactgattggaatctttgcagatctttgcaggattacgcgtaaagcgatatatctggtatcaattaggagtatcatgaaaggtatctatcttcctcttatttggattacacatcgtgtttatgaatgtgtttagatttgtacacagctaggcatgtagatacggtccaattaatctagccagatttacagcttaactgatcatcacttcagttcatacgtggggattaatcttctagaaaagatggcctttggagggatgaacgagccatctatctatcaattttgatggccttctcttttttgctgcgtgtgtgtgtctgtctaagtgtctctattctttaaatttgagacagctcgacgcttcttcgttatctgcg

SEQ ID NO: 41561 - DNA, 594 bp, Oryza sativa
cggagcaccatgattcccgggtattcccgggaatacccaacttttttatcgaaaaacaagtatatttctaatatatacatatgtacacatattagtgcacctaaatcctcaattattcgatccaaacatagccctatacacatgtacatatattagtgcacctaaatcctcaattcttcgatcaaacacagcccaaccggcctatatgacccatcagacatcagttgatccacttagccacccctcttccagacggccccctctcgctctccctccatgacccatccctccctggctcggctccctcgcgccgctccccatttccaaaccctaggcggcggcgcggcgaggcggcaactggcggcgagaactggaccgcgctaccacggagggggaggctattgccgcggcgggcagcgggtggcgcccgccactccgccaagctcaggcagtcaggccggttgggtggccggcagccgcgaggggtagaagcggccaacggctcaacgcttagacgggaatacccaactttaaaatcctggctccgccactggtataccccgctagaatattaattattgatggaaggagacc

SEQ ID NO: 41562 - DNA, 922 bp, Oryza sativa
aaagataatcatcccatttttacatgtttttgtttcatgggcgagagtggatgggatgggatggacactgaagagaatatatattctcttaagatgttggatgagcccccatctaaattgattgatgagaccatccacttttgtcaacgcaaatgattagacatagttagttttttcgttaattaataattttcatttcaagatctattatattattaaaacaactttgaaaggaggcaccacgttcgctgtggtgactaaaaattcccacattaatcggagaaaaagaaaaggagagtccaagcagaaatacaatttaaaaatagctgaaattcggaattaaaaataagcaatattgaaataagagtccatataagaacccaataggagattaatcaaaattcagaataaaaataaaataaaatatgaaattagaaaagaaaaaggagagtccaagtagaaatacaattttaaaataattaaaattcggaattaaaaataaggaatactgagagaagagtccatataagaatctaatacgagattaattaatattcaaaaataaaagtaaaatccaaaattagcaaaaagaaaagaagaattcaattaggaatacaatttaaaattaactgaaattcggaattaaaaaataagaaatattgaaagaagaattcacataagaaccctatacgagattaattaaaatttagaataaaaaataaaataatatccaaaattagacaaaattaaaagagagttcaagtagaaatacaattttaaaacaattgattttttttaaaaaaataaaaatattaaaagaacactatgcgatattaattaaaatttgaaaaaaataaattctgaaataagaaaatgaaaaaaagattttaattaggaatacaatttataaagaaaagaccat

SEQ ID NO: 41563 - DNA, 538 bp, Oryza sativa
ggggggggggggtctagctgctagctatccctggcagtgacgctgcagtactgggtgccccggccggagtgatctgtcgtccagtgcaggtacacgacgagttccaactaagacgcaggtggctcgagatgtacacagtaacacactggtacgtcgtaccacctatccatcggtagcgagcacgtctccgcgccgcgcggtgctgcatgcatgtgtctccatctgcagccttgcaggtttttcgttcagatcaatcagggggggctgctctcccgttttccttcagggtgattgatcacactggccgtcgatttccaaaggttttcacaaagcgcgtattactattaccacgtgccgattggatcgagtgaacactagaagtaaaaactgctgtccaagtagggagttaagtaacacatcgcgagatccaatgacccaacaaaaccttgcagaggtttttgcagttgcatgcatgagtggcaattggctcttcggtttggtttgcatttactactatattcgcatcatcaaggattga

SEQ ID NO: 41564 - DNA, 684 bp, Oryza sativa
gtgtgggagcgaaggagtaagggcggggcgaggggaggagaaggagtcggagtgcgggaagaaggtgggggaggaggcgtgcgacggaggaaacaaagagaatcgaggaggagaaaggggtgtcgagaccgagcgctggagggcaggtttggaattatttccttcacctgcccgtgccctcattttggcagggtacatgcactgtggactcggttacctctcccactacatttatccaattaaactactgtggactcggttacctcccccactgtatacaactaggggtacttgcactgtagaataggccgtctttaggccaattttttgggttaggggtacgggccccatagcttgtattgtgaatggaccaagctgtcgcgttggcattctgccacgtcatcaccgggccacgtgcatgcgtccgttatcctccagcatggacgtacacgtacgttggatactccctaaaataaaccaatcttcaggggtgaaataatagtttattttaaaacggacgaagtacgtgtatttgtacacgatatgtatatatagctaaaataataggttgttcgttactttgcgttggaaagttctccacatcaacacgaaaaatggaatagctcattagagcataattattaaatactagcttcaaaaacttaaaaaatataatacttcatc

SEQ ID NO: 41565 - DNA, 680 bp, Oryza sativa
caaaattttatatacccgtttcaaatttgaattcgaattatatccgattcaaatttgaatttgaattcaaatattttctatgcataatatttctatacatctaaagtttatacacctaaagtttatagatccaaagtttatgagtcaaaagtttacatactcaattcaaatttgaatttgaatttattcaaatttgaatttgaatttattcaaattttatagacctaaagtttataaacttttatatatatatatagtatttctatacatctaaagtttatacacctaaagtttatagacctaaagtttataagtcaaaagtttatatacccgtttcaaatttgaatttgaattatatctgattcaattttgaatttgaattcaaatattttctatatatagtatttctatacatcttaagtttatacacctaaagtttataaatccaaagtttttaagtcaaaagtttacatacccgattcaaatttgaatttgaattcaaatttgaatttgaattcaaatttgaatttgaattcaaattttttatatatagtatttctatacataattttttctaacttttgtttttttaaaaaaaattgtggtgtactgtagtaggaagagaataaggggagaaggaagggaagaagtcggaggaggggggcggatctgatcgttgg

SEQ ID NO: 41566 - DNA, 517 bp, Oryza sativa
tcaggaatcttaatccgattattacgaaagattactcagttcattaattgtacattttttttgtacttactgttgctgccgtggagcgcgccttcttcctcgcgacgttgtccgtgcagctctcatccttgtgatcctcaaccttcctcttgcacgccggtgtcatcttggtggcggcggcggcggcggcggcgctgctcccagcgccgccagcatcgccgccgtgctggtcctcgaactcgaggttcaggtccaccatgaagctcgggtcggccaccagctgctcctccggcacgaagaagtcgccgccggccaccatcgcgccgccgtcgtagcacccgtaatgctgctgctgctgcatgtagcagtatggcgccgagccgtagtactggtcggccgcgtcgtgcgccggccagtacatcgccggcggcgccgccgccgccggctgctgctgctcctggtcattgccgaagtactgcacgccgagcagctgcgccatcgcctccgagtccccatt

SEQ ID NO: 41567 - DNA, 741 bp, Oryza sativa
ggatctatgatagagcactttcttcttcaattatataagacggtctctcttttagttaacacatctttgctaatctaagatcgggtgatgttataattagctgactttgtgctagttaattagttgacttcgatgctagtagtgtcaattaacattgttttatgtatgttagtctgagtctctcagcctctcaggtgaggaatgattccttccaatagccaagggaagttctttcacggtgaaatttctatttggggatgtaccttttctatgaaacagtagctgttgcactatagagtatagtctagtgtttaatctgtatgagctaggttgagatgttgcatttctacattgtatttttcttgacactaatttacttcccacaggaacattttgttcaagtatggctgtgtatgtaaacttagtcttaacaatgtgtatctaaaattatattgtataggattattagccgaaatgtaaaaccaattggggccctgacaataagataagtatactggtccaaactccggtgtagggctgtcaacgagccgagctcgagcgagcttagatcctcaggctcgagctcggtatgaactcgagtcgagctcgagccgagcctggactaaccttcgagcttgcagtcaagctagcctcgagcctaatcgagctcgcatcaacgcaacacaagcatgtgtacatatttcaaaaagtagagaagctgacagaaagctgtagctgggc

SEQ ID NO: 41568 - DNA, 1004 bp, Oryza sativa
aaaaacaatttgcaggtaagctgtaccaccctggttagcaattccagttatttcaaactctaaactctatttagagcacatgtgtttcaaacgcacacttttttcatatgaaagttttcatataaaagttcttcgttgaatgtttttttatgaaaattttgagataaagtttttttggatgaaagttttgcagatgaaagtctttagaaaaaaactataagctaagaatgcaagtgcgctaaatagctgtaccccttgtattgtgttcttcccccagatttcctaactcacttctctcgttttccgcacgcacacttttcaaactgctttgcaaaaagtttctatataaatgttgttttaaaaaaacatattaattatttttttaaaaaaatagttaatacttaattaatcatgtaataatatgtattttgttttgcatgccgagaaagaggtttcccaacccctcatctcgaacgcaacctaaatagagtttagagtttgaaactcctgcaatgcattgcttggctgcacaaaatacctcaggctgtgtttagttcagcgtaaagtttggattttgattaaaattagagatggtgtgactgaaaaattgtatgtgtatgacaggttgatgagatgaaaaagggctgaagtttggacacaacctcagtcttcttactcaacagagtagctgtagacagtacaatggtctaaacagatttgatacggaaatcaaatttacgtgtcctccgcatgcaagttgatcaaaaaaaaggaagtcatggccggaacaattcactgaatattcgcactgggaagtagtatttttttttcgagaacgattgctgttgaagaagaagaatatcatgcgtggacacactgattggcctgacaaaacatagttagcaatttgcattaggccagtcacaatggctagtgtcattgcacggctacccaaaatattataccatcttctctcaaatgaaatcttttatgaaacaatcccc

SEQ ID NO: 41569 - DNA, 683 bp, Oryza sativa
ggtcatctgcattactctagcttaaattcatccttctaatcatacaaaaaatatccataatatatatgtcgaatcatctataaagaacatagccatagtaccactagtgaacaaagagtccacaatcctaggcaaccacttagggtttattcgattcacaggattttcaaatcataggaaaaacgtagaaataatgtaggaatgcacgtgcaaaataaaggattggaacataggaatttttcctacactgagctaaacaaaagaggatagagtagatattttcattcctatggaattagtacattttggaggatttttggaggattggcatagtattcctatggaaaattttcctttaaatcctacaaaccgaaggcatgaatagtgcttattccaaaggaattgagatttcctttagaaatccttccaaactaataaggcctaggttcccccacttcacctgtgtggttgtgcgtaataaaaagagtgagaggttgtttgggtagtggccgcagtttgctacaccaaaccttagacgcgccacaatttcttaggctagtggctggttgagtgccatagttgagttaagctacactttattagcacaatggtccacgcgtcatatttttattttctagccaaaatttaccatggttgtggccaacaaacactttgtatggctt

SEQ ID NO: 41570 - DNA, 534 bp, Oryza sativa
ttttggagaaatcgtaatttgatatctgtggtacacctattcacaagtccgtaagttaaaaataacagggcctaataagagacgatgcacttaagtacttaacaagttaacatgcataacgttagggtattttgattttctcatcgtgcagcttggcgcacgaagttgagccctgagcctgttagtcgatcggtctacgtccatcggtccatgacagacaacagtgttgtctggttgacggctcatgcacttggacgccaccaccatcatgtgcaccccgatgctcaaaccagtacgccaccaatcaccatcatttgcttgcaagaaaacgacctctatatccagtcaagaacacgtactctttttcattacaagagtcacaaccgattagcaatcgtatagaagttttgttgtcacttggtcgatcgacaggtgtccacaggatgagaacacacatgacatatagtttatgctttccattaattgctaagcgtgtgagttagtggtgcattagtggagttaagtttttttttt

SEQ ID NO: 41571 - DNA, 711 bp, Oryza sativa
gggagtggatcaatctggtgcagaaatggagcatgaaacacgtgatgcctgtgagggtattgacgaggtttctgaaagtcaaagcggtaaaagcatgagctattcggcgactggagagggcacagagaatgcaaatacagaggcccgaggggcgtcttcatcgcagggacgcaatgcaagccgtggttcaggtgccgtgccgaagcttacaaagcgtaggagaaaatcatgactcatttgcagcagatcatgcctcgcacatcatgccgttttgttcaactgggcaaggtcacgtttcgatttgttcggcagccaatgagttgcgggcttgcggcgttgtcgtctgtaggccaagtctgaagactgaacaaaatgcaggtcggcattctgcacaccgttttcaggctttttcaggtttctgtccattgtttttctaggacagttatcgtatatcggtgtaaactgattgaagtgaacatttaaacctgacgtgattccttgcatcaggatgtatgtgtaacgcaggcttaccaacaaaagcaatgcacccgatgaaaatactgataaaattgaaatacacccaaaaaaactgacaattgttctctatctgaatatgtttattttttcatcaataagttcgattatacagtaatactatttgtttgtttttttaataaatgatgttgttgacttttaaaagggctgcaggaa

SEQ ID NO: 41572 - DNA, 1171 bp, Oryza sativa
tttctgaggaatttcataggatttaggaagcttcaaccctatgtttcaaatgactaggtagaaaatttttctataggattaaaactctacaaagttagtacacattgtttccaaaatagaccgatagtgtattctgtagggtaggatctgattgacagattagataatgcatgcggtacagcacttacattgcaaatttgcaattagggccctatttagattccaatttttttcttcaaacttctaacttttccgtcgcattgaactttcctacacacataaactttcaacttttctattacatcgttccaatttcttcaaacctctaattttggtgtggaactaaacacagcctagctctaactctctgtgcgctcttcttaatcttaattaagtagccatagcagcgtggttgctagaatcgccaacaacatttatagaaaacatagaaacatgaaaaatacggaattttaatatgaatatataagtggaaaacataggaaaatctatgagcgactttttgaatagtccgcataaaaaacaaaaagaaaaaaaatcagataacatagatagactaaatttttttttcaaaaaatgaagctcttgctaactttcttcaaaatttataggcattaagtcatttcttaggaattttgtaggatataaaagcccaaatcctttgtttcaaagagctaaatagagaaaaaaaccattaaaatttgaatcctataaaatttatatgtaaatccattgtttagagggggtcttaatcgatatatactaaggctgtattcggcacccctttttcccaacaactctccctcgttttctacgcgcacgcttttcaaattgctaaacggtgtgtttttttgcaaaaaatttctatacgaaagttactttaaaaaaatcaaattaaccctttctaaaaatagctaatacttaattaatcacgtgctaatggaccgtgccgttttctatgattactgttccggatgggagcaagaatgcccgaacacagcctaattgctctagtctagtgagatacagtatatatataactagataagcttggaacagatcttgtttgcaatttggagcaagtgagatatgcaactattcactaactgaattgtggtcctagcgagctcgggggtaaaccacaaagaaatca

SEQ ID NO: 41573 - DNA, 703 bp, Oryza sativa
ccaatcttcaccacgctatccccccccccaatctccactacgccatccccacctctgatctccagtgtgccatcctcgtccccaacctttgcctcgttgttgccatcccaaccaccgtgaccgcgacacgtgagggtgtagcggatggtggccgtttcgagctcaacctccgcatagctctagcttcgctttggcccaccacctccgagagccagcttcgcgtgcccaggcgagcttgcgttgatccgcctcctttcgagcaaggtccctctctgtcctacttctctagccaaaggtgcacagagagagagagcccattgatttgcacctgaaatggggagtggggaggattggcttgaggaaagatatacaagtgggcccattgattttttttaaaaataattttattgctgacttgattgccacgttaccggctatttatgcaaactcaagtcaaaactactcaatacagtgctcagggggttatttgtccggtatcaatagttaagggtgtaaaatgtctggtattcaagtttaggaggtaatttgatcgaccgctatagtttaggaggataattcatattttttttcttttttttccattacacaaaagacgtgtatgcaccagcaccattataactatacatggtagtaaatgtttccactaacaaacgtttaaaaaaaaaggtgaaggccaaactac

SEQ ID NO: 41574 - DNA, 645 bp, Oryza sativa
cagaagtagtagctgttatgaaaaaagtttagaactttgttagaacttggaagcataattcatctgctgctagcctgtttatactggtatagtggtatgatctcagttcagatcgtgcaaagtcttgtgtaatttgtaattagacaatgctgtcctgagccaagaataacagagctgcggaccaaatagggatatcttgttgaaaggtagccagtgatgttcagtgttgtcgcaactgggctcaataggcattttgcagccattgttacctgagcgacttgggcctttttagtatttggattatacctctaaaaaagaagtatttggattgtagtatagtacgtcatactagtatcagctatgtcaagcgcatatcgttgtagagagttaaaattagtgctccttcgttaaaaaaaaaagaaacagtactctgaatatgtacacacttttgtaagaagcataatgtataatcctgtgaacgcatatgcaggaaaggaactatttttaaagtgtgtcttattgaacatagacaattacatcaagatgatagtataactatacagagaatatttttagcctatgtattgcaggaaaatcagctaatgttttttatacttatcaaggaatctcacgcacgacaaactg

SEQ ID NO: 41575 - DNA, 719 bp, Oryza sativa
tcacatcgaaagctccgccacaatccaggtcctgttcagaacaacaggaggttaaagaattgtgcctccgttcaagttccgtaccatcaaccatcacgtactccgtcgaaatcgtgtcgtgccaggcgaagaagcacaaacgagctactacctccgtccaaaaatgtaatatttctagcacaatactttgtcttaaaataaagctatttttctacctaccttctcctctcaaccaatcacaactattctttttcacctactttctcttttcaaccaatcacacaccttcttcaattattctcacatactttcttaatactcgtggcaatcttaaaaatacttacattttagaacagacgaagtatcaatcgatctgaactttgcttgtcgtcggattatccagggcccgtccttctcatcggcggcgattttgtctactccttgtcgaccggcgagagcatggcgagacgacgtgcccccaaatctgcaatgaccaatgagctttcggtttatctcaccctggcatgcatgatgcatccatacatgcctcggtcttgggctcttggccatttggatcaactcaccaacagccaaatgctgaaactacgacagttcaagtaatagcagatgctagctgctggcctgctgcctagtactccctttatctcataaaaaactaatataatactgatgtgacacattttaagggctgcaggaat

SEQ ID NO: 41576 - DNA, 552 bp, Oryza sativa
tgtttcttgatctaagagcaggtacagtagcatgttataagtcagctataaacatattttaaagtgataaagaaagagagagaatagcagcggtttacagatttgtagtcagctgtagtacggactccacgacgtaatgtgtgtatgataggtaggaccagatattaatagtatagtaagtaactattgtatgaattggctattatattagctatacataatatgaagctagtagttggccgtactattaaacttgctctgatgttttgatgttccttatcaaactcacaagtgccaaaatttgatgacatgtccaaagaagagccaggatcttgtcaaacacgcatgattgacaccacggagatccagcacgtccgggctaacgtcggtctccagcacgtactagtagtagtcctccactagcttcgcagcagcagcgacgacgtcatgggcacgccctggacggcaaccaacaggagaggagcctccgcgcggtggaccgccacgaaaacacaccgtaattcctcctcacctcctctgcatgcgtgcgag

SEQ ID NO: 41577 - DNA, 565 bp, Oryza sativa
atgtttaaattcgtagtcggttgctacattatgggacgaagggagtagcgtgttagacagagcgtgacatgatccaatgtaatactctctccgtcccataaaaatccaacttattatcagatgcgacatataaccaagatatgtcacatctggttctaatttgttttttacaggacaaagagagtaatgtattacagcgctcttctgttccataaaaaagttaacagtaggtattgaatgtgacacatatgcagattcattattatattagcatgtgtcacatttaattttagggttttttttttacttgagggagtatacccacagcttcaccgcgatgtacgccccgccagctcacggcatcgtttcgcgcccaaaggccaaagcgcgcggccgtccaagccgcgggtggcgcacggcacgggtcgtcgtcttctcgtcgctggcgacgcgcgtgcggaggcgagacggcggccgctaggcggctcggcgacggcggataaagaataggggaagagagggcgagggcggcggggcgcatgggtagcaaaactcgaaaaggcgg

SEQ ID NO: 41578 - DNA, 696 bp, Oryza sativa
cagctggaaagacggacaggtaggcccaccccatcaccccccatactgtgccataaacattacgctgcgcgcgtacctaaaaaagcagcagagaggaagaagaaaaaaagagtttgggctgaaaaaggcatcgagagccacgcaccggcagcacgtcgccggccatccgtcctactaccaccagcagcaacagcagcagcagaggcaggctggaccgcggcgagagagctttctattcccctctcgaaatcggcagcgaaagacgacgtcgtcctcgtcccacccgcgcccgcataaacgctacagtggtggtggcaccctgcaccgcccaacgaacgccaaaagcaggctgctcatttcaaaggcggaggaggaggaggagaggagacaggaaagccttccatccaaccatcgctgcccccttgccccttcttggcctcttgcggtgagcctctagcttactcctcctcccaatctctctctctctctctctctctctctctctctctatctctctctctatatctctttcttgttctagcctggtcgactcgtcctacctcactgcagcaacactactggcattgcgagggtggcgtggtgagctttgtgtgggcactcgaggaggcacgctggcccggcttcctgactcctgggtgctgcggccattggaggaggacggagtacaccaccctg

SEQ ID NO: 41579 - DNA, 665 bp, Oryza sativa
cttgtcaactgttctcttttttggggggtttacctggtagtagttttcatcagttcttactcttctctgagtgtactactgttgaacgtctgaatatgtccaagaaatgtgtaatacatcctgtttggtatgatcttgaataacttacaaaatgcagatgttaaataacagagaaatattctcctgtttggtttagtactgtaattatagaaactatatttctcgatcccattatataggcccatttattccaaatagcctagatgctagatgcacaaaatctactgttcatttaggcacaggctgcttgttcttttctcgtttcctgacttatcacttacgagaactgttccatctttgcagcattgtggcaactgaattagtgagcgatgtcactgttcgcatagggactacaaagttttaccttcacaaggtaaaaatgtccttcctttccattcatgcagcttttttttttcagagaaatgccttcataaaacttattgcaatagtaatttcttgtggttcagaagataatggcctcatgtaaggtttgatatttgcttgctggcatattctcttctctaaatgctaaaccacttataactagaccaaatgcttccattttttcttcttttgctgtttatctgtttattgaaaccttaagt

SEQ ID NO: 41580 - DNA, 635 bp, Oryza sativa
gccccaccagaacaactctttagtagaaaagttcagtgtaaatggctcgacgtataaaaattgacatgagcagtttctccgaaaaggattacttaaacaatactagcaagaaacgtatagtttaatttttttctcttttgataaatagaaagagtgatggatagcacacaaaaggtaaacaggggaaagttgtttcctttcgctaaaagaaaggtaccatctccaatttcttgttggactttctgtactaaatctccaatttcctaaatggttgtaccaagaagtaagaacacaccttaaataacaagtcttttgaaatatgattgcttatgtgacccattagaaagatcaatcaagaaagtctgaatattaccactaaactagttagttggtttctttgtgataccaaaactgtaaagtgatataatcattcgtgtctataatgatgagaactttactacatgtatgagtaaagaaaataaaatcaaataatttgacctcaaaacttaattgtttatatttgtggagaataattgtctagttttccgatgaagggaaaattgcaggatctggccaaacacataaagttggatgaccgtgtatacttatacttcttagtctaaaaatgctaagaa

SEQ ID NO: 41581 - DNA, 1164 bp, Oryza sativa
atcccatactgatcgcatttcgtcacatgttcaccttttgcctacgagggttttaggtaggaatgggaacggtaacgtctttttcgaaagcgaatctcggtcaatcaaaaattacatatttacttttttatttttacgaatgatcatatttatcagtttaacgccaatgacaatacattactaaggggaattagaaaaggaaatccaagtttatatatggctagaattgtatcacttatatggaaatgatgcttgatctatcgggcatgactttcaggtgcaaacagctgttatgttaaaattcctatagactctggttgttgtgttcgtccagccgaaatctattagactactactcctagtgctgcctgcctgcctactgaccgtgaaacccacaggctcccgtgggcgaggctgtaaagcgacagcggccaaccaagccaccggggtccggagcacaccatctcacattctcaccctcctcccctctcgcaacgcactttgcacagcgatccgctgatgcgaacgctgtagtagttgtacaccctctggtctggtccctcggcctcggtctctcgctgtggataagaaagaaaaaaagaaagaaagaaagaaataaagaaagctggtgtgaagtggtgctgcctgcagcctgcccctgtaaagggtaaggtggcattaagaatcatcttctttcgaggcacacactgccaggattggaatggatggatcagtatccatctgcaggcttcaggcacagcctgaaatgaacgggattgattggcccatgccaatgccagccacgctagcacgatcccttggccgcagtggcgtttcggcgttgcattcaggggaccaaatcaaccaaccaaccaacgaaacgaagagccgcgggtgcacatgccgcgccgcggacatctcatctcgctcgccagcgttggcacgccgcacgctggccatcgaggcaggcaacggccgcatgcgcggtgcagcgaagagatctagaaacggaaggcgcgcgtggtctcgatcgatcgatcgggccgggcgctaggcgctagcacggcctggaccacgcacggcaccggccggcctccatcctccacacctcacacttgaccggatatgatattgcctgcttccttgccgttttctcctgtacgt

SEQ ID NO: 41582 - DNA, 1004 bp, Oryza sativa
ggagtcataaacatttacatattcccccagattttggactagaacggatttacaaatccaccccaatcatcagcactgtttggttatctttgagttcaatttgactagagatggtgtgtgatgatgtcaataagaggcacgagatcagacaagggaagcatcagtaatcagacgcccatgatgattgtacatgtttctgtctactactcagggttccaatcccgtcatgcacatgtgtaacatgtggaattgctaaaattactcctatttgtaaagtactcctacatctacatgcagcgtaagataatgtcgctagtgtacaaaagatactcgatccactgtggcttttgtttgtgctctgcatggaaattagtagagcttgtgtcaaattttagagccaaatttgcccctcaacagattaccttgcgtccttgccaatggcacgcaggactctgaatcagtaacgagtggtttagcatggcaaatcatcaaatccccgacctaagtacatggccaatatttctcctaaattcctcccaaacctaaaagtagagggttttaggtgaaaaaaaattgttccaattgatccttagtagcatgaccaacaccctccttaatctaataactagcatgatggcccgcgcagattgcgccgctagtatcattacattttctctcatataatagcatatatgttttctcattatattattaaaatatattaaatgacaacataattttaaattttgtaataactttacgaaactactaatgtataatatttatattgtattttatatatgtattagttattaattatttttaatatcaaattttagttatttgtaaattatatatatattcctatatggacactagactcgtcttttaatatttctttttttaattctaaatttttattatttctaattgtatttctatgtggactctaaactcatctttcaatattctttaatttttaatttcaaatttcaattacttct

SEQ ID NO: 41583 - DNA, 683 bp, Oryza sativa
catatatgatctatcacctgctacccttcgacagaattcttgaataatctgcttatcagatctgaaaaagaccctcctttcattttttaaaattaattagaggaaggttttcttggttattgacttgctgtaaacatcagggtagcaccctctgaacattctgatacgggcttttgattaacgccgttctgtaactgaagtcaaaatcggcttctgtcaaagcagcccgttatgttttcactttctcatttctgtatcatattagtactgtagatttggatgacatccacacttccaatgtcgcgttcaaattaatttagtgaaaatttatggggctgttcagattgatgtcattttcataatatcattttttggcaaagttgcaaaaaaaatgtttacgtttagtttgttgtcaaatttgataaatacataagaagtcttgccaaaattttagcaatattgccatcttgttaaaattttggtaatgccaaaatttggtaaggtttattttggctacaatctgaacatgcccgtacgataagtgtacgataaaaaatactactgcgtattagtctttttgtgctcaaccaacaagaactgcatcttcaaggctgctaaagtttcataattccgttgtttcaggatagctttataaaggaaagtagtgttccactttgacaaat

SEQ ID NO: 41584 - DNA, 678 bp, Oryza sativa
gactcgacggcaaagctcaagctccccgacaactaagccagcaactgtccctttgggtgcacgatgaggcaagtcataccaccgatgcctgaattgtaggtaactgtccaggaactcatgcagggaagtattctgtgccactgggaaaaggtaacgataagcattaggaaaccattggtaaagttcaaatgcacgcggatttattcataagttaaattctaggagtgaaacaatggataatcacagatctaggcgtgtcctcaactcaagcttttatgttgactcatctactcgctcaattattgttcaggcttagtttgcataagaaaaaatgccaaattcctctgattgtagggtagttattcctgtcaatctgaagttcctgtcaatctgaagggactaggattaattccttcccattaaaactatttcaaaggatcataggtcatgatagtgataagaatatgattgcataggctttgctttgcttatgcaactactagccacttcaactgcaaatgtagtaataaatttaactgcacgcattttatcttgcgcttaaaagtgcaaactgacatttgaacaagcatacactagaattttacacataatccgtagccttagataatcacagagaccgaagcatcagaagatgcattcaacaaacacaattgaagc

SEQ ID NO: 41585 - DNA, 672 bp, Oryza sativa
ccgatctactgtccacatacccataaatgtgtcagagcgtcaggtcggttcttggatggcataataaacgcgtggaattagcgagattgcgacgtatatacagtagtcatactagtagcacggccgatccacaggatcgagctgcaggcataggctgccacagtgccacggtatcgtcagtcatgctgcactgttgatagtacaagtagtagtactcctggccaccgacatttctgcactgtccctttctgggactaatgcaaatgggaattgtggaattggcatctactagctggtatttcgtgtaggcagaaataatgcatattgctcctaaccacctctttagtactccggagtacatcggatgaaccaacaaaactaggattcttttgaatcacacgaattttgtaaaaaagaaagacttggaaagaaaatcacatttcaaaatgggttcagtcagtcagatgaccgttttagattgatgccaaaacataccctataaatttatcggtagctcagatcataaatgtgatagtttggtttgatgtcaactactcctatttggtaatgcctatgctttatttgacacaatttttaggtggtgtttgaatctagggacttaactttagtctctatatttagatcctaatttagagtattaaatatagacta

SEQ ID NO: 41586 - DNA, 664 bp, Oryza sativa
ttttttaactgcctccaagaagacagtgcgtgtagtgtagcactgtgaaaacctctgatgaaagtggagtacaagagctgctgtgttttgtgtggtctggatctttgaagtttttgaccaagggggtgtttgggaactagggactaaatttagtccctctcaaaaaaacataagtccctcaaacataagtccctaccacagggagggacttatgtttttttagagggactaaagtttagccccaatttagtccctccaactaaacaccacgcaaagaaacaactccccatgaatgatctgaatctgattcagatggctgtggatgaccaacccttgcactggattcctctagcccctggtgactcgtcgtgggcggtagcaactggcattgcggtcaaaacccaaaagcgctgcacaagcatgacatgagaaagagagagacatggtaaaattttttttttcatgtactgatctgttgtgttgggctgtcttgtgcctggcagcaaggtaaaaaaatgggttcaccgcggttcacaggggcatggctactggtggccgacgctgttggaattttatagtgggcagtaacatgcccagtcactggcttgactggtcagcagcattttgtattggcactgtgaagtggtgcagtagtgatggaagc

SEQ ID NO: 41587 - DNA, 685 bp, Oryza sativa
ggcgctataagaaaaataaaaacccatgtgagatttgtatgtcagtgaaacaatatagtattcttcttatttctctccccatccttcgggtctcgagtctcggcggcgacaaatgtgccggcggcgtgcggggtgaggacatggcggccggtgtgcggcgtgcctaacgacggcggcgaaggaggctcaacagtcggcggagccacgccgcatgcaaaccgagcatcgacgtcgctcgctcttcccgcggcggagtggaaaggaccgcgaccaacagggagaggagcggcttccacggcggattggaaggcctcctagtctcctcctatggcgtgctcggtggcggccgaactaaggagatggcaaagcccatgccacgcacagcggcgaggaggacgtacgtgcccatggcggagacgctgaaccgcatcgtggattggttgccggactatgacgcgaaggggaagaagtggaggcggaggacgagtgtaagttattttagaagacagagatccctataaggattgtgaagcaatggacaatccaatttatcttttactacctccgtttcaggttataagacgttttgactttggttaaaatcaaactgcttcaagtttgactaagtttgtacaaaaataaagcattttcaacccaagacaaatttattaagaaaatgggagcg

SEQ ID NO: 41588 - DNA, 637 bp, Oryza sativa
tttatcatagtatttctactatcttttagctgtcatattttttgtttttcttcaactttgttgcggttgttttttgtatgctggaaaatataaacaaaatagccttctaaagtccaattcatatatcattttactgattttttttgagagatgaaataacatagggggagcaccttcaaaagtgtgacctttggtatctatatcactgcattttatatagcctaccatgcatatgttggactcccttggattttttttttaatttttacacattagctttgtgattacatacagttatatgtcaatacatgtcaggttgtaacaggagtaatatttcacaatattatacttgatatataatacatttttaccatattgttctcaagcccaccttgcgctacaattgtttagtacttcagtgcagtaggatatcttaagccacgcaagcatttttttcccctctttgatgctatcacaactcatgtacagtaaagcattgtgctgtttcattagcttacactctagtcatgcttctctggcattctttttcctaccctgttgatgaggttcctgtatattgttaaaaatccaagctttgacagaggaccttctaattttccagcttgcgaatagaacc

SEQ ID NO: 41589 - DNA, 1123 bp, Oryza sativa
aagaggagagaagaggggggggggggggggggattgcggtcgtctctctgtaactgagcatacattaacatcatcagtaatgtgtcattgtttgactgtattatcactattgatcataattcttgtgaaatgcaaagtacgaagtagataagtacttttattgagtgtactagctagatttcagtttgctatggtggcaagcttagttgtgatacaaatttgcggacgttacccctcagaagtttggaactttggattgtgcatagcttgaaagcatggcatattgacatgaaaccaggggcggatccaacgtggtcccccctgcacccataaaatctatggatacccccggaacactcccccctcgattttttcaccgtgaatgataaagtaaaggttcttaaatggctagagattgaagatactatgtaactgagcccctccaatttttttgttcctggatccgccctgcatgaaactatgaccgcatgaatcttgtagtgacaaaggtagtcttagctgaaattttgccacaatgatccttataaaaagttatttttaataatgaaccgtgccattcagtgcctatatttgtagcgctaaaacgttatagttaagcaccatcaagacaacgattcatttcttcaattagtttttggcacgattcatttttttaaaatacaattcttttaaaagggttagtttgtcaaaattttgggtaatcatagtcctggaaaatattgtgccatggcttaaacaaggtgcctcgacgtcgattttgggaatataatgcatggacatatctgtgcagagtctcaagacacgagttttttggcatatgtagtatcacaaaaaatctgtacagaacctcaagataagctctctctcaagccaaatttaaactgtaaacgaagtgcaagtttataaggtaaatcaaggcaacatgtgccctgtttgattcagattatcaagcagattattgcggtggatgcaggtagaccagctaatgggctatgagagaaacaagagtcatgtttgattcagatcatcgatcagattattgctgtggattcaggaagaccggctaatgggctaccggggaaataagttcagacacaagtca

SEQ ID NO: 41590 - DNA, 682 bp, Oryza sativa
  unsure (1)..(682): unsure at all n locations
tttctccatctttggttccaatttggcaatgcctttgaatcaatgtattgttttagattccagatatggatttatgtgaaggtgcactgttttgttatttttctttgatagctgtgtacattggaataaaccatttgttttcaaatgtatttgttctgacacttaatacattgagctgtatgctccatagaatgaaaatctaaaaagggttgagctactattctaactaatgttgcttatttcactatttttcagaaaactctgcacagtgcatggaaggaaatatcaaaattacgagacaatgtcagttctaaaaggagcaaactccagcttctaaaacaaaagctcaaactgttcgctattcttagaagacaggtaaaagagattatatctattattgttttagctatttatgcagtttgcactaggatttggtagcatttctggcaaagttgattgtatctaagtgcttctatttgacatgttcagatatactatctagacgagtggtctcatattgaaaaacatcattcaagtgctttgtcagcagcaatcgaagcactgaaggctagtactctccgtcttccagttgttggtggtgcgaaggttaggatttttttcataatacaatatagttatctgatatgatttgatatacccctttggatagttntaatgtttc

SEQ ID NO: 41591 - DNA, 688 bp, Oryza sativa
ggcgactgacgcgtacacgccccgccttgtgatcatgagccgccgatgacacgcgccgcccggctgggcgcccaaccaggaaacgacgagagatcaccgagcgcgcggcggcacgtcgttttcggcgcggatacgcggtcgcgggggcggatgctgttgccgttaactgctggggggccgggtgtcccgtactcccgtggcgcggagccgagcgagcgcccgagcgcgcgtacgtcggcatcagattcgtgcatgcgcggcgcttgcctcgctcgcctcacatgtcctttcgcgagtggtagcccgtagctagggagggcgcgatatactcctatcgaacagtagaggccgtaggcatgtcgtcgtgacaaggaggacgtacgatgcggtttgttttcgactactgttcaacggtgcatttctggtgatcgatctagtcacatctatgctcatccacttacagacaggatcgcttttcagggaattatttgagcaagatttctacactactgctttactacttttcggtcatggcctcattggagctccggtgtttctgtgtcaccgaaagatttgtgcatatatattagcttgtacacctagtgccctagttactgcatcagtctgtgggatgcagatcgtctgcagtactgctcattgatatatggatcccacagcctcttaggtc

SEQ ID NO: 41592 - DNA, 632 bp, Oryza sativa
atggctaactcacctccaccaaaacaagcggtatggtactaaaaatattctgctcccccggcggctctggtgtctcttctctgctttgcaccaatctcctgcatgggcctatagaagcagcactgttgggcctttcctgacgctagccacagcccacaacataagtcccattccggcccaactataacaatccacaatatactacaagtctgtatcctaaagtccaaatagtcgtcgcatacccgtacaatgtgaaccatccaaaatggaccaaccacatgtgaagcattcttccggaaggaataagtacatctgagatcccttaacttgtcaacgaatccgattttcgtccctcaaccagaaaaccaaatacaacggatccctcaactgtcaaaaccggtacagattaaatccctcgacggttttgagggcggttttggctgacgtgacgcctacgtgactaacttgactcagtattcatctgacgtggcattgacgtggcgcttacgtgacaattcgatctgaaaaaataataaatctagtgggacccacatgtcagcctcacacagaaaataataaaaaatagtgggccttacgtgtcagtccaactcacccttcctcttcttcctcct

SEQ ID NO: 41593 - DNA, 566 bp, Oryza sativa
gtgcgatgaattaacttgcgtcggctggagtggagcgtatgattggagtggtggggagaaattaactgcgtgcatgcatgcaccacagcaccactggatcttttcttttgctgtggattgaggcttaaaaatcctgccacgatgaagctcttttgcttagcttttaattaccctgttaacatgattgggtttgtgaatccacctgtgaaaaagatcgataattgtatgcggtgatcagacaaaaggtcggccactggtggcgttacaaagatttgcaacactaaccgtggtcggttttaccatgacgtttccgttgcagagggaatggatttccgagtcagtcaaaaatcaaaagcggcagtgcgatctctctcctaggggagatagggcccacccaggcgcccaactctccaatagttaagcttatccggcaaagttagaatacagtaacagcattttagcaaactgttcgagctagcgttcttctcaacttgtggatcgatccatccattttgcatgggattaatctatccttttctgcgtcaatttgtgccgatacaaacacg

SEQ ID NO: 41594 - DNA, 596 bp, Oryza sativa
atagagcgcgcaatcaagctaattaatcgatcggaaggcactaaattagaattaactactattatactaattttattttttaatatatagcgtcgttgattttttttacaaacatttgatcattcgttttgttcatttcctttacaaatataaaaatatttaaggctctgtcctcggcacacaaaacgaagcagcgttttagtgcgtgattaattaagttttagctattttttaaaaaaatggattaatatgatttttttaagcaactttcgtataaaaactttttgcaaaaaacgcaccgtttagcagtttgaaaagcgtgtgcgtggaaaacaaggagtaggagttggaaacttgtagtaccgaacggagcctaagtcataattaaagaatattcgatgataaatcaagtcacaataaaataaaataaaataataattgcatatttttaaataacacgaattgtcaaacgtatcttaaaaaatcaacaacgtcatatattagaaagtatcaagttcgtactatactatacacaagatcaatcattttcataacaaaacccttgtacatgggtagtcttttccataagggcaact

SEQ ID NO: 41595 - DNA, 2348 bp, Oryza sativa
cggttatattacatttatgtttggtttacattccaaatatcatcgtagcgttagcacgtgcatattactagtcttgaaaggtttgaaaaagatgagtcggaatctttggaggagttacacttccctctccctcaatcatcggctcaaggaatcgagttttctatatgggtcctttccgagtcatgctaaaatattccaagcacaggttttgaaaatcttgcgtcgcttgatctactttgttttctgtttatctgtcaacctgtctactgtcactcaaataatatcatcgttattaacttctttagacaggttgacagagtaaattcgtcccactgtgtgtgccaaaagtgtgttgatgcaaaattcgtcgcacacatgaaggcatgaaagatttgctttacactaatgcatgtcctatcaaatcgggttcagggcgtgctagttagtttgatcctgtaactaataatatacgaatgaaaaatttaaatcgtagtgcgaatcagtcacaaggccgatgtagtatagtatgcccatccgatgtcgatggaatttcagttcgatcggctataaccgatggatataaatataaccttgcgagtacatacttatacccataggctaaactaaatcaatacaaggatttctgactcattacacttccgactcaaatacgactgaaagtgtaatgagtagtttcctatttgtaaggagtatcattacacttctgacttatatacgactccaatcaactcataaatagaaaactatctgagaaaaattctaacatgattccattggctcaagccactatctacagaaacataaactaagatacaccttccttattatggaagcttgatttaaacccggataaacttgctaactgaatcttctacaagtatgacgtgaattccatctgattggatcttgactaatggaaattgccaatttttttgttaacacaaacatgatatcccataggtatcatgctgatgttagcatggtaccgtacatatctctggtactagacatgatacctgtaagtaccagattcggtacctatggtaccatgcaattgatccgtacccacggtatcatgctgaggtaccagattgatgtaacgtcctgtatgaaccagatctggtacataaatatcatgttgaaatcatcatgatgtcagctattccgttggaacgttggaccgttatgtactattttttgaaaaaaagataacacgaccgcgcagggaaggcaggcggctagattactcatggaataagttcatctgaggtcccttaacttgtcaatgaatccaatttttgtccttcaaccgaaaatccagatatgatgggtccctcaactgttaaaaccagtgcaaaaataagtcccaaggcagtttggacggcggtttaagctgacatggcgcctacgtggctaatttgactcagtcttcatctgacatggtgcctacgtggcaatttgatttggaaaatcataaaaacggtagccccacgtgtcaattgcaccaaaaggattaattaaaaatggaggggcccacgtgtcattcttacccctcttcttctctccccatccaggattcatggactccccagactcgctgtcgccgtcatcactggcgccggacctagaggtgtctccgtttcttagcctaccgccagcagccgcctccctaatatccccttcttctccacctccaccccaatccggcaacccggcctactcgccgccgccggaggtcctctcggacaaccatcctcttgctataactgctctaccgcagcggcctccactcaccgggatcgcggccatgttcacactctgacctactccacctccccttccttcgatgccgcagcaccgccacctcaccagagactcaccgtgctggtgactatccccagaaaacccaccatggagcgcctcctgcacttctggcccaccaaaccgacctctgccaatgccgttgcaacggctcctgcacttctctccttcctccctttacccttctctctcgggcctcctctcccctcggcccaactccgtccccctcccttccttctctcaggccgcccctctcccctcccctcggcctagctccctcctctcctcctctcgcctgggtctgccccggcccaagccgagctgcagccctcccgcgcacgcgcgccgcacgcgcgttgaccgcgcgcctcccgcgtgggtcccgcccgtcaggcgtccccgacctccagccgccggcctacttcctctctctcctgtgaaccctagcgccgttcctccctccaatccgctcaattcaaatggctcattccaaaattgattagggg

SEQ ID NO: 41596 - DNA, 729 bp, Oryza sativa
ttgcagtgtttgcatggacatctaatttcatttgtcttcttagctacaacatttttcttcgcagctttcataaatatgtcgactccttcaatatatgacgcacgatatctctctctacgcatccatgatctatctgccatcgtctatgcattgagaaaaaaaaactaacaattagtttaaatagttttaataatatgtcacattaaaataattacgctaatatgtaaaaaaataaattaaacattgtgaaaaatattacaattagtataaacacggaaaatttaaaactatattatgacttcattttttttaaaaaacctaccacccatattcccaatacatgacagctagacatacaactagaaaaaactagacaaaattaccaaactaccctctttctttctctcaattctcttccataaccagatatagatctaaagtgcacaaaacaaccgtgccatatagatcttctacaaataaacctatcaaaacattgcgaaatctatatacattgatcatgtacaatatatcataaaaattttgaccgttttgagcaccacaaaacaaatcaaaacgaatatgccttggaaacttgaccttgcaaaatctcaacgtagaacggataaaaatgaaaaaaaacttgagaaatggagtactataaagtataactaacctttggtacaaaagatctatcaaaccattcgagttcaaaaacttctcccctatgtt

SEQ ID NO: 41597 - DNA, 4969 bp, Oryza sativa
tttctcgtgtgttttttgcctttttttgccaattattttctcgtgtgtttttttgcttgttttttttcaaatgttatttttgttgctttttttaaaaacaagagaatatagacgaaataaaagccgtgtagtaggtggcaaaaaatcgatggatcctatccgactcagagcgatttttttaatagacggtgtttttttcttgcgcggttttttaaaaccatttgttaaaatggcgcgttttttctgacagttttttccttgcatgttttattttttaaaaaagttaccgatgatggaaataattttcctcgcgcgtttttttatttatttatggaagatggaaaacctttttagcgtgtttttttgcgctttttctgacttttttctcacgcgtttgtttgaaccgtttctattctctcgtgcattttttttaaaaaatagttagattatattagagatagagaagagatatatattgattagaaattttgccctttctatttttttcctgtgtgcattttttattttatacgaacaagcgctttatttttttacgaaccatttttttcgccactttcttatggaatcggacaaaattttttagattttttttctgttttttttcgcctttatagtaatctgactttttttcctgtttttaacggaatcgaatctagtattttttttcactttttttttgccttttataggaatcagattttttttcgttcggattacgcttttttttttgccacataggggaaacggaacttttgttgttgttgtttttcttttttttttttcagctttcctttttctttttatgcacctttctgcttttgttctctcttttattattatttttaacaaaaacggcctcaagtaccttattgcaagattataggaactcaaatataaatataaaaattatagggactcaaaagcaaaagtacaaacccaaaaattaaaatcatataaaaatggaatgctctcgacctgtaggttccgttttattaaacagatctctaatccggcacatcattttgtttcaccaagatatgtgagatatcacggtatagattaagaatcggatctatagtcggactttttttctgtttctgagagggaatcggataggagtcggaccttttttttttagcttttttttttacagacgaaggaaacatcttttattattttttaagtagtagagacagagacagatatagagattttttttcgcttttttgacatggaatcggattattttttcgcccttttttggatcggacatttacggttttttttctcgctcgtccgtttttttggggcggtttttttgtcgccctttttcacagaatcggactttttttttgcccttttttattggacagttacggtttttttcatttggtttttttcgccggttttttgtcgccctttttttcacggaatcgaattatttttttcgccggacagttacggtttttttttgcccagtttttttcctcgctcgtccggtttttttgacggacgatggaagcatatctttttaagtagtagagaagagatagagatatatggttttgatctcctgatgtgtgctgaataggacttggtacgatttaaaccaactcctgttcggttgatttacagccaatttggagtgttgatttttttttctatagtcagattttttttatgttatgctgaaccttttttagatggaaacttgttttttttgtcatggtggggtatcgaatcggttttccaaggcggttaatttttttccgtgttgaatagaaataggacttttttttttgctgcgcctcttttttttttgcatttttctgccctttttttaaattttatggtacgataggaataggaatcagatgattttttggggcgcttctttttttttttgccttttttacgtttttttttcgatttttttcctttttttgctttcttttttgtcggacagatttgttttttttccacccggtttttttccgcccaggttttttttatcggacttttttttttctccacgatacatataattcatttttctttggaataggacagttttctttttatttttttaaactctttttaccgcgtcgatgtagtcggattcgtttcggtattttttccttttttttcctttttttttgtcggacatatttgttttttttccgcccgtttttttttcgccaggtttttttatcggacttttctttttttcgctcggtttttttctcccgttttttgacggacgacagaagcacctagagaagtgttttttttcttttctccaatccaatacagatcggatctcttccagggaaatcagattttttttctccagggaatcgaactctttttttttcgctttttttattcattaaacggtttgtctctcggacttttttttccctttttaagggatcgggtgtttttttgccagggacgggtgtttttttcgcccggttttttttttcacttttttttggatcggactttttttttcgtccggtttttttatcggacaaacttggttttttctgcccggttttttttcacccggtttttttgacggacgatggaagcacctcttattttttaagtagtagtagatatatatatatatatataatgattcttttatgcaccttggataaccctttgtttcatgaatctatgaactggctgttgtatgaattggttgatgtctcataggtttaatagggtaaccctttgctccattggataaccatttatttaataaaaccatcaagggttgccccctactaaaccatgggccagagtggtcatgtggaatggtttaggtcaatccagaacctaaccattcccatcttgaaacataaccactcaagcacttctttctcaagtcgtgtcaactctagttctcgatacattctattcctaacagatcaaatctcacccacaacttcctcctataacaccctcggttagcaaatacaaaagtaacaagatgaatggggtggataagctttgtagtgttgattgggtctgtccatcattccacaccaactatttatggcaccttaggccatgtgcaatgggatgcttaggctgatgcctagagaagaaaaccgtatttacttatacaccatggttgtatccggctataaaatgtcctgattgaacacatccgttacaaggctctccatattgaattcctaatatagtaatgtatcccggggcgtctcaccatcaaaccaccaatactacgctcaactcttacttccactcgcattatttgtccatttgcacgctaattaagatattaaaaggggatgtatgatcaagggaaaaacattttttgtgttctgccacttagatgagtataggtttacttgtgagtatgcagtacgcaaggtgtagccatgtatatattggtacatgcagtgatttctactaaccagcgaaacaagggatgatatataaacaaccaatgggactcggatttggcaatggatgattggttaattaattgtgggctgtccactagaagacaagggacaaatagacatgcggctgtgttaattctttcagagagttcccaactcattaccattgttcttcgtgcgcacatttttcaaactgttaaatagtgtgttttttaaaaaaaagattatattgtaaagttgctttaaaaatcatattaattcatttttaaaaaattagtaaataattaattaattatatgctaatgagttactccgttttacgtgtgtacaggaggtgcgctttcagcctcaccaagctgctcacggtgcgtatgtggagtgtgagtgtgcaataaagtccagcccacaagataatgaaaaaaatagcaggctcaaaatgttgggctcgttcgcatgtcgtgcatggtgcatgcaacgctacaaagcctcaatctaagtttgggcctatttagagcttgtgataactgtaatttttcccaaaataaaaaattcgtccaactttttatcctttttatgggaatatatagatacagggtgcaaaaaagaaactttttttagggaaaaaattgtttttgagggaaactgcaaaaaagaagctataagtcaaaagttggttctttttttatcttttctagattcttataagctggatttctacgatctgcaacatgcttgttctgttcatgacaatcatgggtgtccctaagcccgactgagcaaggcgtgtgcttggcagtggtgggctggtggccatctgattattcaacttgtatcaactggaattgcatgcaaaattaaaaaaaaagaaaagttaatattgtttattccttaatagtcagaatatgagatcagtgttaagatagagccaggttaccgacacaaagtgatactgccagccattgttcatagatgacatatgtaagttgggagtacctatatatctttcgaaagattttcatgatcgtatcacacagatttttaatctttggattaaaatccgatagatataataaaaagcaaaaagcaattaagaaacaccataatggacactaaattaccatatcctcaagaaaaagaccaaatccaatacaaaatttaaaatttacatgcgaagattcaaaaattacagtgcaacttacaaaagttacagtgtaagttttataaattacactgtaacttataagaaaatgcactgtaaatttgagtgagaaaatcgagtgagagataagaaaaaatctttcgagtgagatatagcaaaatcgatgtaagtttgtcgtcaattgtcatgggtagtgggccgatgggtcgaggccctaaggataaggatagtgtcggttggataagattagattgggtcctccctccatcatctatataaggatggattgtatcatcattctaattaaacaatgaatcagattagtctcctccaacctaaatccccctct

SEQ ID NO: 41598 - DNA, 849 bp, Oryza sativa
acagcctaagatcccaggtaggagtaaaattttttacctcgtcacatttaaagtctggacacatgtatgaagtattaaatataggaaaaaaataattacacatattgcgtgtaaattgcgagacgaatcttttaaacctaattgctccatgatctaacaatgtggtgctaccgtaaacatttgctaatcacggattaattaggcttaataaattcgttttgcagtttacatgcggaatctgtaatttgttttgttattagtctacgtatagtactttaaatttgtgtccgtatatctattgtggcacgcctaaactttttacccctagatctaaacacaaccataaaatagaatagaattgaattgcgaaagggcctgtaacttagtgtttacaagagccttagtagcaccttaggtccggggcttgactcctcatgggagcgaattttataggatttaacggctctgtgctttcattggtaggcgacgtactcgtcgacatcgaggtgcctgtggtgacttcgtcaatctctaggatttaccggcccagtcttcgaagatgctcataggggtagggtttatgtgcatgcgttcgtaggggtgagtgtgtgtgcattgtgagtaccagtgttatactgtgtaattttaaaaaaatagaattgaatttagagggtatttagatgcaaggtgtaaagttgttcatagggtgtttgcttcagtaaaccgcgagacgaatttattaagcctaattaattcgtcattagcacatgtttactgtagcaacacattgtcaaatcatggaacaatcaggcttaaaagagttgtctcacaaattagtcgcaatatgtg

SEQ ID NO: 41599 - DNA, 669 bp, Oryza sativa
tctccttgttaacttgggagaatcaaatcaagggcatatatagggatgagtcttcagtcatggcaattgcatttgtctataagttaaacttagtgccccgctattatcaaatttaatagcactagatatatttaatcttatacttcggtcgatgcaatgtattagtacacttacaaattataggcatttaagttcactggaatgtctgtcgagcttcttcactgttcacagaattcctcttagaatggaaaaccttattcagctgttctgtttgtacgtatctcttccatgtggagattctgagcgcttagcaggttcagataaatcttgtctttgaatgctggatttggaagttgtgttttatccattggcgtagaatgttttatttacaagctgtggaaagccttgatggtgtctatgggtttcttgtttttgaatttagtagactaatgtaacaaatggtccttgattggttgcccatgccaccagccaaggctctgaggccttgttaacaaatggtattgtatttattttttttcatggaatacttgcttcagtagtgatggttaaatttttgggtagaaaatgcctctgtgtagtgatgtactatttacaatttttttgttgcgtaaagatgaaatttgcgctgtatgttatgcaagtatatat

SEQ ID NO: 41600 - DNA, 690 bp, Oryza sativa
aggactaacccatgagcaccattaccaaagaatggctactgaagactatcgcggagcttgaagaagagcgagatgctacgccaggcgcagtgaacgaagacgcggcgatggcgctcgctgcgatgaagctagcgctggcatcgctcgaagcggagcctgtggcgtggctactgtcaggcggcggcgcaaaaaacaacgtcagcttcgatagtggcaatgcttatgccgcccagctgcgagaagtaacgccgctttacaccgccccgccagcgccggtatctgtgcccgctgcgatggaaattgatgatgactttgacagcgcgtttgaacacggaaaagctgtcggctggaacgcctatcgcgccgccatgcttcaggccgaacctgtaagtaatagtgatgagttaccgctggactatctgcaaggacacaaagacggcctggagtgggctgcacaattggcagaagccaatcatccgcaaacaggtgactggttgtacgacgaccaaatcgaacttgccagggcgattcgcaaaggtccggatatgcctactgttcagggtggcaactctccggtgattccagatggttgggtgatggtgccggttgagcttactccggatatgcgtgcagcatgggattcggctccgtacacagacgatgatgacaacgacatgcaggctgcctacc

SEQ ID NO: 41601 - DNA, 656 bp, Oryza sativa
atggcactcgagatgaggcaattttctggttttcttcattccaaacacaaaagccatgccttcccgagggaggttggatacatatatatagctatagttggctggatggctgctagctaattgctgcccacactagtctaaaatttgaacgcgatgctgtcctagagagcatccaaactgaataaagcataaaggagatgctagatgctgtcctagggatgctaaaagcaaaaccgaaagatgctaaaagcaaaactgaaaggatgctgtcctaaaaggggaaaaacaacctaaaagcaaaagaaggaccacaaggaccaaagaccacaaggcttattccatcactgctcacatttacagcccaattttggcgctgacagatataactttgacggttaatttttaaacatcacaaaagaaaatatctctaaatatacaaaatttaaattaactaactttgattacaaatctagccatacaaactttatgctatgttattagacatcctaaaaatattgctggttaaagcttgattggtgagagtcaaaattaataagacaaatgaagagtcataaatggatactggtctaccatgtgaggcatattaggctactacgatcttctttacattttttatttacttagattaattgtat

SEQ ID NO: 41602 - DNA, 536 bp, Oryza sativa
atatagattcttttgccacgagtttgacagtctggctcatctaatgcaaacagtattggcccatgaaagccaattgtaggaagcaaaggaagatcggttttggatttatcaagacaagaagtaagataattttgaagcatgagttctcatactccaaaactgggagacatgtgttaacaccaaaatttagtaagcccgaagtcatcattggcctagagttagtatcggcttcagagtcttggaatcggctgatgggagtcgtcaagtcactagcagttgtgttttttgtggaatcggatcaattaaaggaaatttatccaaaagagtctgagttcaaggaggatgcggcatggcaagtgtatctattaattaggaatagtttgttagttcattttatctttaggaaagtgtgtttagtgtccataaggactttatgttttccttttatctttaggaaattttctttcttgtcctagaaggactagtatctccctatgggtataaatatatacacccggggtcattgtaaaatatct

SEQ ID NO: 41603 - DNA, 1455 bp, Oryza sativa
atgcattttcaaccttaccaaattttaataaagttgctaaaaaaatggctacatttagtttgctgtcaaatttggtaattatataagaaatcataccaaaattttagcaatagttgtcaaaattttggcaataccaaaatttggtaaggttttttttttatcaaagtgaacaggccctgggtttctcgccgaggagcaataataataaataaatatcgattttgctatatatttggcgacaaattcttccccaaaaatttgacagatgtaattacagtacaatcgtagtgtaattacactgtaactatagtgtaacttgtatgtaactttcaaaatctctccgtaacatgttatttcggtaaaatggaggtcgtgggaacaaattcgtttacatatgtgtgtgctatgatttgttttcttcctcaccaaaacaaatcttgtaatagatctaacgattcaaaattatgtgaaacttacatataagttacagtgtaattacatacaagttacagtgtaattagatataagttacagtgtaattacactacgattgtactataattatatctgtcaaatttttagaagaaaatttgtcgataaatgtataggtagtcccataaataaaataataaatcgtatagcttcatcacatagggagaagtcgggaaaggccgggtacgaataggagtaggccgtaagcccgtataggcccatctatgggcttatttgtgtataatgggctgccgttgaatggctaaagttctactagtattgggggaaaagataatttcagagaaacagtctcatcggtttatgaatttttgaaacagttaggccctgtttgatttgtaaagaaaaataaaaggaaatttgtacgtatgattcaaactgtgtaggagaatttctatttggtcgtttgaaacaaaagattgagacaccaagaatcatatgagatccctatggaatgactcgagagcacgaaacattttacacccccacataacagaagagcacaaaaccatgtaggagtaaccagtacagaatgatctactgagaacaacatatcatgacaaaaccacccaatccacgtcatggtgcaggtacgaaaaatcgaagacaggctccagacggatgtcaattaatggcctcatctttttgcttacatttatacttatcaacaaaaaattaaattttcaaccctttaaagttgattttgatatttttatcgcagtttatttttcagcctttacttttagatcattaagaacacgtatataaaagttttattcacaaattatttttcgtttgtaaatatgtcgtttggcttattccatccaatggactctgtcaacaacaaaaggttcttgcccaacttcctggtgtttgctacaaggataatagaccaccaggatctacttgtgtttgagacctatgtctctgtcggattgggattcg

SEQ ID NO: 41604 - DNA, 4501 bp, Oryza sativa
ggacacaggcatcttacagaaacgtttcttttgctcaagaaaactaatattctcttgttagctagatctatcattaagaactgggctctgcctgcaaagcttggactatgactagattatatctcctagatccaaggtttatcagtggaccacttgtatggtattctatggaaatcaacaaatcagcacactaataaaatgcatgaccattgaccttaatcataactatttcatggaaatttagagcagtttataggtactgtgatccaaagttagctgtaccatttatctagattaccgagtgggttctgctggtgggggtggtcttcgagattcagactgcctcttatgatgatctcattggtacccttttaaaggtatgtatagttcatggagttgttctctctgttgtttttagatcccaatgcgttgaaatctccattagccattgcctaattagtgctgcatgcatggttctctacttgcatctgtaacagagttttatattgtataaatgtgttcagtattagttggcgctggccttctctttcctttcccccctctctatgtttttttcttttttttaaaaaataactatggcaagataaagagtaaattcattttctctgtgcctgctccattttggaacttcatagttagctcatatatcgcagataagagtagatttgttccacattgtctatataacgggcattgccacctaggtaacttgttcttcccagcatcaagtttaggtaattaggtactgcatcaggtgccgttcaagtttttcttttgaattggtgtgcaggccggcctgcctgactttgcacacttgtgttaggtaacatggtacagttttggctgagtttgaaatctgaagcagttcaagaattgctagaagcctagaaccaggatttttaaaaaccagtccggtttccaactgaacagtgctagtgttaatttgcctcatcaagtttgatttgtcttcagccttttaattaacacgtggaattattcactaatgtagttcatccattgaatgaatcttttgttacagcctgtgtgtcattttcagttgcttatttttctagcccatgatctatctcgtcgtcacatatgtaaactcatgatcatttgactttgaagagaaaataatttgctaactgtcagaatttaggccctgttgaaattacaaaactaaaagtgtcgtaagctgcatttatgcatgcgttgttcgcctatttctgattctgatctgtattcatatgatcatgcatgaatcagaagtcaactcaaattaatttatctaagttgagaagtaaacaagctggttagcttttacaatttgcaacatacgacctgtagatttcgagtactgatcatattggtacagtgcagttaccatattcaacccattgcaggttcatccttcaagttgactattgctagttgtttatttataatttacgttatgtatgtattagttgacttcatcgagtacctatcagtattttcacactttaaggctgtatatttttgttaattataccacatgatgcaaaagatatatgtagttctgaaagtttagctgttctgaataattgacacaagctaagcatgagactcatgcatgcaggaagaattagtactagctaaagaattaattcttttgttcataacttcagatgcagcaattgcaacttcagcttgcaagcttcctctctttctcggaattcacatggtctgaaatggaagcaacattgtgtagacagatacgaagtcagatggcttcggtgatagccattagagaaacagtcggttaatcttgacatacgtagtgacattggtggccattatatcagaaaatatgcaccaggatcacgtagtagctaacatagttttcatgatcccaagaaaaaaaatgtttggcttaggtagccaagaggattgacaagtagggcacacaaagggtagttagatcgaagacacacgagtacaatgagaagactgaaagtacgtgtgtcctgttaattaatttatagttgcaatgatcagaaggaaccttcaacttgacgcccagcttatgtcatgcttatgtgccattcatgcatccatccatccattttatgcaaattaaggagattagctgtgctcttgttggctgcacaacatgcaatcccatggtacatttatagtaggatattattcagagtagaaactagaaagcaatgcttcttcagaggatagggcagacttaaggggttgcatctatggactactttgcatatattgcctttccaattgcccccttgtgaactacaaaattgtgagtaagggatccaatatatgtttgatcagatgataaactttaatattgatatcatcatgggggcggcatatggggccgagcttttcaacgataccgtcaaagtggtgcctaatcacagggcaatccacatggactcattgtcatcggggcaaagaactaggcaaccaattggagattgatttggtttctaatccattttcaaaccggttgcttcaaagcaagtgacttccctcatggcagagtcctttgattttgtattcttgtgtcaactttcatggcctatacagtattgggagtcttcacctagcatgtgacaactgttcccctattgattgagcttttccgttgaactgtgcacaagtggtttccaatggtcaagaactcaaggatcaattagttatattttgtcctcctttcagaaaagaaaaaacaaaagaagcagccctgtttgtccagctcagattctcaattatggaactatttatgaaagtctggtgctgcatggtcgcatcaattaaaaagagaaacttctactgaactatttgcaagttgcgtcgcatgcatggtcatagtcactgccatgacataatttgctagtgtgatgttgaaaagtgctcatcctaattgtttacctcacaattttaagcatgattgacaaaaggatacctataacagggacatttttagctatacgttatatatacccgtgcggtgtaacaggatgaaatatagggaacttggtttgaaattttttttctacaattttatagggacatttttagcttatatacccgtgcagtgtaacaggatgaaatatagggaacatgatttgattttttttctctatacccgtatgttgtaataggataaaatattgggaacgtggtttgatatttttttttctcacgtaattctctcgttggtcaattagggacgtggttcaattttcacttctctcgtatgtttctcgcggttggtcagtatttttggtacattggatttttggagtggtttttctctacgtgggatggtagtgaaattggaaggacatcggtgttttttataatagtagaaaaattccccgtcaaaaagcatcaaagaagtctacgacaatttcatggggcattctatctttgaactgtatgagtaattaatcctaaacatgaatggggttttctgattgggtgtgaaaaacattgagaaaaatggagagaagcatctcgcccaaaaaatttgagttctgattggacaggggacttttatacagtttcgtcactgtcgcatctctttctgccattattttcaataattatagcgtcctgtacgtttgatgattttccatgctgtactttctccatttcaaatatgttcttttcctgttacaatttcttccaaattagttgcgcgtgatggagatggttcatttgattttggctattttctttgcaaagccatgtgagtttggtacgacttggaagtccttgaatttaatgttagagcctgatgctctggtaccaattggagactatccaaacgttgtatttgactatatgtattagtacataagtatatcgaaaccatgtgtcttaaataggttagatctggcgtccatgacctcttacaacattgaccaaatgtgctagctatctagtgtctaatatttcagttcttttttattctggaatatagaaagtctcactatcaatcatcaatcaacatgttgaccttaacaaaatttagtgtgtgattcaagcattttttaatacctgaggcttacatcaaagagaggaatgaatggtcatgctgcctaggttaaattaggacaatgtaagataggatcaaacaagctgggaatcgattccaatcacctagctgtatacatgtatctaatttccaaaccttcaagaagttacaggacgtaatataggataggagaatagatgaataaacaaactgtaccttagtttggctgcaactgcaaaccaatagagcacaaccatgttgacagaaaaaaaaaatggagagcaataagtcagttcattatttagaaacaaaacgtagctatggatcttgtccaagttaatcaagttgccctttaaataggattatctcatacaaacagttgatcatggacatgagtaaagtagacgagcaaatatgaccaaagaa

SEQ ID NO: 41605 - DNA, 610 bp, Oryza sativa
agcatatcaaacaactattgataaatgcaagttatatctagatatttgaatgtgcaattctcagtttttcaagtatgcaacgacataatgcattcagcaataacaaagcaaattgctcgagacttacaagttgtagatgcacagaaaattcaataatatactttctgcaaatggagtagcataagagatatcgaacttgggtttaacttagagatgtaatggaatagcatccaaatctggtttaggatgtatccagtaaattgaggaggaatgcaaaaggcaactgtagccacaacaattgtatcttaaatatgtcaaactagactcagtgtgacccatcaagctagactcggtgtgatccatcaaactagacctactagaaacatttaacttctgaacattacattgctcagattatgtcatctctacaaggcgctggcccaatgtcatctctacattatttcattttttccacagtcaggaaagaccaattgaaatagcagcccatatgaaaattgaattgagaataacttgaaacagcagcctgtagcagtagtttggacaaccacgtaacaattattatagctatgcaggtcaatgctttcatcaa

SEQ ID NO: 41606 - DNA, 595 bp, Oryza sativa
tacttgtccgaggtataactggacgaattcgagggcgaattcgattgaaggagggaggaatgttatatcccgtgttctagagtatgattgggcgaattcgagggcgaattcgatcgaaggggggaagaatgtaataccccgagttttaaattaatatatctcgcggaatattagagcaaacgcgcaaaagttcaacttttaaaccattgttcgtataggcgatcgggaaccgtggatgcgtagagctcgccgagtagtgcaaaatagactataaatttatagtaatcggagtccgaacgaagtcccgaggattgaataatgtgagccgttagatcttatttagtctctttatataaccaaccaaaaaaaacaaacgaaaaaaaagaaacaggagcgattctcctgtaaccctagccgccgcacctcctgcactctgccgccgccgctgctgttcctctcttcaccggtgccgccgctggtgcagccgtcgccggtcgccacagccgtcgtcgtacgcaaccggtcgtttgtgagctactgttgtttctgctaatttccctgctgctgccgaaccctgctgttgccgatctgatct

SEQ ID NO: 41607 - DNA, 646 bp, Oryza sativa
actgatgccatgcgactgctgctgctagggttgttgctgctgctgctgttgttgcttgttgcggtggccctgctgctgttgctgctgcatgatcagaggagaagggtagagagaggttgtacaggagggagaaggaaaggaaaagacagagcagcgttgaggaatttcagcaatttcgcaaattagggaaatttgtcgcaaggtagtgttccttccctgcaaaggcaacttctctttagtccctagaagtataagattcaaatagaaattgattggatagctgctcgtgcaattttttaggtgctttattataggatgaaaccacgttttcaaatctggtatgaaaccatcaggattcaggttagttgtcctaaataaagtttgtagtcatcgttgatatctttctaacgccgctggtttcgctcgattccgataaacggtttaggagaaacaacaaaaacagtactgttgaccaggtccgaaaatcaggacaccaattcgttttttcttaatatgggatttacagagccataatctgattttcctcccaacataaaagttgtagagaattttatctagatgtcaaagttatattattttctagattccgttagacggtttgcgagttacacatagaacagtaagg

SEQ ID NO: 41608 - DNA, 1961 bp, Oryza sativa
atatcgatgtatacttaaatcaagtgattgggatagattggtcatcatgccgagacagtataaatcacttagatcgaaatatatgtcaataataagactatatatgtttatagcatagacgatcagatagatctagcatgtatcggctaatactccgatactactctatatcaagatattaaagcaagtgtaatatattgagcaaaagcctaacatacttagatacaacaatatcttaacataaagggcagatttaacatgtcaataaggcatatagaacaaatgaagttaaatcagatacgaacggctgaaactccgatgctattctaatcggcaactagaaggcaggctagagatcgatattctaagcacgacttaatagatcaaactcaactgatgcagcattaagtatgaaaagaagaacaatttctagacaatcaagccgctagaagtttcatagaatggtagatatctcatataatctagatcaatatcaaaatctaacctaatcggctgccctctgcatacagatgttagccgatagtagattaggtggcgatattgctagagattatgtaaggtatatgataactcgatgaattatataaataagatgagagtatcataaagatggaagcactaatcctaagaacacaatccgtcataacgaattttacctcttgttgatgatcgaaatcgatgcagctcaacccgaaagcaagaactcgtcgaaactaaagcaaaaagggtggcgatgcgccgagattgtattgaacgtgtgtgttaaaaattacatagggctcggggtctatttatacccgaggattacaagatatgcctataccggacatgaccactatctctaacaaactctaagataccacaagtctttgcggcagacttttgcccacacttatctataagaaatttacataaaatatcctaattaatagatacaattgccttcccaggactccatccatacgtgacaatcatcttgaagtacattaactgaaccggatgtcgcgtacaagtcatattgtcggaatcggctatatcggcttatttagctcgactcagactcagccgatcccaaccgtagccgatccgggcatcagcagattcatgctttgtttccgaactcgatcttctcttccgactaagcttcgatgtaatcttctctccgaggctgatgttaccaaatttggttgttaacacagaccaacaaggctcaaactgaatttattaaaaaaatgcagtttgttgagaatgatgaccgaaattaacttaaagaaatagggactgtctagtattgtcaactaaaaaaatcatttaattttttgaactgattgtacaagattcatgcggaaacacgcaacaaccttaacctcaccctttttttcccttttccttttcccgtgttcacttaggctccgttcataagtcctagttcctaacttcctccgcctcattttccgcgcgtacgtttcccaaactgctaatggtaccttttttttaaaaaaaaatttatacgaaagttgtataaaaaatcatattaattatttttgaaaaaaaaaactaatacgtaattaatcacattctaatgcattgctccgttttcccattccagcgaacacagccggagctagtcctgcgcatccgcatcttggaagaagaaacgagcaaaatacaacacgcaaaagagtgtttccctatgctgacggctcacgtcttctttttcttttttcgaacgactcacattggatggtgcgaagttctattgataaaacaggaaaaaattaaaagattacaatctgtaaggtcgtaaccaggaaaaacaaggcttaaagtcttcaagataagtttttaaaacgagtccaagccgccgggcagactgcgaatttgcaaacccgtcgaatgccagccagtgcacccacaacttgttacttggcttgaatcaa

SEQ ID NO: 41609 - DNA, 724 bp, Oryza sativa
cccgacgccgccgcggcgcgccgtcgtggttgcgggagaggctgtcgacgatgaggaagagctgggcagcgacggtggggaggtgggcgtgggcggttgccggcggaggaagagatgggcggcggcgacagtgggcgaggagctgggccgtagaggcgatgtgtccggcctgtactttgatcgtctcaggggcagtactatcacaatttcaagttcacctgtctcttttgttcttgagagaagttcagttgtttccaacgaaagtcaacgctttgctcctctctcaaggcctcgatacaggattttttgtttgaaaaggaggattttcggtattgattccaagtcaatggtactagttttgctcaagtaaacaaaagcacaaaacacacatacatgtcgagttctaacatgttgctagtggatgaaaaacgcctcagcttttacagttagtgtcatgaagatctgctagatttttttcttatgtcctgatgcacttgtttcctgtcaaatttctatgaaaatcacgcagaattcatacgattttagacagccccaacattacacacacaaacacaaatgcatataccatgctcaatgtcctgcttgaatctcttgtattcctacaaaacaatacacatccaatttctctttacaatttacaaatcactttactgatcattctgaaagatgatcagttgagaaatttgaggtagtccttgaggtc

SEQ ID NO: 41610 - DNA, 1358 bp, Oryza sativa
aagactatacactgtaacttggttcatgttacatgttctgtactcggcagtacattgatcagactaatgtctccacgtccagtattgcctggacactttggaattcttcaacaaaagaaacagttgtaatttgtaaactcctacagaagaaacagtcatacaacacctcggagtaagtaactaatagcatgcaggaatccgtggcataagagctggtggcctgaagtgggttagttcatagtgagcttcccggttcattcttggcgttgcctggcgcgttgatggccatcgaatttgcatccgcagtctatcgttgataagcaatgtgaagatgaaaagatttgttagagcagattaaaccatggtgttggataattctatatccatataggcattatgcaatgcagagtttgtgctatggatttgcagatggatagagaagacgacgacttacaggaacttgcttggaggaaccaagatcgtctgccatcggttctggtactttatgttcagttgttaatctcttaccatgctgcagaatgtgtaaatcagaaagtgttagttcaacaaaagatcacacaaagatgcaagtccgtgctgcaagaatttcaaagggctcgtttcgcataaatgcaaggtagattctaaataatctggatgagattatgcacaacccaaaaaaaaatcctgtgagataaaaaaaggtacaaccaatgcggccttaaatttcatttagatgaaaatgtcaatacatgatgagcacatgttttcatcagcacaccagtcttcctccacaactcaacagcacaagagaatttcactatgtttctagcaccgatatggataagattataattcacatatagcagcaagccagcaagaacagaattctataaagaaaacctcattgttactccctacgttccatactttcatattataagtcatttaacctttttcctaatcaaacttaactaagtttgaccaaatttatagaaaaaaatagcaaaatctaaaataccatactagttttattaaatcttacactgaatacattttgataacatgtttgttttatgctgaaaatactaatatatttttttataaatttggacaaactaaaaaaaattgactaggaaaaaagtcaaacgacttataatatgaaacggagcaagtatataaataaacccaaaaggggaatgccaccttctttaaacgggacaattgcttatttgaccccgttttgagccctaactaccaatttgaccctactttttaaagtttgcttatttgacctccttttcaaaaacgaagctcccgtatgaccctgttctgttaagggcatcgaacggtgttaa

SEQ ID NO: 41611 - DNA, 723 bp, Oryza sativa
tctgcgaaagtgtataactaggaattttagataatgtttggatctatcttctgaccaaagggcgcgattttatctcaagtggtttaggagatataattttttttagtatgactgttgtttttgtgtcataatctggatagtagtagattgaactgtttttggaggggttaaacagtggaatcagccaggccgcctatagacaaagttgtagaagttttttcttagctttccatattggtaaagtacaccctgattgggcgagtagaactccagttatggttgttttagtgtggacagtctgaaattctggacagattcggaagcctgctttcaagtgcaaattagaccatttaaatggcagaataaaaatatgctttctacatcaaagttgtaggtattgttctgtagattttcaaaatgtatacattttcagtcatagccttttcatatttcaagatataaaggtttgaagcagcagtcttgtgtatagtccaagcggcgttccttgttattgagttttgataggatggcgcagtaggttcacctttttcattgttttatacacatgtttgaatgtgtttgctgaggttttgtttgtgattaggtggtggtccaccagatcgtgcatgatactaatccttcgttggaggcaagtgcatgacgaactaattgtgtgattcatggattgtctactctatctatttattgctgatatatttctat

SEQ ID NO: 41612 - DNA, 712 bp, Oryza sativa
tgtggtcaccgaggcagttcgggatgtcttccaaccctcatctagggttgatgttgacccagccatagccgcctccgtcatcgacacggcgtccaccactgctgcgtgcgccaccaggaaagcccttgcctctttcatcgagaagctggtactggcacctctttcatcgccggcaacacccacacggcgacaactcttcttcctcagccgcgaccaccaccatgacggctgcgacgatgtctgccgggctcttcaccactgcccccttaggcacgacactaccgccgatctctctcccactaccgccagagctcacggccatccttgccaccggtggcctctatggcacctccgacgcctctgcatccgctctgcctgctcaggacgtctccgccttcttcatcacgcctggcgctgcatcggcaacactccctctagtgggtcttcctcctcaagcagctggtgcaccaccaccacctcctcccggctacggtggcttcatccctctgatgaccggtgctgctcctgcccctactgcccagaacttctacaacgtcgacctcaacaatgacgccaccgccaatctccacgctcaggcggtctcgatgctgaacatcaagtctctcatgcccgtcaccctcgatctcaacttcggcaactacacacaatggtgtggtctcatcctcgtcaccctcgacaagtacgctgatga

SEQ ID NO: 41613 - DNA, 1060 bp, Oryza sativa
caggagaccctgtaattgaattaagtagagaacagaagctcacaagaccttcagcatgcagagttaattttatcagacagtgacattagtaactcaattattagcttttagttttttttccactggtccaaagccaaaatcgactacgtagcagttttagctgatcaatgacgctactatgtaatttcttttattgaacatgcaaaaatattacacgtgattaaaagaatagttatacaacataaatgaataaaaggctattaatggagcataggaaaaaaaagaaaaaactgaaaaaaaaagaccaacgaaagttaaggaactactccactacttaaaagagagaaaaaaaactcctatatcgagggagggtggaggaggcggaaccccactaaactcccagcaaacccctaaaagcagcagcgccaggccgccagcaaatgactagagatggtcttcttgaagaatagactctagcaccactgaaaccgacgagagacgctagaatgtaatactcattttatttttaaatatacggtattattcatttttgaacgtttatttgattatttattttattaaaaaattaaggactatgggaatgtagtaaaaaggaacaaatcacggtttggtcacaaaccaccagcgcgctgcgcgccaaggtgactttgtactgcaacttgccgaagttcgaaacagcagcggcaggagataacacaaaatatcttatatttttgttgctgtcaaatgttgaaaacaagttgtagaaatgtacttgttaaatgttgaaaaaactacttaactccgaaagttgaaatacccatatctagtcgagttaactagattcataccaatataaatttatccgttttgaaaacaaagtattacaactcgtgaaattcaaaccgtaccattacaatttaataaatattaaagatatgactgcaattcattttagaaatttttaacaaaattatcattgtattcttccttcatttacttttcacttcccctctctctctaagttatcttctctcttccccttgatccaatgccctcg

SEQ ID NO: 41614 - DNA, 719 bp, Oryza sativa
atactcttcttgtatccccttatatctcttcttcgcttcgctcgttcacgcactcacgcgcacagtctttcagcacctcttcctcctcgcccgactggtgcccctaaccttgccacctgaccagaagacgtcaatggtgcttgtaatccctatacctgaccggcctcctcccccttccacccctacctctcttccatcctaagccagtgtgggtaccattcccctatgccatcgggtatgattcaccaccactgaccgccatggcctccctcatccatactgctagccctacccaccgctagtgcttccattcccgtagctccgccgccacgcctttgcccatcgtcaacacccaccaccaatctcgccgccagcccatccttctaagcccagaaaacccactttttcccatccctagcccactctttaggctgttgcagtaaaaatattactattatggatgtgtgtggagagcgtgtcttgagagtaacaaaattactatgagggttatgagtgagtggtgggagaaggtcgtgaggcatgtcacgtagctatgtagcatgtagtgtgccatgtatgaagttctccctctttcttagatataaatctgtagttatcgttagcattctttgcaatgtggagaatgctaagccgtgaaaacatggcaataggcttgtgtatacacatgctgccgagtgcagatatgctacctttggctg

SEQ ID NO: 41615 - DNA, 614 bp, Oryza sativa
ctaatgttggcattggtaatggtgatgatgctgctgctggtactgatgatccgggtgaccttgatgaggagattgatgatagcatgcaaagaaaccatggtggctagaattaaccagtagcatcatgagtgaatggttttgcgggagatttgagttaaatatcagataataaaataataatacaaagaataaaaagaaaaacaaacctgtatagttagcaggttttgattcatttcgttgaactttgtgtgcttgttagctagcctatataccaaacatgccttggcgaggctttctatttgtatatagctttttttcttttttctattgtaaggttcgaactctattgagttgattgaataaacattatgcaatttatgtaacatattgtctataaagttctattggcatgcatattcatatatagttacagtcctttagttttaaattgaaatttcattttaaaagttcattatttgtcattgacaataatgacaaaatgctctagtatgttgtttccatttacaaatggaaagtccgtttggtttggctgttactgtaacaccccaggtaaccacgtacatagaatgccacaccaaaatacactcaaaaac

SEQ ID NO: 41616 - DNA, 1109 bp, Oryza sativa
agacatccatgtatgttttctgatagtattcatatgattggcggttaagacttaagacatgctattagatacatgattaatcgtgtttttcatgttttgtattaatatttttagtcattattcaaacgatgacaatctacgcgagcattccattcaagaggtatcccatatcagtatatccttaccctaccagtcacttaaagagatctatgtgctcaaaatctattgtccttcaaataggtggatatggagacagaagacactgatggggccagtaacacagcaactagtactgaagctgaaaacacacagaaggctgtgtgtgaatcactagataatggacatgatcaaggtacagattcctattattcttcagtgattagtgttggcattcctttgccacaatttattgtaacatttaaaccttcaaaactatgaggaaatactgtaagttactttacacataaatgtagaaagcctttttcttgttctgttgtgttagttagtacttataatacaaccaaatacttatttggcaatactgatgaaatgtggagagatcaaatcccctgcaaaacaagcactgtgggtttgaaatagatggttaaataagtgcaacagacaccctgccattgtgaatatcaataatagtaaacttgtactattcactgtaccatgaatgtggacccactgttctgatattgtagtgcatgcatcagcagtagcagactgttagtttgatttggaagttatccttaagcattaaaattataagaaacactataacggattcttagtgaaagtattaaggacatgttaagtcagacctgtaaaattctgtttagacatctcaggagcagggaagaagtgggactcgtcagaagaagacgacctggatggctacaaagagctaggacagagtaaatggtcaaaagattttgatgaggataccgagaagtctgaccatgcagaaggaagtacgcatgctctttctggattggctcaaacctacagcacgcatcgaaaaacagttacctggggagatcgggtatgcctttttgcttaaagggaaaaaatgcattgttttcttgcattttgttaatatcaaa

SEQ ID NO: 41617 - DNA, 691 bp, Oryza sativa
ttagtattaaattttgatagtgttagatatgtttggttttaagccttaccaaactagaggatgccccgcgtgttgctgcgggatttggttaacattaatttattagataggaggtataatctcaaggagaaacagaaaaacaaatagtttcttggagaaattctttttagtagccctatccaaaattttgtagataatttaggtagcacatgtcaactgaaggggtgttcagccataaagctcttttatacggattgatgggctggatacatatagatgtgtgtggagatgggccattgtgtttatatgggctacatttggcactaaggaggcgaagagactcacccggtgactaatggattgggctctatgctgcattctatccaacgtttgaaaagcgatctaatgcattcatccaacggttcacaatttgatgatgacgtggaagcacgaggtttgagcttttggccttaactttattgaaagaagggatttcatcataattgctaagagttgaaacttctagaattaccaatattaagtaggacagcattgataatatatgcttggttcgtagatctaccattttttttttgacaccgttgatctaccaaaatttggtaggtttgaaagctacaaaaaagaaaaaaataaacaagccctgaataaccaccttacatgcttagatttt

SEQ ID NO: 41618 - DNA, 1531 bp, Oryza sativa
aactttagagcaattctacggtccttgaggagataccatgaggtaccaaaaatttagtgtaaaatttagtaccacatggtacctcgtagtacctaggtatcaagaggtaccaaatttataatagaaaaaatggtactttatggtacctcctcaaggacagtaaaattgctcataaccttattattggtgcaattcataaaaaaggaccaataatccctccaagtcatatgtgccagtttttataataaagtggcacctatgaacattacatagttgctagtttttataataaaccggtacttgtgagtgcgcccaacaggtgctgatttttattgtgaaccgacacatattggagatcacatgtgtactgattttcaataaaaccggcacctatgattctagatgttggttgtcaattaaaatcgacactcatgatgacatcactcatatatgtgttgtttacctaactttttatgaatttgtagaacttgacaagatctacaatctgtagtttatcaccttttttatttgagtacatttggatgtgcgaaaatgtgttattgtcatatctatttgtatatttaatatttctaaatgatctcggatggagacaaaatgtatatgaaagtcgtatacatatctaaactatgtctacaggttcgtagttgacaaaattttcatttaagctcattcaaagcgttaaatatagaatataaattgcgagtgagtagaatcaaaataatagtatttgcttataaaataacgagtgtttaataaaaaaaatgtttttttctttttttttaaaataatacaacgagtgtttttaaataatttagaactagtagtagcacagcagacgaaaaggctatggggcgatcgatcgcccctagcgatcggattagccgatacccctctcctccacgtggtttccttttttggcaccgtattattttcctattttaataaatttatacacctaaagtttgtacaccttttacacatttaaagtttagagacacaaagtttataagttaaaagtttatatattcgattcaaatttaaatttgaattcaaatattatttatatatagtatttctatacacctaaagtttatagaccaaaagtttataagtcaaacgtttacatacccgtttcaaatttgaatttaaattcaaatattttttttatatatagtatttctatacataattttttccaactttgtttttttattttttaaaaatttatggtgtagtaagaagagaagaatgggaggaggaaggggggagagagcgtaatagaggggatagggatgatcgatcgcccattaggcacacgcccacacccacagcagaggtcctagaggatataagtgaagactaatcagcgccacttgtacatgtgaatcacctgctagctgttgtcaaatcctgtgtgcatgcacgtccataatgcgtacatacctaccgaccggcggccggccaagttcaccgcatcgatcgagagctctactttacctagctttaatta

SEQ ID NO: 41619 - DNA, 812 bp, Oryza sativa
tggtatattctatatttgtaaagtgacttttattcaaaatttattatcacttattattattattagtattattattattattagtgctactattattattattattattattattatctcaattatataccggaaaaaaagagaaagaatagtaacgtaccttggaaaaaaaaggttatgtacgtgcatgcaccccctttaggaatggaacagaggagttattttgagataaatctaatctaacggtttataatattggacccaccgatttaagtgaaaatcgagagatagatatttttcttttttctcagattttttagaattttctctaatttattagagcgccacgtggcggtttgagagcgttttgaggaagcttcatggacttttagtatataatagataatagatagatagatttgaaaaatctcaatcaggttgagcaatcttcatcttggcatgcagaaaaaggggacacaatatatgttggaataatgggctaggcccaatttattctcaattaattctattggtccacaattaatactatggggattaatatcagcttgaaaatttaagtgggaagatctcaacttaaataaggagctattagagagcccctgttaaccggttgaggtggtggtgggacagccacgcgcgcgcgcgccgggctgggccgaggccttggcaaggtaggcaggcggctggtctctctctctcgttttcattttgtaacagacggagattgattcagtaatcaattcggttttaacgagagcgaattcattcgatggtaatcatgtgattaatta

SEQ ID NO: 41620 - DNA, 891 bp, Oryza sativa
gaagttgcagcactgggcattttgatgttgaaaggatatgatctcccagactgcagtatacttcataacccacatagatgtgtttctgttgtggaatctgtatactgtacatgggagtattgtccatcattcacattttcgataattgcagcatgagtaattgtttttttcatgtatttcactatttatcatttgatgtagtaattttgctaaatttcttctttattggacagacgtacatatcaagcatgttgaacgcatttaagaagacccttgatgaagggaattttacatttgtgattggtatgacatattttaaatattgttgctttaggatgaattaatgatttaatgatttaattcatggtggtggtcattactttggtggttatgattatgttctgcctcattatttatcataaatttcattgagtacggaaaaagccctatgcaaactttatcatatattcattgacatcatattatttcaatctattggcttttcttcatgattggatctttgtcttattaagttcaatgtttggtggccattttctgggattaggacataggcaatgggttcctagacattgggaggatgacaggacatccatttgtactagtggtttatgttttgtactgtttgaaacattcaattaagcaacaggcctacaatggcattgtaccgggtgatgccttcattcttagcaatggctgatgctggatttgtggtaactgacttgtttattgctggtatccctgcccgtttttagtggatgaccgcaatctgcgggtagctgattttgctcaattttgggcaagtgcgaaggtaaactctcagtctatgttgcgtcaactgtgagaatttacattgcttgttggagctttttg

SEQ ID NO: 41621 - DNA, 704 bp, Oryza sativa
atcacatcaaatgtttagacacacatatatagagtattgaatggtacactttatactcaaactgaaaatcaacagtactgaaatttcagacaggtatatatggctcttcctaccatgtgccttgtatttatagacatcaggctgcagtcataataagtaaagactacatgataagaacactactacaaatatagtactactctggaaaacctctatattaaataacaagaattgagcatttctgatagtgctacattctatgggggcgctttttaactagcagcctctgggtattgggacagcttacagatacaacagtgccacaaatctgcattccccgttaccttctgtttgtgaccaaaggggtacacatggacaaggcacaaggccggaacaagggctctccgtgaactgtgtgaatggggaaattgggaaaaaggagccaggcagcagcagtacattccgagccgcagaattgcaacgaagcaaaactgattccgaagcaaaactgatggccaaaccatgcctagagtatcctgaccatcgagagaggccattggaggcttcttgtcgaggatcactcgccatctccgttgccaaaaactccgacgcgctgcctcctcttatcgaaaactgccctgaaggattcaccttcgtcacgaagttgttcgctgaatcgcttctttgtatcggtgttgattacc

SEQ ID NO: 41622 - DNA, 547 bp, Oryza sativa
gccgagttcaagtacagacttgacatggattctcgtatttacgataaattattcttacgtcaatggcgaggtgccctctccgattcatgtattttaaaggaacccttagagcaagtactataaggccatctccaaccctccatatcatcaacccatgtgaccccgaaaacttgttatccgacttccccaccatatgacccatagaaatcgttccgggttccaaacctaggctcttataccacttgttagagtgcgtagcctagcccaccaaccataggccacccaggtcacattgggcctgctccacgacaggcccaaccgtagccacgcaactttaggtcatgggcccccacaacccaaaattggttatatagcatcgaaagttcacgtttttttttattttgtagcacagaaagatactagttcactttaatagtacccaaagttcaccccgttcccttttttaacactcctgtcaattctggatcgttttccgttcgccttgatctatgtcaattcttgatcgttttccgtccaccttgatcgc

SEQ ID NO: 41623 - DNA, 4984 bp, Oryza sativa
agtatatatatataaagccatttattaatattgatcgactatttacaagtcctatagaattcatataaaattttggtgggatgaggctcaaccgtcgtagtataacgaaggctcaacatcatcatgaaaattcctaaattctaataaaaattccgataaacggaatttacctcttacaatctctttttttcctgcactacatccaaccgatcaatgctgcattttttaaggaactgtctaggtgtttttgacaattaaaaaaaccctcaaatcttacaaattctggaccattggatcattttgagatttgtgcaacatacctaagccctacatttcctcctccacatcacagtctgcccactgccacctccactttcacgcgtgtgaacgagcgcgagcgctcctctgcctcttgtgaagtcgctgtgccaccaccctgcctcgctggctagtcgaaaggggtcaacggtgcagacgaggctccctcggccagcctcctctccctcccccttctcttccacaaggtggcgacgtcgagtgtccccaccccgttgtcttccccgtctccggcggctccccaccgccagatccgccaccaccagcctccacctcctaaccagtttcgttgttttcccccgccaccaacgcatgtcctccgcccactgccaaccccgtggctccagcgccgcgtcgacacctcttcgcccgcccgtgtccaccacccacagccatcactctaagccatggggaaccctccccctctcctccaaccccaaaccctaatccatatgctccctgctggagttggggggtgtcgtcgcgccggagaagagggggagcctgccgaagttggaggggaagaagccgatgcacgaatcttggcacggatccaacggtccaaaatatgtaagatttcatcactaaatttctatcgaatggtatatagaaattccaatttttcaaacctattaaagtgcattctttgcatgatctcgtatttccgtatcatttgtaagttccaaacacaccatcaatacattcacaagtatatatgcattttacaatctgaatcagcaagtgccaaagggcttgtttaggggagctttagattctgagaagcaactgtttggtagccagcttctgagaatctggaaaaactctgaaacccagcttctccagcttctggcttcttagttcatttttcagaatctgtaactacagattctcagaagccgtggaatgtttggggcagcttctagcagaagcagcttttgggaaaaactgcagctgggacaagtttccccaaacagggccaaagtgagatgccccatttattttcactacctgttatattcttccattctattctagactttcacacgtcacactaaaaatcgttttcccatatggccaaagatcattttcccaggggggagaagacccgcctgtacgcataagcctgcgaaaaatagttgattttcgcaggcgacacctctatctttgcagacatcgtatccacccgcctgcgaaaatactttggacgaataaaaaaaatatatcgccaccccacccctcgcccaacccacctccgggtgcgccgttgccatcacccctcccccctccgtccagatctagaagggagggaggggatccgccatcgggaaccgtcaccgcctggagccgcgccaccaccgtcgggagggagggagggaggggagggaagtcgcgcccgggaaggaagccgccaccgcctggagccgtcgccgcctccaccagatctgggagtaagccgccgcctcctccaccctctgcgccgtcaccgcccttccctctaccccttcctgccagttcttggaggagggaggagaatcgccgccgccaccaccctcccccctcccggcggagccgccgccacctccaccctccgtgccaacgctgcctccaccgtatttgggagggagctgccgcctcctctaccctccgcgccaccaccaccgccctcccctctccctcctcatgccagatatgggagggagggaggggaaccgccgccaccaccgccctccccctcctagcgggagccgccgtcgcctccttcaccctccgcgctgccaccgccctgcggtcggatcccgcgccgggagaggagaggtgaggtgtgaggggaggggagggagaggtggaagggcgaagtgctcggacttagtattttgatggataggtggtgtttttaacatgtttaacctttttgcaggtggaccttttaaggtaccacctacgaaaatctattttcgtggatggaccacttaagaggtccgtctgtaaaaatagattttcgcaggcggataacgatctcgctccacggttgtcatttttacaggcggctatttagctccgagagccgagagctcgttgtgatcgtcgatcgtttccgtacttccagatgttggctcctcagatttcttctttaattgttccatgctttacaaagaatggcattttttcatgctctccccaacacgtacgtaaatttgataatacctcaacccaagaggctagagctgatttgaggatgatccatttaaggccgatatgctcgccgtcttacttttcgtcctttgtttaattagtgcagtggaaagtatcgttcattttatattaagaattttagaaacatttcaacaacggaggtcttttgcaggtctaatgatttcaaagacttaatctaaatgaaatactaaattgaaccaactggcattcttgaatcctaagaagtgcctccaggcccgtttgacactcacgtcggattaagtctaaatactaaattaaggcaatttaaatatttatatttgtgaagtgagcgtagcttaactggttagattccttgtgatggaaccaatccagccgagttcaagtacagacttgacatggattctcgtatttacgataaattattcttacgtcaatggcgaggtgccctctccgattcatgtattttaaaggaacccttagagcaagtactataaggccatctccaaccctccatgtcatctagtgcctatattatttaatacattatcacataagtaaaaatctgatgtggcaagggagttaatgaggtgagaggtaaaaagataatgaaaccatttctcatgcaagaaaccatttatacacaagaaccaagaatgaaaacaaggagatagatggataaaagaaaagaaaatagaagtgattgaatgagaatttaatttgaagacaccatcaattattagatatatagtttatgtacatagtgtctatatgacatggcaagtatggaactaattggtagtttctgggttagtgatggcctaagtacttaagcgcttgcctctagatgccatatagactcatttactaatgtggaagataaaagagaggagtgagtgaatgagccacccctcatacaagtggtaatctctacacaaacttcaataaaatgtgattatatttattagagttataggagtttgggtgttagagacaaaatattttatacgtttcctcttgatttatagagagatgatatagataaaattagaggtgacaaccacctctactgtaaaactactcatggagttgaaagaaagttgtcccacacattgacgagtgccagctcatctagacttgtttaaaattgttgaagataaagaataaattagtgcacataaaacgagaaaaccattagcacatatgattaattaagttttaattattataaacttgataaatggatgtatttgatattttaaatcaacttctatgtagaaagttttcgcacgaaacacaccgtttaatagtttgaaaagcgtgctaacagagaaacggaggtaaaatcttaatcttaatgtcaaaaagaatactagtgcacgctacatgacaataatcagatcaagctacatggattgcatagcattttgtcaccaacaaatgaacaagaaaagcatatatagcctgaaaagggaatggtaccaccacacctataacattcccttcccctcttcccttcccacacacagcgtatatccatccatcctaatcaaaagtgtcattttctcccacagctatctgtccccaaacacatctaattaaaagagtactattaatatatataaatgttgtaatggattcatattaattaattgattaattaaacattaattcagatctagatcgtcctcttaattggagtgctaaattaaatggcatatggttaatttcttaatccaccaagtggattgccgcacattctacacggcaccttggatactgagtactcctcccgggagtattttgatgcaataaataactaaataaatgcaactatccagtcttgcacaactatcaagggattaaattttgtcttggaacagaacagagatgcacctaagccaaagagagggcaggcaaagtcatactcctactaactcgtagggctgtcaacgagccgagctcaagtgagcttgcctgtctagatacaagcctgatacaagctctgagccgagtctataaaatgtttgagttttcagacatattcggttcgagcttgactactgagcttttaatttttaagtagaacaatgtatatttcaaagataatttttaaaaaatagtacatcatattaatagaagaaaaaaaaataaaataaactatatgacgccaatacaagtcatacaaataatatactcctaatttattaaataacaacaaaaatcatatattagtagctcgttggaagcttgaggttggctcaacaaagctccacgagctttgggagaggctcgggttcagctcgtttgaagctcaagtctagaacaagtcgagctcaagcagcttgcgagcctcagagctttttttttttttttttgtgatagccctacttgcaagagcctgaatcaatatagtgcaattatatcctggatgaattgacacatttcgatttat

SEQ ID NO: 41624 - DNA, 560 bp, Oryza sativa
agaacgccagcagcaaggcccaggagcaagataaattggtggccgagcaagctacaaagactgcagccactacattggatgaggaacgaatcaaacaaatgatcaacgaagcaaaacaagatgtcttaagggagctgcggggacgcgaaactgataagaatcaagcaacaggtgaacctgatgttccacctgataagaatcaagcaacaggtcaacatgcagttgttctggatcaaaacgaagaggcttattttgaagaagtagagcagaagattgaagaaatcaagcaggaacttaaagagcagctgaagatcaaatggatcgtggacaagattaaacatcacttacaggatcagtgccccctcattatcctaaaatttgatcagatgatggatggatcccgatgggaggagatcagaaaggctctgagcctgttagaattgagtgcagatgcattgatcttcaccacagggagcacagaacaggctaaaggatattgctatccaccacgagaacctatagatcactgttctcttgttggtctctactattatacggtg

SEQ ID NO: 41625 - DNA, 669 bp, Oryza sativa
tcgtcaggcagagtcgcgaggagacatggtggtcctggagcctggaggagcgtcctcctctctcctccacagcaatgttctgcaactagcgcggtatgaacctctgaaggtagcgacgacctcctcatccctgaccgtcggatccatgctcccccacgtcaagcctaaaatgtactaccaccaccggcgagggagcagcctccaccaccggtatccatggaaccattgcagcaggcaatgaggccacgtggcccgcgggggcaccgtcgatgtcatggaggatgggtcagggaagcacgaggtagggggctggccggcatggcaccaaggctgatgctcttcttcctcctgctcatggaagttccatggcacgctcctagggagcgacatccagtgatggcaggggctgtgcagttctattgtcgactgcaccgttcgctagtcgcttcgtaaaaaaaagccatatccggccgtagagcccggcctactcacagacaacgccagcgctcgccgccacgcccctcagcaccgggatccatatgcatggcaccctcagcatgcccgaccatgcatgtacgcgcaactgctgcacagatccaagatgaaggatgaggcacatctattctcccgagtcctgatgccggtgctcgtttctgggattgtcctcct

SEQ ID NO: 41626 - DNA, 853 bp, Oryza sativa
tgcaacgccagacttggttagggacggaggtggccgcgccggctgtggttgggccccgaggcggtggtggacgcggcggcaccggatgtggccggtggtggacacggcggtgctggatgtggacacggacgaaggcggcagcgacgggctgtgcgggagtcgagagcgaaggaagagccgaagaggggagcgagacgtgtgggagagggatagtgcgtggggcccgcagttggctagcgggtgtggctggctagatttggccagttccgtgggatgtttagccagccagatggcttggccaatcagttagttagagagtctgttgcagagctttttttttttctcctatattagctataatttggctcagagagctatttggccattctgtgttggatatgctctaagagaaaaataaatatctttctatggtatgtgacgtacctatcgacaacaatacatctatgtgttgtcttcaatttcaaaatatgtcggtctaatatctcagatatgcttacagaggtatggtgtgtttatttttatatggtaaatatatacgtgtgtatatgagagtccgtgtttgcagttgtactgtgttttggggaaaaatatacgtaaattattagaattttttagagtataccttacactttctctatttttattattagaattttttagagtataccttactgtttctctatttttttagtgtgtttacactagtactgaatcttccatccgtgacggcctccaatatgcatgaaattagtgggccgtcacaaggaagtcatctcaatcgagccgaaaaagcacccgattgagatatagtcgcacaaacatgttagatggg

SEQ ID NO: 41627 - DNA, 616 bp, Oryza sativa
ctgcaccccgttttgaagttcagcaaataaatcttatatgattatagggaatacaatatggaataaatatataaaagtattgcaatcgtcataaatattgaacaacgcgttcctgtccaagcaatacttctaggtgcaccagaggcagttgcgggccttgcggcgtacttggcgcaggagactagggatccatcaccgccacgaccggatccaacacctccacgtcaggctaggccgtggtcgagcggatgtgggagcgagcgactggggaggttggggttgccgtgggtgatggtagcaagcggccggcgcgaccgatggcgatggtagaggccgacgtagctgagggttgcaggagaggctggtgtggcctagtcgccaagagaggcacgcacaaccgagggctacgagagaggccaaagcggccgagggtgtcgggagaggccgatgcggcgaatggcagtgggtgaggtcggcgcagctacgatagtagacaactgatgcacatttggtacaagtgttttgggggggcccgggatttttttttttgggggggtgtgaagatggaggtatggctcttgtggtggtaggtgcaccggtagcggacgcggatgac

SEQ ID NO: 41628 - DNA, 524 bp, Oryza sativa
aattcaaactgttcaaaaaaaagttatataaaaaataaccaaaataaaagttgtaaatcttgataagttatacaactttgttgttgataatttttccatttgaaatcatttagtatttgaaaatattatttgaagttgtcatattttcaaattcaaattcaaactgttcaaaaaagttatatagaaaaatgaccaaaataaaagttgtaaatattgataagttatacaactttgttgttgacgatttttccatttgaaatcatttactacccaaaaaattattttgactaataaattgaattgttatactgcagttaattattttgctattggtcaactcacaaatataaatatttcatatgaaaaatgaaaaaaaaaatactaagttatctcaatcgggcatcaatatagagcccatcacgaatgagtcatctgtgacgggcctagttgttaccgattgatatatggtcgcacagacatattagatgggcataaaactcaggcccgtcacgaatgacacctat

SEQ ID NO: 41629 - DNA, 541 bp, Oryza sativa
tattattgaaaggtaagattattgtttgttcagaaattttgtctcatagatttatggcaaactaaagtttcgataatgtattttataataatttaagggttctatttttcttaaggtttcttaaaaaccattcacaaacaaacttttgagtaggagatggattaagtacttacgaatcatgttttttttctcgagtaaattagaaactattgatagttaattatcatacagtccatgtatatacataccgtgtagtatggccacaaattaaaaatgcgagtgcaaaatactcaaaattcttttgattaaatcgtctcgtgaagacgcatgatatagtaataaagagagggaagcatatgcatgggaaaaaaagaagaaagagaaaaatgaaaaaaagggaggggaggcgtacttacccgcgcatgtaggtacgtgcctatgtcgagatgggacctcatagtatttagtttgttttaaaatcaatttaatctaacggtttataatattgacctaccgatttaagtgaaaatcaaataataga

SEQ ID NO: 41630 - DNA, 1115 bp, Oryza sativa
tctgcaacttttctagatatgctgtctatctgatcatttatctgccctcctccaaataactgttcctgagaagactgtatcttgtccacctgaccaagcacctccccttcttcacttgaggatttctttgattcacaaacattcagctgtatcatagttgaatcttcatactgtaacttaaaagccaattctttgtctcttaatatttgtgaacactttatcttgtcttccaccaccatcatgtcaggcatcaatagacccccccttaggaacctctgtgcttggttcaccactgtacttgagatcaacatttccaatctgtcccccctcaatgactatctgctttccctccctctgattactcttttctggaaaatctgattgcatctatgttttcccctgtagatcatccaaaacctgatcactaaaccaaccttgttcagtgtaacgccctgattttcgttcgggaataaaaatcaattaataatacattttctagaaattaaataaaagttaaatcaacttaatcaagtgaattatagaggaaattaaaatttcctttaaaaattattggccgggaatattttgtaatattctttgtgccctaatgtactctccggaattttccgtgaattttcggagcttgagaaatagttttaatagcacaaagatcattgcatcaattaaaataaaaagaaaacaaataaaatcctccttcctctctttgggcccttttcggcccaagtcttccttccctcccacggcctgcgcgccccttttctctccctctcgggccagcctcctccctcggcccgctcggctctctctctccctcaagtctgctttacctccctcgcccgttttcccttctctctctccccgacaggtgggacccgaggccccacctgtcatcttcttccccaacctcccgtcgccccaaccgccgccatggccaccccgtgctccccacgtcgccgccttcctcgcgtggttccctctcccgcgcatgcgtggacgcggtcgccgcccacgtccgcgccgtttcccccacgccctgcgaaaaccgttgccatcccgagctccacttcgccaccccacgtcgccagccgatcccg

SEQ ID NO: 41631 - DNA, 7067 bp, Oryza sativa
tcggtcgtcggtgagatccttctcatattgtcgcggtcggccgtcgttaccggtcaccccgcatcggtcctcccctcccgaactccctcttctccttctgaaggtcaagggcgaccccgtccgccctccgtcctcgcaagccgccatcgggcaatcgtcgtcgccgtcatcttcctccgcgccggccgccgcttccggtgaggacctctcctcccttcctttttttttcccgtccccctttcttgccgatctccgcctcttggggtgcgtcgccgtccccgtgcgcgccgctgtcctccggccgcccgccgccgttccacgtcgccggctgctgccgccggtggccgcatgccgccgccgccgcgccttggctcggccgggccggcttcgtgccgcgcctgtgcccctggctgccgctcccctcggccgcccgatcggctcaggtcgatctgggccgtccacgtggtggaggcgcacccgaggccacgtgtggaccatgtccaccgtgcgccctccccctttgactcgctgacgtgtggggcccgcatgtcggcgccggccgccccttgctgacgtcagcgaggtccttttcctttgtaaaaataaataataattgcgcaataattcgtgaataattctagaaattcatataaatggctcaaaacttctaaaattcatatctaattcattcgaactccgaattgagccattcaacttgcaaaattcatctaaaattgagctctacatgtttgtttactttttatatactgtttccttggtttttattagattttttcctcgttttgcgtgcctacgtgtagaatccgtcgtttcggaagatcacggtcgcaaggataggagttcggaagattgtttgaagaagcaaggcaagtcacacattccctttgagcatgttgatcccaatttacaaatgttttactgtttgcaaataaatatgcatgttttgctaatcacatggggtcagggttttacctatctgctcgcttgtgccatgtttacttgatatctgtcctttgtcaaccatgggtaataaatcgcctagcttgtgttactttgatgacttagctagaactatatgcttagccatgcttaattaccactagctcagttgatgggataattacagtattagacctttttagtatcagagtgagctgcgtgctcgagacatctggccatgcttcatggtcgtaattattcaactaaaatgcgactgaatggtgggctatgggtgcatggttttgctggtcgcacccatggcagttaaggaccggttcgcgagatgccctggaagaacttatcgtacttaccacaagccagcgtgggcaacggctgggcttgtagtgtagctttcctctagtcgacgcatccaggcaagggtgggcgtgatggagcggggcgggccctgcgacggcctctgtcgcttccggattcacctaggcacgagaggggactgcccgttgcccgctggggacgagggtgaaacctgaggtgtggtgtgcttggctagagggggttatgcgaagggtcctgtcacggcctctttccggtatgtcgtggtggcatgtcggcgtacggaaacgtgtcgtggggctgtgtctcgtgggtacagttgtacacctctgatcagagtaaaactattcgaatagccgtgcccgcggttatgggcggtcgaccagattcaccgtgattagtcccatcttaataaatcgacccaatacactgtagttcaggtgggttggttgggcctgttcaacgtggtgtagcgttgatcagtggagatttaatgttactttaattactcaacagttttactgttttgctcaataaaatgttttacaactgcctttatgcaaatagccacaaacccctccttgtatccccttgcacatctgcatcgttggagtaagagtaagagtccggtcaaaaaaaaaaagtaagaaagcgaggcaagcaatattttcatggatcctgcaccgcctacttatgtggttctcattcttcgccaccatcttcagcaagctcttcgtctacgtatgtaaaatgaagtagtgacttagattttatgtgttaataatattggtggtttgtgatattatatgtgtgaaagattagtttcttgttatgagatttcggagtataatagatgattggttttgtgaaataacggttgttgtttaccggccgggtgtggctggttagactgtgggttatgtggcagtcagaccggccagcgatgtaggatctcttattatgatcgagttttttgttgcaagatttaatttcatcctcatgtgaattcacgcgtgttttatggttttggtgcagcgaatctgatcattcatgtacttcacacgattctctagctagatatttgcattcactgaattagttgtatgtgcagaggaattcatggcaaccttatcttctgctgcttgcaaattaatccatgaacacttctaacgccaaaccgttgagaattctttagaattgtgcgctgggttagttcatcgatttcgctatgatgaagtggacgaatagggaaataggcacgatcagaaagtttgattttctgtttcatgttattctgacgaaatgtttttgaatctagctaaatgtttgcttagctttattgagcacaatgcattggattaacggggacgctactgagccttgattaagaatagtctgagttttggatcacgttaggagtttatttaggatcatcaatttttgacagtatagcttctgtaaccacaccttagaacataccgtatgagtatgtgatttgaaaccaattgtttcagcacataaacttgtagtatccattagaattatgacatgttgtcatgctgatcaacttgtttgatcatcaaaatagttctttttttttgttcatatctgtactgattatgctgtagctcacaatctttagtacttttccaagactgatcgttcgcacgtgcaatataagttcgtgtaccaaaacgagcattttacatgttcatgtactagattacattcacctaacaagttcgtgtaccaccgatgcaatttactctattatatacttaagcttaacagttccgacaaaagaaaactgtgaccaataattcatcatagtaatccattccggtggatgtaaaaataaattcatatcattccctgaactctgaatttctccgagatgtttcttttgtgcgcttgattgctttcatcttgttaaaccgcactgaaattcatgcacagtaacaatggtgttcaatgttcattgacaggctgatcccgtgcaacgtgtccgcggtgtacgaggaggacgagatctacaacgtcgaggaccagccgccggctatgaacgagtcgagcgtgcatgagtgggggaggagagccgcgacgccgaggcgacccgcatggccgagccgagcagttggagaagcaggtgctgaccttcaacaccgccgcccgcgcggaggggagcgcctcgtgctcgcgcacggcttgcggctgcggtccgacctcaccctcgccccacgcgcggcgcgcctcgatctgccgcgtccctttcgacctcgccgacttccgcaaccgctcgtcgtcgccggccaggacaagacgtcgggatcggattctccgccttcgtgcgcgcctactcgcacttcctgggcatccgcttcctcttcgccgcacaggacatggaggccgtcgcgatctagcaatggcagcggcggaggtcacgaaccgagcaaggagcaacgacatcgacaggacttcgccacgacgcgtagacacggagggcgcggggttctccagtatcttcagcgatgggtgaatccgtggatcccaggtagatgacgatgagcagcgcatccagggccaaatcgttcagcggccaaactcggcgcgcgacgcgagtcctaaacagaaccgaaccgaacctaagctacttccgatgctgactcccgtttcttcgattaatctactataagtatcgcacctgagaaccacctcctgcaatcagcaaccagtgaaaaatatcatacaatcgcttatttgtttatttttttgaaaagaatacaatcgtttataattattcgcttatccctttcacagcattgagagatttcaggaaaaataactcatggagcactccaagcaatccatccatgagctccaggaggacggtggtgcagattccggctccggctccaaggctgaagcgaagacagatttggtggcaggcgggaataagattcaagaagaaaacaatgatagcactgcgttttgccgggggtgtcgtcgccgcctcatccggttcgccatcttgaccatccggttcgttctcctagcggggttgcaccgcgaatatttagggatggtggccaagtatcgtggaactggttttggcctgtttttcacatgtcatgagtatgctctcattgctttcattattgtagttagctatatgggttactagtcgtcttgatccaattatgccgtttgtgtaagttctactttttttaacacagctcccttgtctctagaatcaaatatttacttcaataaatatccgtcgtatatattgttctatctgctaaaactgtcgatgtacttcctccgtcccaaaataagtgcagtcatagttttccgcgcccaactttgaccgttcgtcttatttgaaaattttttgaaaaaatttaaaaacataagtcacaagtaaagtactattcatgttttatcatctcataacaacaaaaatgctgattataaaaaaaatttaaataagacggacgatcaaagttagacgcggaaactcatggctacacttattatgggacggagatagtacaatcgtattgtttttcaagtagtatttctttcaactttttttcattggaaggtctatttataattacgttatattgtacgcggttgtcttttccaattatgataatcatggaagaattgcagagttgcacatgttgttccgttattggtgggtaggaacaattgcttaggaatttctcaaattgcgtgtatgcacttctatttccaaaataaaatttctaaggaaacaatttctcacaacatgttgagtcatcatgatacggagaaaagctcattcgaatccaaatactccatggaatccgaatccaaatgtgatactcgttgtcattgtttctattagcagcactcgtccatgatcgacctttgagaccgcacatcgatccggagctgactagggcaatcatctagtccctgatcactatacactgaatctcgggcctaccttctcctcttcatcatcggtgggagtgccgttgtgtctatcatcgtgctatcttgtccaattcaaccacattttagtgtgtatctctgtaaatagcaacttacacatgtattatgacgtcgcataatcgcattgtcacttttcatatgagaaatgttgctcttgttacacgttatgacattacattgtcacttttcatatgagaaatgttgctcttgtcacacgtgcattataacgttacattgtcgcttacaaatgcatctcctcctccatgtgtggattgggtattttggtctataccaaaatatggtagaaaaaaagattcaaagtatatctgtggcatataaaatgacatgatccatacggttacaaatagataaatagtaataatattttttcgatacaaaaagacatgatcaaacgatgtctggctttggttctagtgattgtgtttttatcagtttcagtgtttcaaccaccatttcctcgatattgcattctaattcagaaactgttgttttcttcttgatgggattactcgttggctgaaatgttggatctttcttgcaagaaagatgtgtgctgccaagaggctgccgattttgcaaagtgtgtcagaaaattttgtctgaatttattgtggtgtttgtttgtagcaacggtaatggtaaaagaaatgtacttgtattttatagtgtaaccggtgtgaattcattcggttcagattcagtagtgttgattggcactgctgcgttcaatttatttatttatttatttatttatttatttattttttggaaaagcgctgctgcgttcaaattcaggctcaggctcgaggaatgtgttcactgtatagaatacaaatggaaaatgctaaaaatggcaaatggttttgtgattcagtagatcaagcaaaactatttatatcggtattacatcacgcacaacattgagagaacttatgaaccactatattgagaaatcttatgaggcattcagaaacacgagcattatattgagaaacttgaattgagaagttttaatagatgatctcatgacttagaattacttcgttcaaatgaaatctcatggatggcttgacaaaaatacctacaaaacttctgctgtcaagtgcaaataaatttggttattagaattacgccactctccgtgcgtaaaactacaaatatactgttaagtgcaaataaatctggttattagaattacgccactctccgtgcgtacaactttgagatacacttaatagtgcaatgacaatgggtgtgtggttttattctgtattcaatctccaacatgttcataatttatttttaaaaaatgtttgaagtgacatctctccctctaaatctacaaaacccagtgttaattaactataaatactttcagttatgacgtccggctgtttagagggacatctctccctccaaatcttgtgttatttagctataataaatactttcagttatggcatctagctgagaccggagcctgcaggtaatactggcatactgctagaactcatgcgttaatccctcaacgtccacaacttccttcgcaacctttggttgcattatacaatgtttggtaatactggcatactgccagaactcatgcttgaatccctcgacgtcaacaacttccttcgcaacctttggttgcattatactccctccgttccataataggtgacgtttttgattttttatttgcaacgtttacccattcgttttatttgaaa

SEQ ID NO: 41632 - DNA, 1922 bp, Oryza sativa
ttcaagcattctatatataaacacccagtcctctttgtcataggccttctcaaaatctaccttaaaaatgatcccactttgctttttttgtgtgaagtattcaacacctcatgtagaatcacaatcccttccatgataaacctatttttgagaaaagcattctggttctttgaaatgatagaagccataaccctatccaatctattcatcaacacttttgtaatgattttgaaactaacattcagcaaacatattggtctaaatttttgtatttgagcagcgtctttagtaattatgacataatttagtctctcaatgtctagcacacctctatggaagtcattaaccagatccagtaaatcaccttttattaaatcccaaaatttaatataaaaatcaccaaggaaaccatcaggaccaggagccttattctgttttagctcaaaaactacctgtttcacttcttccagagtgaaacgttttattaacatttctgcatcttcttacctttgtgatcccctctaggtttaaaaacaagttattctgtttgggattaccaaagagctcattgtaaaagtgagtaatgtatgtcaaaagctcggcttgcccagtaatgataccttcctattgagataaagagtgaatcagaattttcctcttcctacattagctttggcatggtaatattaggtattacaatctccctccatgatttccctttctttgctcctctggaaccacttcgttttttcctccctaatagtgaatttcagctgcaattccaggctcttctatcttctctatctctacaactcaagccaacattttcagcttttaagtcaattgcatcaattttgttcaaaatttcagtttttctcctcctatattctccttaccaattcttattcaaaccttttaatttcctccttagatagctaagtctcttttgccatttttcaatgctattacctgaaaaggatttgttccaagcttcctgcaccaaagtccctagatcctctctcataaaccaactaaattcaaatctgagcatactcttttttttaactaattccctagtgtccaacaacatgggattgtgatcagagaaggctcttaccaaagattgaacagaggtgagagggtaaacaaattcccattcattgttgatgaacactctatccaatttttctaaagttgggttatcttggttattacaccaagtaaattgtcttcctcccatttgaacctccctcaaattgttctgcttaattattgcattaaagaggaaggtccacttattataacccccaacttttgtttctctcactttctttcctcagaatgttaaagtctccaccagccacaaagggtcccttagatttttggaactccttagccaattcagctaggaagacagccttatgctctggttgagcagccccatatattactaacagatcccatgtttttttgtctcaaatattctacaactttaacctgatatgaaaattctccatagtaacatttacaaatgataacttgtatatgtttacacccactagaatcccccctgacctgccacatgagagtagccattcccattttaatttttttttgtccacttaagctatgaagtaagccagcagagaaatcatgctttatagtttcaagaattcccacaaagtctacatttgaatccctaattaggtcctgcaaatgatctattttttcgggttccccatgcctctaatattccagaatatgccttttcataattcttttggtttctttttccttttcttaagtttaggagtgaccttgaaaatctcaaggtttccctttttttgtttcatttttctagctgaagattgtatttgcttgagcataaactcaatttcctcaaagtcatcaacctcctctcc

SEQ ID NO: 41633 - DNA, 525 bp, Oryza sativa
ttagcctatagtaaactaatgggtaaccaaatataagctgaatacacaatacagcaagaatcagaatagattgggtttagatccattggcgtctttatgccagaatattttgttttcaaatgctaactagtaagcaactcctcactcatgcgtcatatcatatgatattgaccacaatattgccacaacaaatagagaatgctgttacaaaaatctataacaagtatttatggtgttgaccacaaaattactactccctccgtttcatattataagactttctagcattgcccacattcatatggatgttaatgaatctagatatatggatattaatgtgtctagattcattaacatccatatgatatgaaacggaggaagtactacctccgtcacataatatagtaacctaatattagataggacacatcctaggactacgaatctggacaagcttgtccagattcatgtcctaggatgtgtcccatccagtactagcttgttatattatgggacagagggagt

SEQ ID NO: 41634 - DNA, 2486 bp, Oryza sativa
cgccaccgccatcctccctagccgccgccgccaccgggggcggttcccaactccgcctcccccaccacgcctcccacatcgcgtcacccctaccgccccgcatctaccggccgacggttcctccgcgtcgccgccggctcctcccgcggcaccccacccccatcccggcgcttctgtccgtggagatcggcggggtagccggctcgcaaggtggagcatcgatgtgacgtgatgcagcatttggggagtctttggtagaggtggagcggtggagattccgacgccgccgaagccccacccagtgcacatcggcgtcgcgactcccgccgacgccccgccatcttccgaccggcgccgccgcccgcatcactgccgacgcctcgccatcgcgcggccgccacgccaaccgcgacgcccgcctcgccgatctcctccgcggtcgctgccgccatctccaccggccaccgctgtcctcggtacgcactgctaagtcctaacccacccatgcctctgccttgccgccgacaccaataacccctgcgtccgctgtgcttcacgttgactggtcatggaaccagtgcagcccactccactggctggagctgcttccctcaggctgccggaggtagctcgctgtgccaggttatcagtcatctcaagcaatgtgctcattaggctattgtttgattcacgtacagaatctgttgcagtagtttagacgatcttgcactatacattcctgtatttacaaaatctgttgcagtgtttgattatacattcggcatcatattttgcattatattgttattttcaactcctgtatttacagagtgttgacatgttatttgtatttagatcccagccaatgtgaattctagagctctgttctaaatgttggtaaactctaatgaattctagagctctgttccaaatctttgagtccatactttagtccatgctctgcaccttagcaaaaatgaaaatgttatctgcagctagcccaaggaatccacctgcatccagattatgtttcttcaactatttgttatatggttccctccagtcattcttttgtacagcagcgtgctcactatttgtttgctaaaatgttgaccatgcatttgttgaaatactcaataaaaatttgttcgaccactgccaccatggtcactattaggggctccacaccgatatcttcagcaagattgggtaaaatgtcttgctgctgatgtcagtaacattttttttcttcatgtgagttgctaattgttcctcataaggtccttgcaggttcaagaaatacaggattcatgtgatgagaaaaaggaaaatagggttcaactgaactctgaatctaaagaaaaacgaaacatacggcaaaaaaatatggcaaaggccaacataaaggtaatttgtatggagttaggtgtcgtttctacatgacaatactttattgttggaatttcctgttaccttgctatggtatgatatttggcttgaattgatgctaattttaactgtacttgctaaaattgctatggtttgatgggtaacaccgaagcaggaattccatgtctttcagatctactgtgctgcatcttgaaaaacactattgctagcatgtaggaacaactcatgaggactagcagtaggtatatcagtaacagcttatctatatccctatactatattatcatcactatcattggtgtgtttagttccaaagtttttttccaaacttccaacttttcccatcacatcaacatgtcatacacacacaaactttcaatcacatcgttccaattttcaaccaaacttccaacttcggcgtgaactaaacacagcccatatctatattcagaattatttgaagatgagacgatgactagcagtaagactgctcctattcatgtcaaactctgtccatcaagattgctagatatctctattggatgctgttagtaactcctattagatgtgtttttttttggctgttagtaactcctattagatgttaccattggactaaaatatcataagtatatctgtactcatatatgaaaatctcatctagaattgctctttttttactatatttacagctatataattttgtacgaaatcatacaacaactgctctaagtaattagttagatagcaaatgctcttcgtaattgtacagaatcatgtgatgtcatcttacccaatcctggatttctgtcttagctaagatgggtgctttgctttacataagacagacgtgcatgcatatctggatttaagccgtatacttctgccttaggattttgtaggatgtgggctttcatgaagaaggtttgcagctcagctaagttgacgcgggggcagtaagcttctgcaaacctgggctctattttgcacagggagaacacaatagcagaggctaccatgagaagatctgataaatttccatttgagaggctcggttattgatgtttcctaaggat

SEQ ID NO: 41635 - DNA, 690 bp, Oryza sativa
aagcacttaattacttaatttaatgttagctacacactaaagcaatcactatattttactggattatagtgaacgatgatcctgcacgctgattaggaactaagagataattctcaccaagcaaaactaaattactcaaaagatatttctattataatcagagtaattaacagataaaaagaaatagaagaggattaccgacaactccggaactcctccgacttcttctactctattctctccctattctagtatacagtaaagtacaatagagcatcttataattcagctcaagcttggagtgtctgttgaagtgagtgaagtgaagtctttatatagggcatgtatgacggttataaaacgcgaaaagtccattctgcccttcaaccgccattcaggagctcatccagaccgtccctaccaaaccttgaatcggacggtgatcaccagggttcggccaaacttgggctgggccaggcggccttcaggcttggtctggttcccctccttagcctgccttatccattccttcgagcagatggcccatttgatgatgtttcaatgtagttcttggcccactcatgatatggacaggaattcacctttacttaagtctatatttcatccaatcttcgacggtttatcacctacattcaaatatacaccaacacttgtggaatatgttagaat

SEQ ID NO: 41636 - DNA, 1258 bp, Oryza sativa
cgtaagtgtgaaaaaatatcaaaaaaataaaataaaaaaattgcaactctatacagagaaacaagaatggaggcgagggatggagggaggtgccagccatgctggcgccctcctccctggggcggcgccagccatgctggcaccctcctcctgccacatcggttcgcgtatgccacggtggcaggaagacggcgccagccaccctagcgtcccaaaaaggaccatttctaggatatgtttttctaggggtctatttgcgaaataagtttttagaaaggaccaaaatgtgaaaaatccagggcaataagaccccatccaattcaaagctagatcttgccccgggagaggcgaggaggggaaaagggaacatttttagttcaatggctaagacgagaagaaaaaaataaaatagtattaaagaggtccacccaatctaaaactacactttatcatagacaagtttttagactaaaagtactcttgggatggagggagtaaaatattaagcatattattagttttaaatatactttatccattaatctatttctttcaattaatatcgtatgaaaatatttttaaatacatatctaatgataatacgtgcaagacatgaaacacacatttttttttacctcaattactagtcagaatttttaaacattaactttgcggagaactaattgaggtaaaaaaaattatcttctcctttggggaagaaaaacctcttcttggaactactatgtttagataaggggtaaaactttttaccgtgtcacattggatatacggacatacatatatatttgaagtattaaatatagtctaatgaccaaacaaaatacaaaatccgcttgtaaactacaaaacgaatttattaagcctgattaatccgtcattagcaaatgtttactgtagcatcacattgttaaatcatggagcaattaggtttaaaagattcgtctcgcaatttacacgtaatctgtgtaattagtttttatttttatctatatttaatatttcatacatgtgtccaaacattcgacgtgacatggtaaaaaaacttgactggggatctaaacagggctataatacatgtataattgtgtgtgtactccctccgtaacaaaatgaatctagaactggatgtgacgtattctagtacaacgattgtactaatacagacagatgtatgtccagattcgttataatataatgtgtcacattcatattaggttgtttttgatgagctacttgc

SEQ ID NO: 41637 - DNA, 561 bp, Oryza sativa
agtcgacctgcaggcatgcaagctttaaagcttatggaataataaatgtgtatccactacactggatgaagtgattgttaagccttatccgtggctaactggatgatgaagcgctcaccaactcctcgcagagctccttgagcggccaccgcagctcggcgtggtcggggaagtcggcgaacctgtagaaggagaccaccaccagctccgaatcaccagcatccagtgtagccccatccccaccggcggcggccgcggcgaagcccctgccgtgcggcggcgggggagcgcgcgggccctccagctgcggcatgaggcggacgcgacggcagagcacaggaggtggccccggtaccagcgaggcgacagcggggaggacgaggaggcggcggcggctgcgcgcggcgaccgtggcggcgcggcaggcggcggcggcggcggcggctttggagagcgcggcgagtggtggggagggcagcatttgggcttggggggatgtaaggggacaggtcaagtttgcgagagcctttgctttatctgtgattttgggccttgcgagct

SEQ ID NO: 41638 - DNA, 684 bp, Oryza sativa
tagtccgcacatcctcaaatacaaagcacttccctagttagatgtaggttagacttcccgttcgagaaactctaccttctacctgccctcaatttatgcacgattaatgaatgccacctgggtggaagcgagaggtggaaatggaaggtcttagtcggaggtgggatctctacctgatagttgcattgccattcatgatgatcccctggcattcgtccattcagccattcaccattcacccattcaactggaattttggttgaatgccggaattgtgtccacaaattgtggatggatagttggttggctggctggatggctggctggatggctggctggatggatggtgaatggctggcggcggttcggttgctttgaagcatttgttgctatctaaattccatttaaggtcgtaccttatcgcccagcatcatcttattctctatttgtattccctccatctttcagatacggatgtagccttggatgtgcccgtgcccaatgaagaggaagagcgcaacatgaaacgtaagtacaaaagtaccggacacccacccagatcccaatagaatccgccaaatcctgcgggaaattgtaatcccattcaccagctcctacatttaattaacaagagaactattgtatttatctaacacctggattatctccacctttcatttgatc

SEQ ID NO: 41639 - DNA, 672 bp, Oryza sativa
cacagatggaaataatcaccgctgaggacgcagaaatcaagtggatgagtacctctcgtcaagtgcatcaagctgtacaatctgccatgctttcccttgatgaggaatacaatcaatcagcttcaatgtcgctggccacaagtaaaattaagaatattaggcctgaaaaagtatgttctgtcaaaacattccgataaaccgtagcatgttgaatgggaccatatgtagtccggtagttcagaaatacaatccaatccatctgcattgttgaaccacaaaatttcagagattgtccatccgattaagctccttgcaaatcataaaatgtatgtgcattgcaaaagactaaagacagtgaacaaaattgttcagttatacttgtttctaatagttgaacatgaataaaaactataataggcagctaagtaataccttggttatcaaatctattatgtgctcaatatgctttgttaaccggaggggaatagagagagagtgagaggaagataatagattgaggttttttatttttttttctatgtggctggcaggtggatccagtagttttttttattttttatgatagagttatcactgacacgtgcatctcattacatatttaattatattttttactggctaattacacataagcgccatgtctaatgaaga

SEQ ID NO: 41640 - DNA, 679 bp, Oryza sativa
  unsure (1)..(679): unsure at all n locations
ccggtgttgcctagaagtaagagttgaagnccgatatcaacaagaggtcagtgctgacacgttggtattgatcttttcaacatagtggtaaaagattctctaaaataggggacttgaccaggaatgagaggagcttcgacgtaaagttagagggacgtctcttccacttgtgaccagaaactctagagcttgatgaggccgcaacggcattggagttgatgaagattgacaaggacgacagtgatgtggaagaccaatgagttggtaggcgttaggaatccgacggcgctagcacttgaggcggcagtggcaccacatgatctggacaatgccagccctcgttgagctcctggtcgagtcccctacctcgctgccagatccatgggtgtttagattgggagatgattgttactgccttggataaggcatatctagggctagtttggtttgcagcctaaattggtcttaccaatatttggtaattttaatagtgtttagtgtctatttggtttgaagccaaattttgacaaaagcctagaaaaataggccatttcaatagttaatttaggctattttggcttcaatctaaatagaactttgtcttgccaagagtaaacatgcaaaaacttgtgaaaatttggcattgacaaaaattggtaaggtcaagttaagccacgaa

SEQ ID NO: 41641 - DNA, 688 bp, Oryza sativa
gcttgaacaagaataaccttgtcttttgtctgctgaatgtcgaacaatgtagggcctcgtttcaaacgtacctcaatactctactcatccggtccgcgagtatcactggtcgacaaatctaccagccaagtatatatcatgtcatcacaacacggttaatgcacaaattaggcaaccatgcaaattaggttcgaatttgagggagccagcctgctaggcttttttgttgggcttcttttgatcaaaaacgttgttttctttatttctctgcgtacatacgaagtatataccttatatatgtattcttttttaaaaatcttaggtattttcatttgaatacccttgaattgagttggcccacccctgcccatgaccatgacaaatagagtaaggccctgtttagttcaggggtgaaaagtatttgtgtgttataacggatttacggacacatatttgaagtattaaacgtagactaataacaaaacaaattacagattctgtctgtaaactgcgagaagattttattaagcctaattaatccgtcattcgtaaatgtttactgtagcaccacattatcaaatcatgacgcaatcaggcttaaaagatttgtctcgcaatttacatgtaatctgtgtaattagttttttttttttgtctatatttaatactccatgcatgtgtccaaata

SEQ ID NO: 41642 - DNA, 690 bp, Oryza sativa
atctatcacattgtacgtcgttgatagtaattatgaataatttaatatatctcatttgtatatccattatcaaaatgggaaaaaaaatataaccttgaactttaattcgtgggtaattttattatcctttagaaaatcctaagtggtatcatagggcctgttcggcgtgcctagatggcagccagcagctacagtaacaacgtacaatttctacgtagttgctgctgctgcagcagcagcgctgcacagccgctgcagttgggcagccgaacacacccatatttactagtgtaatatttaatacctgaaggtatcagataccttatgataccgtaaaggttctcttgactctaagtctaaaaacaatcttggacttgtcaactatataatgttgaatcataactatcaaagccgatcaagcttaaaaagatatcagtttaaaagttctggaacacaagattctaatcgcacgaatagaaaaaagaagcaggattggaatatcgtgccatgttgaaccctgtggaaaataaaatcataggattgctcaaaacatgtgtttggatggctcaccggaaaaatataagaattttgagattatgtagtggtacttagattgagtaagagaagagagatgttgctttgaaattctcatagaaaatgtttaaaatcatttggaattgggccatatga

SEQ ID NO: 41643 - DNA, 549 bp, Oryza sativa
ccctgtttagttcaggggtgaaaagtatttgtgtgttataacggatttacggacacatatttgaagtattaaacgtagactaataacaaaacaaattacagattctgtctgtaaactgcgagaagattttattaagcctaattaatccgtcattcgtaaatgtttactgtagcaccacattatcaaatcatgacgcaatcaggcttaaaagatttgtctcgcaatttacatgtaatctgtgtaattagttttttttttttggctatatttaatactccatgcatgtgtccaaatattcaatgtgattggggaagctggagtaggtaaaacagtactcatcatagaattaattaacaatattgctaaagctcactggggctgggtgaaaattttttatttaggaactaaacagggcctaattaagctgtgtatagtaagcacaatttccacgccgacgcactgcatatttcacgcaactttcaccgcctattttcttcttttacccccacaaccacgaccacgacgacgaccaaagtaaacaagttttat

SEQ ID NO: 41644 - DNA, 1542 bp, Oryza sativa
tttgacaccgttgactttttagcacatgtttgaccgttcgtattattcaaaaacttttgtaaaatatgaaaaattatatgcctacataaaaatatattttacaatgaatcaaaggatagaaaaagaattaataattacttaaatttttttaaaaaaagacgaatggtcaaacatgtgctaaaaagtcaacggcgtcaaatattttgaaacggagagagtactagtagtagtactattaaaaacctgttttcagtgccaaaacttttctcctgtttctttacaaaaagaaagggagaaagacattgaaatgtgctgagcacccgcaatggtaaagtaagttgctctctataaaacatgtacatctcagcaatagactagattaatagtaaaccacctcaatagtatgtctacttgggtatctatagctctctaatatattgcctgaggtttctgtatagactatcttcaggttgatagatagatgtgctatatatcttgatttaatctcttccaagtagaaaaatatgctaacatggatctcttgtaaagagtttatagataattattgtgggtgcccttacagtgccaaactgccaataaccttgatttgttttccggttctcaactaccaacaccacaaatagtgtagcttcaagttttgttgcagcaattgatagtgagcatctggagtactactcctacactattatacacaactcaagaggagtgaaggaccatgaaggaatcaatcagccactaacattatcattagagttcttttcttgggtcctgcatgacaggaatgtgcatgcagtgtcagtgagccaattatcctgctgcccatacacttgcacattcacacattcacacacacaaaaaaacacaaaagatgaatgaatgaaaggcgcatgtctggctttgttcagctgctgtttcctccccttcttttcccccatctctttaggcggattcggtgcgtgattgccccattgccattgcaatttttgccagccacctggtcagcaaaagatgggggagatgatggggctgaagcctgcatggatgtttcattttgattccttgattccttctcctttcattcatagaaaaacaatcatacatgcacatcctttggtgataatgaatttatattgctatactctacagtaattatttgtgggagtagtagtacaagtcttgctcaatctggtaattctatctacagtaatttactcccattttcacttcacttgccctgtttagtttcaaagtttttttctaaactttcaactttccatcacatcaaacctttcatacacacataacttttctatcacatcatatcaatttcaaccaaacttttaaacttactaatgaactagacacagccgtactggagtgaagtctaccagacgagtaccagagttgtgtatgtgtgtgagagaagaaatggtcatgatagcatcagttccatcagttcaatccaagtgaatcaaaacctgctttttgcatgcatgcaggatgcaggtgaggaggaggagg

SEQ ID NO: 41645 - DNA, 716 bp, Oryza sativa
atatataaaaaatatttgaattcaaattcaattttgaatgaatatattcaaaattcaaatttgaacggggtatgtaaacttttgacttataacctttgggtctataacctttaggtgtataacttttagatgcatagaaatcctatatataaaaaaaatatttgaattcaaattcaaatttgaatcggatatataaacttttgacttataaacttttggtctctaaactttagatgtgtaaacttgaggtgtataaactttaggtgcataaatttactaaaataggaaagtaatgcggtgccaaaaaaggaaaccaggtggagggaggaaggggaaagggggatcgatcgctacccttgtcgccgggcgatcgatcgcccattagcacttccggggagattgttgggtctagtctcacatcggtaattgagattgttgggtttagtcccacatgacttaaaaggtggggacggtcctcacccatcagactagtcttttgggttgtgtaggctcagaacctagtcttttgggtggtgtaggcccggtacatgaagttgtgacggcctgtggtggagtaggctcaatgtgacctaggtggctcacggttgattggctgggctgcacactctaacaccatccaaactaatcagatcatatgtccacaatttcaacactcatttggccagtgaaatttgcttaattgcataccaagacat

SEQ ID NO: 41646 - DNA, 669 bp, Oryza sativa
acactctcactttatcgtatcttaatataattattgtctactttatctacttctgacgtatattttttatctacttccacaagctcttctaatgtaatgattatagacaaaataaacttatttgggacaaacgggtgaagagaaaaaaaatgaaattattctggaatagaaggagtataagagaattttggataatcataaaatgatgacacggtggggtcccacatccacgtcgggtggctgctaccgaccttgacctgccccagctcctcgggagtcgggaaggcaactccgcctcttcatccttcgccgccgccggcgccttcacgtgctccctctcctctgcgagtcggcggcgccgatctccatttgtcgaggcgagcatagcatgggagccgggaggggagggcatcctggtgaggtgagcatccacatcccctttctgatgaatcattcatctctctcccacctggagtagttttttttttgtctggaattcgctcgcgttcgttaaccctagctttctcttgtagatctggaagaagctcttctcttaattaacctgtgtaaaaggttgttgttcccccaaaaaagttgctttctgggatactaccaagaggaggagaggggatagatagtctgtcagatgatgatgatgccgctgcgttg

SEQ ID NO: 41647 - DNA, 773 bp, Oryza sativa
  unsure (1)..(773): unsure at all n locations
ccgaccagtagtagtcgccgccgccggcctcccccctccctcctccggccagatctggaaggaaggggggaggggagccaccgccgcggccccacgcgtagtcgtcgccgccgccgccccgcgccgtatttgccaccgttggcctccctcctccctcctccgaccagatttgggagggaggggggaggggagccgccgccgccagccgaacgccgtgtcgccccgctgccttccgcgccaccccgcgccatggccgccgtcactccccctccggtggctggggagaggaggaggggtgagggaagggaagaaggcgtgaggggagaggagaaggcgtgaggtgtggagaggggagaggccggccgtgggtggagacttagaaaaaatcaacctctaccaagtttatttatatttaagtctattttcgtaggcggaccgaccatttcaccctaatttatatttttgtaggcggtcatttggctttaagagtcnnnnnnnnnnnnnnnnnnnnnnnnnnnnnnttgagaaaaatactttttctagtagtgtcagatacaccacagagcctttttctctctcttggcaacgaacgtatgacaccaaaatagcacaagattaagctgtgtgagcatgggtttttccccctaacttgggtagagatggagatggagataaactgaccaatataactatagatctttgcgatagatgcagccagtgatgcaccgtgagtagattccacgtagagcaggaaaacgacgctcagtttggga

SEQ ID NO: 41648 - DNA, 747 bp, Oryza sativa
taagacatttcctaatacttactatgaatctggataaactgctctaacactatgaatctaaacaatatcccattcgatcctaggttcatattttggaatagagggagtatttgggatgattcctaagttgacatacctactcaaattaacttcatttttttatattagcatatatacctagcaactacgggatacactcatcccaggctaataacttatttccttcgttttatgttataagacgttttgactttagtccaagtcaaactactctaaatttgactaattttataaaaaaaaagtagaatatttttaacccaaaactaatatattatgaaaatttattcaattatagatttaatgaaactatgctggtgttgtaaatattaatatttttttatagagtcagccaaactttaagtagtttgactttgaacaaaatcaaaacgtggagggagcagtagttactgaagtattgaggaattaggctgcatagtttgaccgggtttaacagcacatggtatgatgctacaagggtccaaacaagctgataaaatcctagcagttttctgttgctgtcacagatctttaaagattacctgcatgttggaaatgattcaacacttgcattggtttgacgccaaacgatgtatggccaattgagctgccgtcatcacctgcactttgccacagcagctcgggcaaaaaataaattgacagcgtactgaatctgcaggactttgtaaa

SEQ ID NO: 41649 - DNA, 746 bp, Oryza sativa
aagacttttaacaatgagaatatgaaccccctttgtttagctgcgtgctcacaaattcggagagagatctctacccctttgctcttgtgatttccttgtgggattacagaagcggcattcgacgccctccaattggtgctcctggtccctttgaggatttttccttgattaattccaggttgtgttggttggtaacttagagtgtggttagacgaaccctcaattcaggttgtcgtaatagagacggtggttggcttcaagtatgattgttaggttgcactgttatcttggcttcttgtagctagttatcttgagttcttgatcctacgttgtgaagatcggaacaacacccctacttgggtcgtaccagcattgaaccatgacacctagaaaactaataaccattagacccctctcatatttgatacataagcatccaagcgtcatatagaattgcaatttcacatcaactgctgtagaataaatattgttcatttagatatttcgagtacacgatttatatattgtttccttcaagtttcctttgagtatttctaaatttcttgttgcaaggcgcaggtatccaagtttttaagatggctagactacaacgaacaaaaggatgtaacatactttgatgtatggtattttttgtatttataatttcttttataaagacaaacggttaaaatttaaacatggatagcgtgaattgacgagtgctggaaaacaaatggagtatatat

SEQ ID NO: 41650 - DNA, 538 bp, Oryza sativa
ccgttcatctctggtcgtccaaaatcagtgctttagcaccttagggcccatttgaattgcagggtagaaaaaccagaggaataggaaaaacataggattctgatagaaattgaagtgtaaaatagaggattgcaaaacacaggaatggtcgtttgattggagcgcaggaaaaacgtaggaatcggatgagagagagactcaaaggaaattttccaagaggttagagctcttgctaaatttcctctaaaatctacatgtaatgtgtcattccataggaatttcataggatttggaaagcttcaatcctttgaatcaaaggggcaaataggaaatcctataaaattcctacataaatcctttgattcaaaggggcccttaagattatagtaataagcagccgaggtggctggtctagattagtgagaatgtgaaaagttgagcttctactgctagtttattttctagattgtatgattaaagtttcttacaatccatataacaatatgaactatttacgaggctaaagattttgaaaaaa

SEQ ID NO: 41651 - DNA, 673 bp, Oryza sativa
aaaagaatattacccaaatacccaatactatatattcgccttttaaattaacaatcacctaatctagaagccacttcagcatcatataccttttaaatttatggatttaatcaacccaactaactagcaaaataaggccaaatttctagttagggtgtaacaagtatcctccggcatcctctaaagtggaagcaccagacctgatcattgacattggcgcctttcagcctctgcgtgtatatataccttccaggcatcacaatgtactgtctcgacccaatctgcgacagaagaaaaataatcaaaatagctccctcgttattattcacagcgctcatacaaaacaaaacacagagaaaccctcttcagatgcactcctgcatatttcagaaatgcatccgaacaattctctgtaagactagtattgtatcattcgaaaacactgtaattctctgcgccgttttcttaatggtgtgtcctgtacatactaataatcggcgtgcgcgcattcctattggcgcgtgaatcctaagcttcttatgcagcatagagtaagcaacacaagcctgaaatcaaatgctcacttcaccgcaagaagcaacgcaactagcgccaaatgcctgtgtaatgatattatttaaagaattcgaggtaatgtagcatgaacaaatgt

SEQ ID NO: 41652 - DNA, 550 bp, Oryza sativa
aaaaaaaagttgagagacctagatgatgcacccgcataaatttcagaacagctagggcacttcattggaaagtctaaaatttaaaattaattacaccttaaacaaataagtaagccgtaaacacaaaaacatatccgagggagcttctaacaattattggttttttcaaaatctttagcctcgtaaatagttcatattgttatatggattgtaagaaactttaatcatacaatctaaaaaataaactagcagtagaagctcaacttttcacattctcactaatctagaccagccacctcggctgcttattactataatcttaagggcccctttgaatcaaaggatttatgtaggaattttataggatttcctatttgcccctttgattcaaaggattgaagctttccaaatcctatgaaattcctatggaatgacacattacatgtagattttagaggaaatttaacaagagctctaacctcttgggaaatttcctttgagtctctctctcatgcgattcctacgtttttcctgcgctccaatcaaacga

SEQ ID NO: 41653 - DNA, 584 bp, Oryza sativa
atctagatcaaataggacggtctaaagactttatatttaaaaataattcataactttttcatgtgaactctaatgaagacaaactttatatcaaacttgtagccctcgacacgatctacaactttgtagttgaattttttgttattttaagtcattttttgtccaaaaatataatattaaaattaaaatttcaaaatctataaacatgcaacaatattttgggaccctaaacagttttaattcaaaaacttttcaactacaaagttatgatataaagttttcaattttgatataaagtttgtcttcattagaattcacatgaaaaagttatgaattattttttgatataaaatttttagaccgtcctatttagggaccggggtgacacaactgaacaagttggaggacctaaacgagtgatttgcaagtttagggaccggaataacacaatcgaacaagtttgaggaactgaacggtcgatttgcgagtttagagaccaggatgacacaacggtacaagtttagggaccggtgatggactttactctttaaatatatatttgaaagctatgtgtttgcttatcc

SEQ ID NO: 41654 - DNA, 926 bp, Oryza sativa
tccatcttgtctaattagctatcgaactactccatatttaaccaactgacaatggaattagcatgtgcaagatgatgggaagaacaattcagtgagctactgtaattgttatctaatctaccggactacccctgtatactcgtctttgagcttattggccaattgtgtttagcagtatgcacacacatgcacgttgctgattaatttggtttataagtttagtttgtgaagcaacactaataatccgtcagctgcaatagatgcctgtaaacattaattgggacgttgctgacctgcttatatatatgtatgtaatctggctagttcgatgtaggaaattgtagttgatgatctctctagtgccatataatttcattgtgttaaaacaactttgtgtgttctttcatcattacgcctcatcttttttgtcctccgccctctctgtttgtgttattgaagtttcctgcattccttacatcaactgactggagttctcgcccctctttatttttcttggtttttcatttatagtttccttcggtgttccctaccagaacaagagaaggatcctaacgatgcgagtctactgcgctgctgatgaaggttagtctaatggtaactgtagattggcaagttgtagaagcggtcaaatgttttattttaggggcaaatgcaaatttgccactactttaaatcgttattgcaaaactgccactagaaaattgcaaaaatgccactagaactgtcattcgagtggcatccttgcaatattgaaaaaaccggtggcattgcaaatgccctattttacagttttttattctggagtgaaaattcttgtacccaagctcagatcttgaggtggttataaacttttgatgtatcttacactagggactactatttcaactcttttcttcttttttttt

SEQ ID NO: 41655 - DNA, 780 bp, Oryza sativa
tttagggaaggaggtagtagttttatatatttcacaaaagtttttgaataaaacgaacggtcaaacatatttataaaagttaacgacgttttctaaatatttagggaagtcggctatttagaaacggagggactactactagtattgatcagcacaaacagccgaacaaagttttctgaaccaatgcaattgctcttcagcatcatgctgaagaagcacatgctgaacaagctctccaagagtgtgatactagcagtgtagcacatgctgaagaagcttgctgtaaactttcgttttccaagaggatccaagagcttgtcagagtgaatacatggatgcagcagtgaaatttgtcaatgcttcttcaatgcacccctgtcaccattcatgactcatgagaggaggaaggtacgagcaaaaacaactgtgatgcttgtgcaagaacaggcaaggaatcttggacccaagaaactctcaagctccagatgacaaaattttgagcggttcagattattcagtcgaaatcatcgtcgcaagaacttgcttggagaaaggccaatgcgaaaacaaaaaaattgacaaggcatcaaatcgaccaggacactacagaaataatgtgaatgagtcctagtggagtaggagcaagaaaaaagaacaatgtgatgtacttactactacataggattagacagtgaatttcatagtactgaataatgtgatgcttttgggtgtgtttagttcacgctaaaattggaagttcggttgaaattagaacgatgt

SEQ ID NO: 41656 - DNA, 535 bp, Oryza sativa
catataaaacaggatggtgtgtttgactatagaatacaaattagtgcatgctgagttgggtatccaaagcctaccatttttcctgaaacaggagctatgcccatattagagaacttttacggtacaatatactaacaatatatattaaaccctaaaccctaaaccctaaaccataccctaaactcttatattaaggagaagaggctagccacgagctaggggcctacaacttgtgggaggtttatgttaaggggctattatacacgaaaggtgttttctttgtaaacacagaaaagatctaaaatagtgaaagcaacaagctttcttgcaaattactgcgccacgtcatccaataaatgcgggcccgccgatttcgctttcggatgatacaaaccgtaagatcctttgattggcgaaatatcttattgatcctttaggaaacttctatctacttctaatcctttcacgttcctgggtacttacgctattttcaattttgcccctacattctaacgtggacgccggcctggcaaag

SEQ ID NO: 41657 - DNA, 838 bp, Oryza sativa
ctcgtatcgatcagttctatagttttactcagaaaaaaaacacaagtttgtcttccattaaaataaagcccaatctgcaatctcctaatcccataatgaattgcttagacttagtcctttacttacgtacgagatgcatggattgggaaatttgtgccataatattccatagcaggctatgtacattttcctaaactgagttctgtgatgactcattatgaacttatgcagcacattttgtagacattatgcacagccattcgcagtgtgtgaaagttcaaaacttacacacactcttgtaccttgaaagtaaatcccgtgtgcaatgcttagcctagaaaggacataaatacttctacttatttttttaaaaaaaaaaagaagaaaagagttgaaatagtagtccctagtgtaagatacatcaaaagtttataaccacctcaagatctgagcctgggtacaagaaatttcactccagaataaaaaactgtaaaatagggcatttgcaatgccaccggttttttcaatattgcaaggatgccactcgaatgacagttctagtggcatttttgcaattttctagtggcagttttgcaataacgatttaaagtagtggcaaatttgcatttgcccctaaaataaaacatttgaccgcttctacaacttgccaatctacagttaccattagactaaccttcatcagcagcgcagtagactcgcatcgttaggatccttctcttgttctggtagggaacaccgaaggaaactataaatgaaaaaccaagaaaaataaagaggggcgagaactccagtcagttgatgtaaggaatgcaggaaa

SEQ ID NO: 41658 - DNA, 653 bp, Oryza sativa
atatgtattgtaaataggtcttttttataaaaaataattatagataggttcttgatgccaatgacattgacgctaactccttcatatcagtcacttagctttcacgtgaaggctataggataatgtcaatgtgattagcactgtcacgttggaccaagatgcctatcttcgttggcaccctgaaaagagtctatttttaaaataagtttttctaaatatttatttgtaaaatgagtttcagagcaaggacaaaaagtaaaaaacaaaaaaaaaatctagatggactggtccagtgaagaagatggctccccaatccgagctgccatgtgtggatctgcaacgcaaagagtaggctggctgtagctgtaactagctgcacacagcagagtacaggacacatcatattacctctgcaggctggactactgccgctgcacaagctagtatagcggagaggggttacgtctaatcggggtcgctgaaaattgttggttgtcatgcatactccatggatacaccagtcgcaagtgtctactccagccagtgtaccgtgtgtatattgactggagactggaatcttgactgcttgtgtgtaccgtgtgtataacggaagatcgatcgtcattgtgtcaccgcaaattctgcctcaccaa

SEQ ID NO: 41659 - DNA, 721 bp, Oryza sativa
  unsure (1)..(721): unsure at all n locations
agatcctatctctacggcatggtttgtgatttggcggaagcaagtttggcgtctacttctcccatctagatttcctcaaaatcttattattaatttgctactccgtatcaatttttaggaaacttacaaaccaatgcatcntaattcattcacgctatttaataaaggaagaagaatgtgggtcccacactccttctcacacctagtaatattgatttgcagtgaaatttcggggaaaaaaaatacatatcatgtgtcagatttcgattttattccaattttaaccacgaatcaatagtactggagaggagggtgcgagccatgtcctcttcccatattaattttttatacataaaaataaactagcggaaataaattaggaatttacgatacattaatatatatcgtccttttttttcaaatttgacaacaagtctataaaatttgcagaaaaaaggagtagttcttaaatgggagaggacgacgttaaaatgttgctctgtgatatcctacctcagcgccaacatctctggtgccaagatagtgggtccatacctgcaataagttttatagagggtatatttgtaaaatattttttctagctaaaagaactaaaatgcagccaaatacattatactatattcaataaaaagtactgtcggcccattctggaataactatcgctgtcgacgacggacaataactttgaccataaattact

SEQ ID NO: 41660 - DNA, 1219 bp, Oryza sativa
aaactcacagagccggtgtgaatatcatgtatgtcgttgcatagatcatccaattctattcgtattatacgtcacgattcctatgtcatgtaagcatgatttcaaatcattcttcacacatgctcatacatactactatggataccattataataatccataacaatcagttttacttttgaaaagaacatgccaactgaaaataaaggataatcgacattgctgatttcgtctgtcatcaattcctgcccaacttgagataaagctagacgataaatcgagctcgtgtttgaaggcctcattgtttggcttatgcttattcttataagacaaattttaaattttagaactttattttgaattggaccttttagtttgttatcgaattttattttacaacatttgcttttgagtcactaaaaacatgtatataaaatatttacacataaatattcttttatttggtaataagttattcggataagcacatgaataaacgatacaatgggatgtgtttatttatccacgggcacatatgtacaaattaaattggctctacccattgcaacacaccggcatcttttatagtttatctataaatataagcattaaagaatattaagtgccaccttaatcatatcacgttacaatttcttcttatctttaccccagccaacttcttaccatatccatccctcactgagggacagcaaggtctttttctctccgttctatatctctctaaatattgcatctgtcccaaaataagttcagttatcttccttctacctaccctggtccacaaaatcttcaatacccttgattactcatcaccaacactacttcctctttatcatattataagtcattttactttttctcaagtcaaactttatagagaaatatagtactattttcaacataaaaaaaacatattaccaaaatatatagttagtgttagatttaataaaattaatttgatattttagatgttgctaaacttttttataaacttgatcaaacttaataaattttgactaggaaaaaagtcaaacgatttataatatgaaacggagaaagtagaatataacaacctagaatcggatgttggacagatcctctgtccagatttatattattataatgagtattcgctctatcttaatttgcattctaagatctaaacataaatttattttggggcaaaggtagtaatatt

SEQ ID NO: 41661 - DNA, 674 bp, Oryza sativa
aaaaataaaaatgagtatatatatttatctcattgtttcgtccagaactaattataagctttaacacttgttaacaatcaaaacctaatttatgagtaatttttatatatgtatttttagtgacttagatctaatgctgaaaaataaactacgacaaaacaaagcatcaaaagaaactctaaaattaagttctataattaaaattttgcctgaaactcataagctaagaagtgaatgatagagctgtataattgatccatacaattatataataagataaaacaatagtactactaggaggcctcactagtgccgttgaccccttctgactagctggtgagccaagtggcgtgctggggcggcagtggcggaggcggtgcaaatcgggcactgttgagtggaggttgcaagatggggtgtcggggggaggaagatggaaggggttttagggtttgattatccttcatgaatctttaaacaatcggatggtctaaaatatacaagatgtctacaggggattttcttgtcaaatgatacctatatagtccctatttataatactacatacattcccatcctaagtagcaacattttgggacggattaagtacacacctttctcagtcgtaaccatgtatagtaagcacgggttccacactggcacactatacaatt

SEQ ID NO: 41662 - DNA, 599 bp, Oryza sativa
  unsure (1)..(599): unsure at all n locations
catttcaatggacaaatcgtgtgaaagagtaagttgcatttcaatctactttcttagtaaaaaactaattagcaaggcaaatgcagtcctttaattaacacacaatattttggcatgaactaatttgactcttcatgtcaataggaaaaagatgtacccccggttggaggacaggaaataccatcaggggaccacatggaaccgttacatgatgaagctttatcagagaactccaatgagctgcaacagtgcacaactagtgagagatcaagtacaatgatttctcctgctgccgctgacaacagtatgattactatggctgcaacatctgttgaaagtagtgtgtcagctgataaagtaagttgcttgtacttatttctttgatggtgaactttacccatacaacagtattgaatttgtaaaatatcaatgttgtatgccatgaatacaggtcagcccaattgaaggtcaggtgacagaagcttcagttgagcatgctcctgtggaaaaagatcagtgtgaagaaccaaacactacaatnggtgattcgggggactcatcagtatccttgaagaatgaagaactgcaggatcatgatc

SEQ ID NO: 41663 - DNA, 673 bp, Oryza sativa
acctatcttcgttggcaccctgaaaagagtctatttttaaaataagtttttctaaatatttatttgtaaaatgagtttcagagcaaggacaaaaagtaaaaaacaaaaaaaaaatctagatggactggtccagtgaagaagatggctccccaatccgagctgccatgtgtggatctgcaacgcaaagagtaggctggctgtagctgtaactagctgcacacagcagagtacaggacacatcatattacctctgcaggctggactactgccgctgcacaggctagtatagcggagaggggttacgtctaatcggggtcgctgaaatttgttgtttgtcatgcatactccatggatacacgagtcgcagttgtctactccagccagtgtaccgtgtgtatatggactggagactggaatctggactgcttgtgtgtaccgtgtgtataacggaggatcgatcggtcattgtgtcacggcaaatcctgcttcaccaaagatcttctgctgctgctgcttctctactcacaagatcaatccatatcgtccccgttaaaaaaaacattaaacaagtggtactactagtaaacattagaaagagtgggatcatttggtttggtgtcctagcaaatacctttggtaaattttggcatcaatccaaatatctacaatgtac

SEQ ID NO: 41664 - DNA, 588 bp, Oryza sativa
tgaagattaaaattgaaagggatatttcctaataccacgaatccggatatgctgctcattagcaacttaattttcctcctctccgacccgactacgctgcactatagcccctacatttacggttcttcttggtggacgcgagctgaccgatcgaccaagccgtaaacgtttttgcatccgacgtacagtacggggtatgttagatgcccttccaagtgtgtgtttcgactaagccatatcatattttcttatgttgcgctgcacattatatagtgtactggacactgttgtattatataggcacgtgcatctatgtacgtatgttatcaacttgtaatacaaatatattcaatatatgttatcacattgtaaattgtgtcattgggttatgcgattcctataaaattcctgcattttaaataatgctttgggttgattttgggtttcgtcatatcccaattgacattgctctctctctctctccatctggtggggttagtctcacatcggtaattgagtcttcggggccacacggacatcaagggtgatgtgacgggggagaatggggtactcctaatgggcgggtga

SEQ ID NO: 41665 - DNA, 802 bp, Oryza sativa
ctatagggcgaattcgagctcggtacccatcatataaaaacactatcgtgtacctctaccatctcaaattttggttatgtttgacatcaaacaaaatatgccatagatattgatcatattacatgactcggctcaatttgaaagagattattgagtggattattgctacggattatctacataatagtagagatatattaaatattttgataaacaaaattaacaatacttaataccagtgttctaaacaatatacaattaatataataaattttatttttgaaaaaaatattttttaatgcatggaacaaataatacatttcaataatctggtgaataatatacaaaataaataaaccacgttttaattatgaggctgcttgtctttgttctgggtagaaataaacgctttataactgaacagctagatggcatgcatgttgcttaattataaagcttgtagaaggccagaaaactatatacactcaagcataattaacacatctataccgcgataatcttgtacgtgctgtcacaataattcgctgtctaatctgcataataaatatataaacctattggcagtattgagagtttgtgactggtcgacaatgacaacacttcagaatgcttattattggactaccttgtcaatctttatgctatgtgcgtgcttattttgttgatcgccatgtttaggcaataggtacagctgccttacaaggatacgtacattacagtttaccacatagttatgttcgtttttttagttaggaactctacgcacggaaaacagagcgac

SEQ ID NO: 41666 - DNA, 627 bp, Oryza sativa
atatagaggatgacctaatctagtcataaagctctcacatgtgatcgacgaccagcgtagtctgctttggagcagtattgtattgaattgtttagatatgtcttagcgtgtcttcgtatatcccctctcctcctagggtcttgtatttatactcttaagcgtcccttttcaagtagaactagggagccaagtatgaatacgatccgagtataccttgcagtgactaagtaagattttgtttctcttttcttatccggaacaccttccgtatatgaagctttttttttataggacttgtattaggtgggccccactgagtctaacacaaaagtattagagattggtttggttcgtggcttaacttgaccttaccaatttttgtcaatgccaaattttcacaagtttttgcatgtttactcttggcaagacaaagttctatttagattgaagccaaaatagcctaaattaactattgaaatggcctatttttctaggcttttgtcaaaatttggcttcaaaccaaatagacactaaacactattaaaattaccaaatattggtaagaccaatttaggctgcaaaccaaactagccctagatatgccttatccaaggcagtaacaatcat

SEQ ID NO: 41667 - DNA, 704 bp, Oryza sativa
ttaatataataaattttatttttgaaaaaaatattttttaatgcatggaacaaataatacatttcaataatctggtgaataatatacaaaataaataaaccacgttttaattatgaggctgcttgtctttgttctgggtagaaataaacgctttataactgaacagctagatggcatgcatgttgcttaattataaagcttgtagaaggccagaaaactatatacactcaagcataattaacacatctataccgcgataatcttgtacgtgctgtcacaataattcgctgtctaatctgcataataaatatataaacctattggcagtattgagagtttgtgactggtcgacaatgacaacacttcagaatgcttattattggactaccttgtcaatctttatgctatgtgcgtgcttattttgttgatcgccatgtttaggcaataggtacagctgccttacaaggatacgtacattacagtttaccacatagttatgttcgtttttttagttaggaactctacgcacggaaaacagagcgacatattttcttattattaattaattatttacttttttaaaaaatatatattaatatgattttttaaaataactttcatatataaactttttttaaaaaaagcatcgtttagcattaagaaaagtgtgcacgcggaacacgagagaagtgagttggaaaaac

SEQ ID NO: 41668 - DNA, 4588 bp, Oryza sativa
ctcgagggaaatgggcttgcttcccacctgaaggaggataacctgggaaacctgtccattttgaactgagatcgcgtgaatctggatggtgaaacaaaatcttgtgtgactgaaagaagagaccctggtaaagggctcattttcatgatgtgctacactgaaattgtaggaactccatacatgttccctcgaaaaagaaacaattcaaatatgtttgtagctaatctgaggtgaggttagacctaacaaccggatcgaatatcccgtgacccttttggaatcgttcgtgcatgagaattaaggtcaatcaagtaaatataaaaggtaggtatcttcatgttaattaagcgtcaacttaagacgaaagctagtcatccacggcactaattcattacgattatgtaaacatcgctgtgtcatcttcttcttcgatcgaaaagtgtaagctatatttatatttgtaaaatcatgtacaccaagcaaggactgaaaagaaaaagatgcgatttctcatagatgaatatagccgcgagcacaagacactatacttttgtgctttcttttattaaaaaatggatcgcaatgtcaaattgtcaatgatcttttacaagtgatactcggacattgaaggactgtagttgcatgcatttggaggtacattgtgatcattctcagctgatttatacagggaaattgagctattgcatctgttgtgtcccatcatcacaagagaaaaaaaaattctactcctcacataaaaaaaaagagtattcaagatatttgtgggatggaaatataagaaccaagcctatcagatgggatgaatgatataaacaccaaaaaacgaaaacttttagcggaattaaaagctaccctcaaattcaatgaagttctgacgaaattctgtgtgagagccagatatgcaccggttataccgcacctatgttgctagtctgacaggatgactctcgatccatcaccagcaacactctctcgaggcattaagacacacttacacataaatcaagcaagaaatcatattcgagcacaagtttttccacaacttaactcaacattaccacacaatagtattatatacgtatagtaattatctagaagttataaatatgaagtaatcatgagtatccaaacaaacaacttgaaaccaactttaatacagagctagtcgactagaccgtcgggttggctagtctaaccgcacactacccaccggtctaactggctctacacatagcaccactttgcaaataaatatcaaaaaagaaaaaccaattatctcacaaatcaattgttcatcatcaaataataattggaacactttaatttcacaattcacgcctataattaaatacctatttaatatatataattggtgcagagtttggaattctacttctaccttaagaaatgtgagtagtatgtaagttaattgggaagcgcatacgtgtgagaaccaagaggttactggatcgaaacatggttgctatcttttttttccccacctagtaagttaattgggaagcgtgtacgtgtgagaaccaagaggttactggatcgaacacatggttgctatctgtttttttcccccacctagtacgatcttgatgctcatccatcggttagcacgaatcgctcatccatcggttagtacgaatctttacgcataccagatagaaaaatattggatagaaaaatcacacggcaaatccctagcaaaattggcttttgtaatcatgaaaacatgttgattcagccggtactatcaagaaaacctcccaaaatggagtatcaaataggaaaaggctatacgtactaactttttcttactaaattcttactaacactgatatgtcatgctacgagtgcatctagattttttgtaacttccatctacttaaatcaaacggttgagatgattgttagtaaaagtttagtaagaaaaatttagtacgtgtagcattgctctatcaaatactagtactacctccatattttaatgtatgacaccgttgattttttttcaacatttgaccattcgtcttattcaaaaaatttatgtgattatcatttattttaatgtggcttgattcatcatcaaatgtttttttaagcatgacataaatattttcatatttacacaaaaattttgaataaaacgaatggtcaaacgttagtcgaaaagtcaacagcgtcatacattaaaatacggagggagttctatgctagtagttaattaattttacagcaccaaacaacaatgttacttcctcctctctgttctttatacctgtaacaataatagcaacaatagtacggagtaatatataaactcccctatgtatgtatatgtggatgtggcgctgcgattgggcgcaagtcggcgtcggtgacggcgacgcggcgggggatcccgcggagaaagatccttctttctggtattcttgtgtgggaggaccggaggaggagagcccaagggaatccgacccaaacgatgccacgtcaggcgtgggcccccaccccaccccaccgtaaaaccaatggcaccgagaaaacgaccccaccccgccggcgcgcggggaccacctggcagccactcccacgacccacacacggccggattgatttctggtgcgcgggtgcgcgtccgcgtcacgcgtgacggcgcggcgctggcgctccagcccggagggtggtggagatcacgtcactgacgtgcggggcagggtgttcgtgtgggacccacatgtcagggatgtgggtatattcggggcgatgggtgagggtagtattcttttggtgtggggattatgcgccgcgccgccgtgtgcgcgggtcgttgattcttccaagcggcttcctttgttttttcgtttttgtgcgatttttgctgttaggcccctgtacaagttgtagagcgtcggatttgctctttagtccctgaatttttgccagttgccctgttttcatttcttcttcttttttttttccctaacagacagaaacagaatgccatagctaataagtctgcgttcttttttcaactgaaaaaaatattttcctcgttatgttttttaaagtattaaatgatgatactctctcttcgccccaaagttttggtgcttatttttgtttttggacagtgtacgtacttattttcggacggagagagagtatgtttttctaaaaagctttttatataaaagtttctttcaaaaattgaataaactcatttctaaattttgtaatgacaaatactcaattatttatgtcaatgacttatcttattttacgtgcaactaaaatgttgaagattcaaacaaactaaaatatatactcgctcgtactcctcttatacaagaggcagtacaagcgtatattatactttctcttatacatgtatagctctatcaaactatcatactccatccatccataaaagttagacatattttacatttaagtttttctaaataaattattgctattcgtagtctttatgcatttaagacttaaatgaagagataaattaaatgtttgacgagaacccaaggagtcatctaaatattcattggttccatgcttgcattcactccttgattttgtaacatccaaaataatttaatttctcctaggtcttggtgacaaaaataatatgcgtaacttttgtggatggagggagtacagtataaaaatatatacatggttgaaaaaagtaaataaaatcaacacatcctagctatacgaatctagacaatattccaaataaatttctcagtactctatatatcccagtttgatcaccacataaggtttttaaggttttcccaacataatcatcctctaacaagcgcatcttatcctctaacaagcgcatctttgtttatctatgctaagagtaaatgaacatcattaaatgtactatatgcaaccaaccaaaattaatttctattggtccaactacatgcaatatttataactagatgcaatccacgaaacataaagcgacgttgctccttaaccgatgagaattaactacaggataatgaatgttttattgtccatagtctttgcgctttttgcttagagcaagtttaatagtagagccaactactagctccaaatcatctatagccaatttaatagctcattcatacaatagttacctataaatatatttatacaatagttacctataaatatatactccacctcttatgtactatagcattaatatgtagtctcacctcttatacacataatattttagagtttgtgctacactcctgtaactgactataaatctatagctcgttttttctctcttctttttatcttattcatatgtatttatagctgacttgcagcatgctattgtacttgctaatgtaagatgattaggcggaaagatcgtatcactcacttggaggagagccatcgagccaaaatggcatcttgtaataaagccctcacctaacacgataattacccacccgaggctcctgcgtcgtcctcctcttctcggctccatttttccccatcccgacatcgcatcaccgcctctctcttt

SEQ ID NO: 41669 - DNA, 541 bp, Oryza sativa
  unsure (1)..(541): unsure at all n locations
gaattcgagctcggtacccctattgtgctggcacgctcgatctcaaccgttcgttggttcatccatgatacatggcctcatcttttcgcttacacttatcagcaaaaatttgaaatttcaactgtaaattggagttggttttgagattttttttatcgtactccctccgtcccataatataagggattnntnggnnnnnctttnnggtttnaacctctnttgatgtttnattcctgtggactaaattctttttcctttattcatactaaaactaaaatacatgcccattcctcgccgataattgattgctactggtgtacactacagtagttatttaggggaatttctagtccagggttgcttcaatatgggaatttatctacagtaattttctcccattttcagttgcctagcccctctttagtttgcaaatttttttgtaaactttgcaatttcccttaccattaaccttttatacacacattacttttctatcacatcctattaattttaaccaaactttttaacttacttatgaact

SEQ ID NO: 41670 - DNA, 589 bp, Oryza sativa
tatagggcgaattcgagctcggtaccccccgtggagatccaaaaggttttttggtggtggttgttcgtctcggattatcttctggccgcaccgcacatcgggggcagctctgctctgtgagtcccctccgatcctttttgcttcgcgtcgcattattattattatttttttgcgtaattttggttgttgtgctttatcgcgtgagttggtaggtagtatcataaaaactatttaggagggttaatggttagagcctttgttgcctcaactcttgtaagggggcagtttctaaatgacatgtttgcataagagcccataccgggctctacctttgagcatgacctaagaagcacaaaacaagcattgagatcatgatcggcacagctaacaagcaactgaagtctgaagattaaacacaaaaactaacggtattttgcaaagcatattttcacgcgtcccttcattataaaaatgtattatttaccccccaacccccaccatacccctttcaaatataaccataaggagaaacagaaaactaacaatcactttgcaaagcagtacatagcccttaaacccatttttcatg

SEQ ID NO: 41671 - DNA, 617 bp, Oryza sativa
attctggaatagaaggagtataagagaattttggataatcataaaatgatgacacggtggggtcccacatccacgtcgggtggctgctaccgaccttgacctgccccagctcctcgggagtcgggaaggcaactccgcctcttcatccttcgccgccgccgccgccttcacgtgctccctctcctctgcgagtcggcggcgccgatctccatttgtcgaggcgagcagagcaggggagccgggaggggagggcatcctggtgaggtgagcatccacatcccctttctgatgaatcattcatctctctcccacctggagtagttttttttttgtctggaattcgctcgcgttcgttaaccctagctttctcttgtagatctggaagaagctctcctcttaattaacctgtgtaaaagtttgtttgttcccccaaaaagtttgctttctgggattactaccaggaggaggagaggggatagatagtctgtcagatgatgatgatgccgctgcgttgcctcttcgagctggcccgccgccggcctgatcgcgcggtgagaatctactcattttctttctttggatgaatcattcagctagaagcacgtcgctgtgtcttt

SEQ ID NO: 41672 - DNA, 581 bp, Oryza sativa
  unsure (1)..(581): unsure at all n locations
ttggcttgaaatattgtcataattatttttttacatttatgtaacatttatgttgcccaattatcatatagttctaaaaattcaaaaaaaatattaatctcaaacatattaaattaaatcatatatctacttaaaaatacacaactaatttgtattgttttcaattattttacatatgtagctttaaattagcattatattatcatcaagtgttatttgacacctaaaatatgatgtaaaattatttaaaataggaaaagtacgaattaccccctaactattacggtcgaccgaattaccgcataaacccgaaaactagacatttttcaccctcaattattaataccggatgaattacccccccccccctcccaaaaaaaaaatcaagccgaagtggttttggtcctacgtggtagtccagtctgcattttaaaaataaaatatgtggggcccacttgtcacactctataccctctcaatccctcctgtctcacctctatcttttcctctcttcttaatcccattccccagcctcactcttctcnctccaattgctgctggggccggccgcaagcacgccg

SEQ ID NO: 41673 - DNA, 827 bp, Oryza sativa
aaaccataatttaattcttagattcctgtgttgggtatagacaacggcgaccgatgacctagcttcttttaattcgttgttcattttgacagcgagattgtgaagtctaaaggcacggcattttccttcctagtgtttgtcgtctagtttttgcaagatcttgctttttaacaaaggtataatcgcaagaaaatgttttctaataaattaaggtagccattcaattcagcccccaaaaggaagtcatttgatttcttgtttacaccaccaacacattgatcttctatgatggccaaggtgccatgccatgaacatttgtttagagcatctcttaaagattagccaaatttcgctagccatatctctatttggctagcattaatcccaaaagatttatctcaacatttcttgcgaactcgaacaccctaggtcaaattctactctccatattagtggaacagatacatcagcctctcttagcatattctcccttttttttttctttggaaactaagtgacgactagtaagggaggatatatatagctacatttggaagctaagtgaagagatttagcatagcaaccaacataaaactccctccatcccattttaagtgtagttatagattgtcgtgtccaacgtttgaccgtccatcttatttaaaattttttatgattagttttttattgttattagatgataaaacatgaacaatgctttatacgtgacttatgtttttaatttattttttataaacttttcaaataagacggacagttaaacgttggacatggaaacccgcaaatgcatttaaaatgtgacatag

SEQ ID NO: 41674 - DNA, 1924 bp, Oryza sativa
atcttacttaaacaacaaagtgtaagaactttaatgcataaagtcaaatttcaaatctaatgtcgaactttaagtacacaatgtaaatgataaggataaataatattttctaaaatcataagttcaaaaaaaaatcatatttctgattttccaaactcctactaattagaattataatttttaatcttaaatgttagttctaaccaaaacttgatgattatattctggattttgatttcagctctttaaatattataatccttgttagttagtaaattttgttggcagtcccctcaaaaaattattttgcggctagtttgcttgtattattttaagtatcacatcttgttattttttccctccttgaaaacaatatagtcagcagaggggtgtaactagttcgacacttcgacacttcgatagagcttttacacttttgagagggagtatttgattttccattttaatttttatcttttctataaaatttttatagtacatctttttcatatatttttctaaatccgaacctctcggctataccattggaacaatactacgatgcctgcgaaaagctgtagcaaagcaaataattgttgtcacaccacagctatgctgttattcataaggtcgcaagatttgttcgcaacatatctccgatggcgcgtggccaaaagttttatcttttaaaataagtaactaaatgttttattaaaatctagacaacaatggtttgcaaaaaataaaagtttctaaattgagcaacgtaattagttctttttaatttactcgttgatagaagtacggcctactctctgtaccaaaatataggaatctggcactacattagacaccatctaatactacgaatctgaacagtacaaatctagataagagttatatccagatttatagtaatatgtaacatatgttacatgttacagtgtcaggttgctatatttagattgtatttaatctgggtactaggactgtatttagaagtagtagttgggaattttttattccacacggaaaacggtatctcaacaaactaaaaaacagtttagtatcatttttagcaactctactatagacaaaaaggtttacaacacataccgtttaataatttaggatgtgtgtacgtggaaaaggagagattaaaagttaagtaaaaagagaaaaaaacacagccaggataggacaaataaagtactccatccgtcccattttaagtacaaccataagtttctgtgtccaactttgatcgttcgtcttatttgaatttttttataattagtaatttttttgttataagatgataaacatgaatagtattttatgtgtgactcatgtttttaatttttttttaaattttttcaaataagatgaatgatgaaaattgggcatggaaaacaatggctgcatttcaaatgggagggagtccgttccataaaaaacgaatctagtgtatgtccagattcatagcactaggatgtatcacatccggtattatattgtttttatgggatggagggagtaatgtactaggctgaatttctaggctggcgaaattaaatcaggttttcacacatccgtcaatccgtcaggacaccgtgacagttggatcctgctcatctactacggacgtcacggactcacggtccattttgatcggtacatctagtgtgtatgcagtatgcacatgccaaacctttcaacgtgcaagaagccaaattaaggactcgaggatcgattgagtgcgagaaaaccaaatttttcacaggagaatcgatcgtgcacatgccaatgtcgtcgtttccctagccggggcttttcacaaagtcaatggcgcgtgtcagcaactcatcatatatactccctctatcccaaaataagtgcagttttgcactattcatgttcaacg

SEQ ID NO: 41675 - DNA, 1672 bp, Oryza sativa
ggtttttgatctagccctagtggatccccccttatttgaaatttttttatgattagtatttttattgctattagatgataaaatatgaatagtactttatgtgtgactaaatgtttttaattttttcacaaatttttcaaataagacggacggtcaaacgttgaacgtgaatagtgtaaaactgcacttattttgggacggaggtagtagtagagaccgtacgtattcatggactactagtactttatatggcctggtttgtcaaccaccacgttaccgctgtcgtgtgatctagctgcaggggagataatactcagtggacaggtcataacttgtgtgcatggagtatacacgaaaagcttatatgtgtatagaatgtgttcctaatctatacccttatagtatatctattcttcacctccatcccatctagccagggccgtctccagtattttggggcctcggggtgaaatgcaaagtggggccctataatttaagaaatcatgtctaatataaataaaacatattttcactcaattatatagatgcaatatgtgttctaatattatgaatttacgatatatcatttactagatcacggtttaatcttacccgtccgagcctccgaggtcgagctgttgagggtcgagtcaatgatgacgagcgggcgaggaggaggaaggcaggagctaggatacgagacaaggtagcaaggcaaagccgtcaccgctgccgctcgaagcgttggaatcacatgcagcaagttgtatcgctgccgcctcgatcatcgtgcatgcatggaattgggaatgacgtctcgtcgtctcgtctcttaaatcggcgtcacgcggaattagatagctcagcaaccaacatcaggacgaaaataacgatcgcacaacatcgtattgagtattgaatttgggcgatgaatttgggcagggcctagcattgttgatctacccattgggctattgcctattagctgatgttgtattgtattgctatacttgaagtgggccttcatatttatatgggggcccaaaaaatcgggggccctgtgcgggtacctatatggcatatggccatcgacgggcctgcaatgttcgacgatattttgtacattttttttataaatgaaagaaatgaagtgtgtcaaagtattaatttcgggaatggtgacataataacgaaattggtgattaattatcactaataacacaacctggcgtacatggcgtatacgtatgaatattatgagacacttgccgtcggctgctctagtatatacgtactcacgacattttgatatagcgtgatcgatccaatttcatggttggctgatggaaggaaaaaggtgtgaatgttttcatgggaatggaagcatatgccactgtagcactgtcattagaggaagttaatcacatcatttgccggccgttaatctctcacgtcatatgcatggaaaccacgtacatgcttgcatggaaaccaaggaaatcaaaagggcaagatagctctatatgaaagtttctttctatgagcagtgcgtgagcgtataagtatacaaggaaaattgatccatatcacgtcagattggaaacgaaacagataatagcagcaagcacttgagatttcacatggaaatactactctccgtatcaccatagaa

SEQ ID NO: 41676 - DNA, 3797 bp, Oryza sativa
aaaaccagagtaggaaatcggatgaaccagggtgctgaaccaaattggaccatccattcatgaataaacaactcagccaaaccggatcagatagagagaataacacatgaggattggaggcatcagatccacgacaaatggaacaataattaggtgctcaaataccatgattatctgcagttttttaacaagcacataaacatgccactacttgaacccaaattgtgtccgtatcattttcgatcttcttcaatttgggtatacaataactgatgggtgtacactttaaacttgtagtaaaggaacagaacaaagacatgccattgaggataccaataactcagtaaaatatatcagtttgatcgtgtgtagggatcacggtatgttttagtagcaattgaaaagtccataacacacctggtcagtgaattgaagaggattgaagtggcatttacacaaatcgctggtcagtgcgcggaggcgtaatagcatcgacaccgagccgttgtcgaggggtcaatcggtgccgacggcagcggcgatccagtttgcagcttttaggctgggtgagtgcgagggaaggcgagggccagtcgtccacagcgggttcaggcggggcaatggtgaggcagagcgcagtgggcggctatgccgaggggaagcgcggttaccggttaaggaaaggcggagctagcgtagacgggagaggggaagcgacggcggtaggagcgtggttgccggcaaggaaggcgatgggtcaatccacagcggcgatggcaacgtggagcgccgttaccgattaaaggggaggtggaggcggagtgcgtgcgcgagcgtgagcgctaggggtgggaccgaaggaggattgcctgtttccttcggagaatccaaaactcaatcccatgcgttaattcgagtggatcggacgggtagatcaagttgctctattagggcaagtattatgagccccttatcactaattccaagatgccatatagaatcatatgatgatatggagcagaggagaagagagagaggagcagccacccctcatacaagggacaacctccacaccaatttcaagaaataagagagaaagagagaagttgattggtagtaaatgtattgggtttagtgtaaggagatgcaatctattgtatgtattacctctaaattaatatgtagatgatttagacaaaattagatgtgaccactacctctatcatgaaacttgcccttatagtatagataaaagaaactttaatgttacgtggccattagagaagtgtcaactttgggatgttggcatgagaatcttcagtagattaactcctataagtttaagtttaagcaactccataaaacttaatacacatcttgaaccaatatgaactgcaatacaacagaaatcaccaagttacaaaatctaaacaaattacaggaacaggctctaggttcttgctagtaagtggaaacaaagaacgatcacaatattccaccacatttgtcacccgggacaataatcaaactgattgattattctcctggagtcctgggcgacaaatggacacacacatatcacaaatgacacgttaccaaagtgaagtgattattcagatttcatccactagacagagaacatatagtcacatgttcccagcaaacacaaaaagacacaaggtgtcactgtacagaaccaaggacgaaggtgtccataaaacacctagacatgcttacattgtcattaattaacaagccaagatatatcaggcacacgaggcaacacaacacctactaggactgacatatatagcttcataggcaaaggtagttagtcatccaaaactcggtaaaatcaccaagcatagctctcacaaccaccataatcaaatactatagggtcattcatcattggggcaacagttctgccgtcaataagcaaaacaaaagccaatttgttaatgacataggcaaacggaaacatcacaagatgagcaacgagtcaccgatataaattcatgccatagtcatatggtcagcaaagttaggccaaatccccataattacacatcataaaccaaaatgcaggacatgcgtgttcacattatttcgcttacaagaggtgatatagtcactctatgttatgtcaggaagcaaaaccgagcttttaaataatactactcaaatatgcaccttcatgaagaaacattaagaaaatacacaatacaaatttaccacccaacatcctatagcaatgttaggactacagtttatgcagtacgcagaacggcatgagaataaattaagcaaactgttattatttactcgttctatcccaaaatataataaattgtagcactcaaaatttgtcccaaatataacaacttctctacctatattctcttctcaaccgatcaaaatcttccgccattcaaattattcatccactttctcgtcaaccagtcacaaccttcccccatttaattctaccaatctatctatctatctattatatactaaaagtccattaaacgtcctataaacactcctaagttgccatatggcgctctaataaattataaaaaatcttagaaattctgagaaaaaaaaaacatctagccctcgattttacttaatacggtggacccattatgctacaccactagattatacagatcaattttaaaaagacaaaaaaacccaaaacccatcccgtggatctccacctccaccccggcccctccatccaggcctcctcttcacacgtacgtacacgcctaagtatgtacattccccatctagcctacacctatattttctcctttccttccttccatattccggttttctagctagctagcaaaatttaatacaaaagaattcaataattagctagctatataattataaattcaaagaatatattagattttagtttaatacatactcaacgttaccatctcatcgattttagatgatgtttaacagagcttgtaatgtattatagatagatcctcatgtatgtggcaatgggcttatatacctttagggtaagaacataagtccgtttattttctttctgcacaaaccaattaaaaggttaatcatctctagatatgagcattaacatgccacgaacatatttgtcctgcatatatacacaatgattaactttaagattcatttagattttatgatataccaaggtatggaaaataggactaactaaacttgatcaagagtgtgaacacaacacatgacaattttcataggtgcaaccaccatatctcagtatctacagaagtttcgtaacatggggcacaatgatcaggagttaaacgtatactagatgcacacaaaaaaatattacaaatttatcttgaaagaatttattgagtcttttgaacacaaatatttttagggttgttttggaattgaaagtgcatctaggcccctaatgattttggtgattaataacaatgcgattagagacgactaacattttcgtttgagtagatgtgaggattgttagttctcggcgcaccatgtttccatgccaaactcgataatagctacaaatccaagcgatgcggcatatgagcaaagggtatattgtacattttaatttctttgtgtctttaagaaagccgtactattagggggggtgatgcattgatgatgagtgatgtgggtgctcaaaaatcaatttttcaaagtgtttcttctcattttctctgttctggaattttctggagttgtctgaaacaggttttcagaatttccaaaaatttacagaa

SEQ ID NO: 41677 - DNA, 3708 bp, Oryza sativa
ttgcctttttttgggacggagggagtaaacgttgttatatgttaggacggagagagtagcattttaaattttatgcacaattttagaaacgttaggagtatatttttgtcattttggttgctaagctcttcgtgtagaaccgttaaagaccagaagcggaattttttttggttgttttgttcgcgtgtcttggccgtacgcaagtcatcctgaaaattcttaaacccgggcgactggcgcggaggagcccgatcaggcgctccccctgcgactatgcgagcccctcccccacgcgctgcatgcaggccctccgcgtctttgctcctatctgtcattgcaacaaatcacccacatattttggaaaccctctattaaggtaatttggtttattttttgttcaaccaaaaatgtttcacctagtgtactcacaatgtttcactatgtatagatctaatattgcagtgaactgaaatattccattgcaacaaaaaaacccacatattttggaaaccccctattaagagaattcggttcattttttgttccaccgaaaaatgtttcacctagtgtacttataatatttcaccatgtatggatcaaatgttgcagtgaactgaaatattctttcactatttgctgaaacattgtttttatataaggtaaaacaatacccgatttaaacgagtgaaacattttcgatctactcagtaaaacaattccgatatacctggtgaaacatcgtgcaacatttaaaaataattcaataataatttttaaaaaaatcgtcggaatatatccatatgtgattttgttttgaagatttaattgcaacgaatgtaatggtaatcggatcatgatttggataagtaatttaagagaaaaatcagtttaaaagtagttttgcacgtaaatcggacgctgacatcagcatccagtttttctccaaatcgatcgggagcccgacctgtagactcgtccaagtcatcctattaaaaacaagtaaagttgagtatcgtaaatttgttgtactaaaaacactatcattgctattggtcaaaccgactcagtgccaacaactactacctctgtttgagattacaaatattttggctttggcgtaaaactacaattaaatttatatttaaatattagtttatctacaacaacaaattattttcattaaatttataattaaatatatttttatcgtgtatattgtgttgaatatgttattatttttttaataaactttggtcaaacttaaggctgtttgactttgagcaaaatcaaaatgacttataatctaaaacggagggattttcttaaaaaaaattgaatcgtgccattatatatatatatgggatgtgcttcgactagtttttttcataccgtattttcttataaaccaaaatatcgctcgctatttcttctctccacctcgatgacttgtgtgccctagcatcatcccttgcgtctctcctgttcgcctggatctggtggtgatgaggaccaatacgtaaacaagaaaccttcaagtagagcacaatatttcaacaatggcggtggtgaggactgtgaacccaaacacgtcggtggccccctccaacccttttctcacacgaccaactatgcgagacatcagtggaccacgatagttttgagaggcatctgcgacaggtcaacagcaacatccacaagatctagacgagtgagggtgttgtcatccgatactcaatcttgaccttcatcgaccgtcgagaatcgcctcgcctctctggtgacatgaggtgtgtgcgtcaccatcaatgctttcttcccactctcgatgagatccttgtcaaatccggcacatcctcatccgtgacgtttgcgaagcccgcaaggaaaagcttgacgacaccattgacatctcgtagttccttcttgccgtcaacgagctcgtgcaagggcttcaacccaaatgacacagcttccctagccttcatctccctcgctgatgaggtcactgcagcctcatcctctcaatgtccgcgctgcatagccatggcccatcgacgccgcctcctctagccactggtagccttgagaatagaggagccaaggagagaggtgaagagacggggaagagagaagtgaggggggatggaggacgaagatggaactgatcggtgagtcccatgtgcagattgtgtatttttgtccatccaaaaatacaatagagaaaaacgattcaaaacatgtgatacctacaaatgacgttatgcaattttgaaggtattgtaatcaattggttacatataggtgaatattagtgacattttttaatacaataaatttataatggcatgatcaaatttatcgaaaatatttgctaatgtcatttcgacataaaatggaaactccaatttacatttttttggactttctgatccgcttaaagatttgtgcactacggtattcttctctcgctctgacgagcttaattattgatattcgatgacgacagcggtggctctaaccagttaggtatcggggtttggggttggagagggtctgcaatagtccctccattctaaaatgacttaatatttgccttatcttgtttgtttcaaaataacttacctatcatcggcaagccaaacgagttttgttccttcaatacactttaccaatcttcaacttatttttcaccactactatttttctattaataagttttttttttccctccttcatctattttgttttgcacactcaagactaagaatgaagttatcttcagacagagagagtatagacgtaaggatagacttaaattatttgtctgacctacggagattcagcttctagcaccggccaaatcaaagctagccctcgctttaaagaaaaaaaaaaggagagtattggctggtggatgtcgaccacctcaatttgtgttttttttctgggacaccttaatttgtgttttgaaaccaatcttgggtgatttaactcggtcctactatgctaggactgattatacataccatgtgcagagttcaatattagaaacagataatcagatagtattggaccagagaaatctaaacgttgtaaaatgcctccgttaatctagcattaatgaagggatgtacttcgagtgttaatattactccatataataacaacattacaacactataaaattattttatttacaaaaagtagttattgagtgtgcgtgcgttgtactgtgtaattctaaaaaaaatcaccgcaagatttgaagggaatttgactatttgccacttttaaattaggcaattattcaaatactcttctaggtgtgcagttactttttttccctctaaagaggtggcctcttaactatttgccacttaattttaaccataaggcatgccaacgtggcaacctagggtgaaaaatggcatggggcccacccgtcagtttatccctccctttcatctctcccatgcacgtccatggcccccgtcgacaccggcaccaccccgctgctccatcgtgcccgcaccacgtcgatgtcggcatcgcctcgtaaccgaccaccgccggaaccgcctaacagctgacgccgagagccctgtcaccgcctagctggcattgcttcgcagccgagagctaagcaccgcagcaccactgttgttggaggaggaggacgaggagaggcaggagctaatggaggatgac

SEQ ID NO: 41678 - DNA, 1594 bp, Oryza sativa
  unsure (1)..(1594): unsure at all n locations
cagtgggcagttccggcggtggtcagccatgaggtggcgctggcatagacaaggtgcatatgtgatgaatcagggcggtgccagcgttgatgggagccacagacacacatgggagagatgaaggggaggagagactgacgggtgggtcccacgccgtttttcaccgtaggttgccacattgccatgccatgtaggcaaaagtgacgaatagttaagagaccacatcttaaagaagggaaagaaataattgcaaacctaaaaatgacatttggataattgccaaacctaaaaatggtaaatagttaaattccccaagatttgatggtggttggtgaagaaaaggaagtttaatttcattttactttgtaattttctaagaaacgcagtacaaatgtagacgcttataacgtgcacacactcatctctagaaatgcgcgcgcgcagacacactctatccctatagcatcttcggaagactagactagcatattttcagattaacaaatcgccacgccacgaacgtctcactgttaatgggtacatcgcttactattcatcaccatgagcgtctcgttatcgataggtacgtcacctaccgctgaaagaactatgacttgaacccatgtggattaattccaccacaataaatctaactggttgagctacgctcatttcacttgtaatttcatttttttagtgttagaaaaatgaaagtttcattttaatcataaattaatgaattgtacaaaatgtatattaagtttcagaattagaaatgggtattaaaaaaatagtggaattaaatagaagaatgctatgattggttaagaacacaacttacggttataattagttaacaagataatataggtgaataatgcttatacttagaaatttttaggatcatggaggtagttaatggtagggcatagcagatgcacgtgaaatctggtaggcctagtgcacggaactacgtgcaccgggagctaaggcaaagattaattaagtaaggttgctatacttaatcgcattgaaaggtgttgttatccaatttgatggttcccagctgcacgttgaagctaattatgacgctatcatgggttggaggattattaatttacgaatggccaatcttgaatagtagaacttttgggagcaacgtcgtacactcatcaactgtaattaaattatataatccgtagtagcagttgagtggaaaatgaggtacagcgggaaattttatatatcttttaaaccatttgaaataaaatttccaaaatatatttttaaaagaataacttttactcttgcaaatattggagaggctctaattaaaaaatggcatgacaatataattaaccttactaccttaataacgctgtcattgcatccttatcactgccatgtcacattcttttagcccccgtgcggtaacattatttgttatgctaagtatactgataaggtttatttttacaactatataattttttttaagaaaaacactctagagctgctatattcttatgtattccacttgactttatgtttttgacatggcaatcaaagtccaacaaagggcgggncgcaggaa

SEQ ID NO: 41679 - DNA, 806 bp, Oryza sativa
tgtatcatggagaagacttcccagtaagctccatactgaggctgcaaaaccattcataataacctatataagtgaaaatagttaataaaataaatattttggtcaaaaatctatttacctcttccttaattcacgtgcaactgcaacattaggatcaaactgcaccctactgaagcatgtagtgtgcaggctatggtctgaaataaaaggtacaacaattatattacataattttgttgatcataagatcgatgaacataaaattaacaaggacacatcagcttaccttcttcacgctttgctctaagcattgttgctacaatgataggttgctcattagagcatctcgcccatttagttaaatggtcggtaagcattttatccttaataactaacatcacaggtttgaaactacataaaaataaacatgtcaaatgcaaatagtgataagaaattaaggtagaaacaaaaagacatgtaccccaaaaaaaaaaagtatgtgcatacctgccatcaattataagaatattcctatatgggatcctcttcttgtagccttccacaaagcctatagagcttacaaagatgaccattccaataacatctgcacatgtgaaaattgtgttaatagaacttctatttgtcacaaattaatatttgtttgggtggttagttgaactacttaccaacataaatgtcattatggtaagtaaactcgaaaacttgatcaagtggcataagcggagggagtaatggtaatatcttctcatgcatgtttgctatctcagtaatagtagtatcacgtg

SEQ ID NO: 41680 - DNA, 538 bp, Oryza sativa
tgtggcgctacgtagcgccaccgtatatatatatatatatacatacatacatacatatatatatatatatatgtatgtatgtatgtatgtatgtatgtactccctccccctattggataatccacgagctacccagttaatcggtttgaaaaataaaagacagaaaatatctttctttggctgcatggaggcacaacggaaacctgagttccggttttggtgcaaccgcattattcgaagtattaaatgttaatcatatccctaatttcaatttatatgcttaatttagtagtatatactgtttgtttagttagtagtagtatatactgtttttaaagttggttgtagtatatatatatatatatactgtttttcagaaagtattagtatatgcagtatttttttagcatttgtacatacttttttttaaagtagaagtatatactgtttatcaattcgtagtagcatattcttttctttaagctagtgtcggtatatactgttttttatttactagcagtatatactgtttttaaaa

SEQ ID NO: 41681 - DNA, 1967 bp, Oryza sativa
cgaacagcacgcctgacaggagactatcaaggatgctgcctgatatatagatcagtgctgtctctgcacggcttgatgatggtgggccgccgccgtcgccacagaccatatggcatatgcaggctggttgattgatcgacgctcgggaagtgccgcgatatcgatggacgatggcaccagaagcaagatctacgcatcaaaaaccaaactgtttgcaagtcatttttgggaatgaatgttttgttgctatggagatttaaacaggaaaaccaaagggaactcttcatctgcaataaaagcatataaaattggaaggattaaaccgtcgcctagtagatccgatgatccactgtcacctggtaatcacggtagcagtgccctgctgatggatcgataccgtattagagttggagcttgccgatggattcactgagaaggagacaccgccagggccggggtacgccttcgcctaggtggcccatgggcagcgttgtgtgctgccatcgccacctcgttctcgacgaagaggcgccggcgccgtctgccgaggcggagaggaggcgaatcggggggccctaatgggcgatcgatcgccctgggcgatcggatccggcccccctccccgtatactcctccctcctctcccctattccttctccccttctcctttctactacattagactacacaaaatattttgaaaaataaaagttagaaaaatttatgtatagaaatactatatataaaaaatttgaattcaaattcaaatttgaatcgggtatgtaaacttttgacttataaactttgggtctataaactttaggtgtataaactttagatgtatagaaatactatatatagaaaatatttgaattcaaatttaaatttgaattagatataattcaaattcaaatttgaatcgggtatataaactttaggtctataaactttaggtgtataaactttagatgtatagaaatactatatataaaaatatttgaattcaaattcaaatttgaatcggatatttgaattcaaattcaaatttgaaacgggtatataaacttttgacttataaactttagatctataaactttagatgtatagaaatactatatataaaaaatatttgaattcaaaattcaaatttgaattggatatataaacttttggtctctaaactttagatgtgtaaactttaggtgtataagctttaggtgtataaatttactaaaataggaaagtaatgcggtgccaaaaaagaaaaccaggtggagggagggagggtggagggagggagagggaggagggggaaaaatccgattgctatgggcgagcgctcgcccagtagcatttccgggcgaatcggtatgctggaagggtacgagagcaagcagatgccgtggaatttatatggacagtttgccgatccgattattgtgggataattatgggttatcacggttttatttctctcataataaaattgaaacgggtttactcatacgatccgatagcagggctcaatcgggtgctagctgggatgaacggtggattggagcaggagtacgtacacctgagtgtatagaaccattttcctatatatatattagaaactactaccgggagtagctactccctccctatcctccctcaattcgatcactagcactagataatcctaatgactgttaacgggtctaatgaatcgaatactcccacccgtttttatttttctcggtggttaacttatcttctacagcagattcaaaaattgaacgtagcctccctagtttgtcgtagatgagatttgttcggagatgagctaacaaggagaaaattgcatatctaccatcgcataagtttggattcgctgaaataccatcccttaatcaggcttcgctagaataccatcctcaaccaggacatctttgctaaaataccatctcagacaaaaatacccctg

SEQ ID NO: 41682 - DNA, 4136 bp, Oryza sativa
gatatgcaattttctcgctaacaagagatatatccaggtggttttttcgcacttatgtttgtttatccacagcgagaaagcaggatatttctcccgtcgtgaaggaagagcggaacattatcgatctaaaatcgttctctgcgtttggatggttcataaccgaattgagctcagattagtagcctcaccggcggctgtgttgcagataacgatgaaagctctagcatatggagaattccagttctaaggtttgctgcttattttccatcttttggattcttttcttgatcgtttctgttcctaattcgttttctttatattttgcatttgcagtcctgcagcaggtgcgaatgtatcaggtggtggtggctctcgtttatgttttcaccagaaacgatcaggctggacgataagaagtcatgttctgctcccagttctgccgttcgccatgttctgctacatctctaaacccaaatacaaacagaagcagaaactaccaaatctgccacatgttctggtcctcagaaatcagagagcagatcatgctctgctccaaagcagtgcatgtccatctctaaacccaaaaaaagaagtgatgttctgctcccagttctgtgccatgatctgctacatctctaaacccaaatacaaacacaagcagaaactacgatccatgttctgctacatccgcagaagaagcagaagaacttgtactgctccaattcacggattcgtccgacaaaaaactacaccacagactcgaggcatattctgctctcagttcacacgacagtcagcaactacgaaacaaaaagatggggcatagcggacaaagatgacaacagagaatttggataacacaataagctaaaatagctaaaaaaaacgaaggaaaacttcttatttttatttcactccaacgagcagaagttacagaaaactcaactcaaatattagtcgcgtttctctcatagaaaatatcatacaagactatagatagttcgtacgtctaatcaacgatcatgcagaaagcaagccattattccatatgatctgctcattaaacaactggctaaatgttctccttggttacatgttcgatcggaacaacttctgcggcgccgggggtgctccgcagcttctgaaattcatgttgcaagctgcgtgactatttctagaaatggatgtcaaatttctggagagagcgattcatcacttcactcctgtcaccagtagccatgcaatgcacagttgcacaaaaccattcctgaccaaagaacgcaacacatagtcagaaccaaacacacaaacaagaggaaaattataaagagcacatcaaccaattcgaatcttcgatatgtaccaatcagttgatgagttctgcacacactcgtgtccattcaaacagacctccgtgctcccgcaccgcccgcttgtgctgagcaaaagaattcgtcggcaaggatcagcctttcgccaccgccggcttctgctgcatgtcaccactcgccgagacgccgacgcggttccaccttcttccaccgtcggcttgtggtgctcgcctgaactcgccggcgaggacgcaccaacggctaccgccgccttctgcatgcgacatcatgtgtcgacgaggttccgccttctgtcgccgcggaaggcgatgcaacagaactcgccgacgagtttctgccctctacccccaaaagattctgctccatcaaatttctgcagaactgatctgcttctgctcacaaattcctcctcttctgacctacctcgccgccgttttaaatagatatcccggtaacaacctcaatactaacaacttccctaatcaaacggccttgcatgcgtgcagattagcaagccttgcatgcagaactttcaaatggccttgcatgcagaacatagcgccacgaagaccgcgcagtgaacatatttttgcaaaataagaaaaatcaatatttgattttctgccacagtgggttagtggataccttctctcctaacatgagtggggcgagacccacaacccgataggaggtggacaggtgttggatggctactataggaggtggacaggtgttggatggccataagctcgaaggtgcaataggcttggctcgagcctatgtcgagctcaagcttggacagacgagctcgctcgaagctcgttgacagccctactctagggttgcgagagagggagagaagggtcgcgcgtgtaagcggaagagagggtcaagggaggagctacggccgcgcgggtgtggagtgggaaagggagagaaggttggagcaatccaaggcgttggatctacgagaaacgatcttgacctatcaatgaggaacgaggagtgtagcactctgttcgtaatttaaataacaggatagatgtgatttgagggagactatattcctttttctgttgcaatgtacatgcacttaactagtgttcaaaaaattgggtgcatactgaaatgacccgatatggtccatactccatagcctaatgatggcccgatttgtgtgcattggctggaacttaattaggaatcgggcatataattgtttcctcaaaggccgatatagtcatctccaagttgtacatggaccggaccgataaaaaaaccgtgccggcccatgagcaaggaaacgtatagcaatgtgtaaatctccacggtgatataaacaaaattgtttcgtctgtgagtatttctttttcttttaatcgtttcctccatgaattgcttccatctatttgcgtgataaactcaaagtcccatcgtttcacttatgcttatacttataagctaaaatttaaatttaaaaacttaattttaaaattaaattagtggtgttcttctcataatttattttacatcatttggtttttaatcgctaagaatgcgtacacaaatgtttttcaataattttattttacacaagcgaatgtttttgccctaaaatataagtatagattaagtgaaacgatggggacaaaaatttgacggaaaaaatacaaattatgacgagtttacgacagataactccattagtttttttgtcgggtccatacacactcaaacatgcacctactatcaacctagctagtaaaacaaccttcagttggcttcattcgtttggattttacacgatgcccaaatgaccccatttttggccgatagctagttaagaaactcaggtatcgtaccacttgttccctcacatgccgatatatatggcattttcgaattgtaaataccagagcaaggcggcctatccgcctatgaggtaagagctcactattcgcacttcctccgatcaaatatttacatttacactagctaaaacccatgcattgcaacagatattacaaaagataaaagcaaaagaaaaattacaagtttctagcatatttagttgattatgcatataatgacatatccaaagcaaaagcattcacgtgtggggactttatgacctgacctcgcatgtcagcttgtgttgaaggcggactcgaccaccactagcttcatttaaagtagtatagatgtaaagtaaatttcacaaaattgtgagtattatagtcctagttatacaaaatcattgggtttaatttagcacgtgacacacaataactgtaggtattatagcatagccctaggtatcatggccatatagttttatataaccacatatttgaccaattatccttgatccacaattccataaagatgttattgtcataagtgcattaacggtctataaattattgagtaatgtgctacgttactgtacttacgcgataatgttactactgaatcatagtaattagttataattttcacagtaacgtaagtgatttgttcttacaaagtttgaacagagatatagaacaagcaaacaataacatttaatcacatagaatcaaatgatgaattgattaaaagagcttgcaatgaatcataaggttattggttcaactcttgatttttgccattttattttttagttttctctccaaagtgaattttctcagagggagagagggaataaaacaaagagaggcactgggaagaaaagagaacaaggcaacgggggcgccaacacgaagagaaacataaggggagata

SEQ ID NO: 41683 - DNA, 1397 bp, Oryza sativa
tggtttccgtgtccaacgtttgaccgttcgtcctatttgaaaaaaatatgaaaaaaaattaaaaagacaagtcacatataaaatattaatcatgttttatcatctaacaataatgaaaatacgaattataaaaaaatttcatataagacggacagtcaaaattggacacggaaacctagggtttgcctttttttgggacggagggagtagaccttaagatttgtcccaaaatataacaatttctctaccaacattctcttcccaaccaatcacaaccctctactattcgcttttttcatctacctccaccactcatccaattacaaccctccatcgttcacttctacctactttcttaataaccgtgtccaactctaaaactttttatatttagggaccgatggagtactaatactcctcccgaaatttaggggccatttggatgagtccctgtcacatcggatgtttggacactaattagaagtattaaatgtagactaatgataaaacccatctcagaactctagactaattcgtgagacaaattcattgagcctaattaatccatgattaacctatgtgatgctataataaatatgtgctaattataaattaattaggcttaaaaaatgtgtctcgcaaattagctcacacttatgcaattaattttaatattaatttatatttaataattttaattagtattaaacatctaatataacatggacttaaaatttagtcactatatcaaaacaccacgcttaaaattcaagtggttctaccccgctactacacctccacgtggttcggcacctgctggccgggccaccgtatctcgtggcctatagacccggcctacattgactatccaaccccaaaccgctttactttctcatcacttctcgtcccccttaattaatccctgattacgagccctcatttcctccccccgcatccgtccaccgatgccctcattcacccactcacccccatcccccatcccactgacagtgggccccacactcttctgtccccaccgctcagcgaaacaccgtaggcgcacacgtgaagggtacacaggaatgcgtcttctctgaattcctctcacaattcctcatctgcaaaggaggagacctcggagagccggaggtggtagctaatggtggtggaaagccaacccgctttgcgccatctcccactcgcctcccgctcccgatgccctcgcgccagccgccgccaccgccgccgcctccgccgcctcggcctgacgtcgcccgccgccgctcagtagctgtcgccgcggcggcgggggcggcgggggctggggccgtggcggtgctggtggtggtcgcgctgctgtggtggctgaggaggaggagggggaaggggaaggggga

SEQ ID NO: 41684 - DNA, 1189 bp, Oryza sativa
agcgccatacaatagttctctctctctctatatatatatatagatatagtaaatttgtttggtgctccatagtgcccgggcaccattgttgaaattgagtatatacctatatcaaatgagtatgaaaccttttcaattatttaggtattaacattaactactttactaactagttcaaagcaagtttgaactgaatttgaacttgtttttgttagattttgattctcggtatatagcatccatacatataattagttaggtatgtaatcatgaattgtgaaataaaattaaatttgagttgttttattgataggtatatgtatgaatcaaattcttataactaggtatatactcataatttgaaaattttgaaaaatttgagtgattttgagcatttgaaaccatggtgcccgggcaccatggtatatatatatatatgtatatatatatatatgtatatatatatatgtatatatatatatatattgcccgggctccaaggtataaaacacacaaaatctctcaattttttaagaaaatttaaattgtgagtatatacctagatatatgaatttgattcataccaatacctaacaacaaaataactcaaactcaactttatttcacaattcattattacatacctagccaattatatgtttggatgttactagttggatgcccatgcgttgcaatgggaaaaaaattagggcaacttaaatcttagcgagatgataagaaataatcagttcatcgcaacagaaaatattattttagcataaacaacaattacatctgatctaatgatctttacatattcagcaacagatacagtgaaatattgtgatacaaatataataaaacaacacataataattccagggattccaggggtatcaagaggagcaaagtttgaaaatctactgaaatatcaaaaagtataaacatgaacagtaaaatacatgtataccaaaatagagaacaaagcatggcaatatattccttacttgaagtccacaaaagcatgggcaacgtacaataatagctagatgtcatgtaaaccggtacagcgaggcatacatgtgtcaccacgaaatggtcccataatacagttacaacaccaatgcaacagagcattgaccatcatctagcaaacatgctacttctagcaagattaccacctacttct

SEQ ID NO: 41685 - DNA, 3541 bp, Oryza sativa
cccatcctaaatggcaaaaaataaatgttctgaaaaccaacaaagatgtgttgctacagcaaacgataaggattatacagaggcatataacttaaccatttgtagcaaggaattggaaacttataggatcaagcagaatgccattgattaaataatgtaaactactgtacgttcatgaagttctcttaactgttttgcaataggctcatgatcatcaaatcaagtgcaattcaggctgaaattcaagaaatccctgcaaactaaaacttttgaaacggtgaagtgaacgaaatctaaaaagcattatactcatctaaattacagcactgccattacctaaactacagcattacacctactacaactactacatatgaacatgaaaagggggagcattacacctactacagccactacatctgaacatgaaaaggggtttttgagttgtacctcgaatgagctatagaacaagatgacagtgagcctaggaggcagctaatgcagtgtgccaagcaaataatatatatagttgtagccgaaaatatttgaatatttgaagttttgaactccacccgccaagaatccaagcccgccatcctcttctcccagattgtgaccaaataataggtcgattttgtgctttccccatgaagagagaggtctactgccctaacccgtgctcctgtcataccagccagcagtactccttggtagtatcatctatcaagtcttaagagagggagagacatgccgtgtagaccactcttctccaatcagacctgctacatttccaatcaaaggagtgtgtgtggttagagagggggattgaatgcagcgaatcagacacctgctagatttccaatcaacggagggtgtggggtaaattgttagagatgggggattgaatggagcgtgcactggaatggatgagactgatcttaccttggattcagagagtgatgtagtactccgtagaggacttgtacgctcatggatcctgttgcaggcaagtactaccaatgtgacttgtgaggtccttcacagtacgacgacatggcctctggattcgattggtgcacgagtgctccgctgcgacgtggtccccacaatccgccgccgctccgagccctgcgcctccacgtcgcccttgtccgccaccgctccgccccactggcagccgccgacagcaaaggaagcgacgggcggaggacgggaggaggggcggagggaacgacgtcggctcggtagggggagcgcgctgctggccccgctgtcgcccttgctcgaccgggccatcgcctccgagatctccctcatccaaatcctgcaagcccacggaagagggaggggcgtcggctgggaaacgcgtgctggccggggaaggaggaagggggcgccggccggaggaagtggaacggcggcgctggccgggggaggaggagaagaagcgctgaggcgtggcggccgggggataaggagaagatgcgctggggctggcgatttttttcggtggcccttgtttttcgttttcttttttttttagcgcgatttgtagtcgtagaggacggtggatgatagactctgggaagggataaggaggagattttaagtttctttttattaaatgggtgtggcaatcgatgataaatataagttttgtaatggagtgatatcactatatttgtacgtatacaattcagttcaattataggctctcaattttaaattttaaatttggaatttattatatttgcaattttgaattttaattaatgttgtagtgggttctatatggactcttcttccattattacttaattttaattcagaattttatttatttctaattgcatttttatttgaactcttctttttctaattttggaaatatattttattttttattttaaattttaattaatcttatatcgtacagagagttgtacagcaatgtgggggtaatcttcgggactgtacgcaatgacttctcactttagcactggccgatggttttggtgtccttagcacttctttgctggctatcacgagggtccactgtttggcgcttaaaatttttgaactcaggtgtagcttctgtttctgtggaagatcttaggtgtttatttggcgtcgatactggagttgataggtctagatattgttcaatgtggtccaataatggttgcattcggtggttataacagttatccatggcaataaacaaggttgagagcggttacttagccattgcactggtttatacacatacttactattgcctcgtgcgctcgggtacgcgtctcattgagcacgtatttataggggagaggaggggggtccgggtgtggttactttggcctgcttttgtcgagcacgtgggcaagagagaggagaggggaaaatggagaggagggctggcgggggcttacttcgccggcggtcggggccgaaggtggcggagatcgaggtgcagcggcgagctattccaccggtgcaagtgacgggtggcgctgccgttggcgagggcgctggagcggttgtgcctaagcgttcctgtcgaggggaaaccttcctggcaggggtggccattgttttgcgctgggtgtgctccagtatgcgatttgtcggggcaaccatcttcaccatcttagcttggatggttcgcccgctggtcttgctctggaaatggtggcgagatctgatcgatgatggccactctgattacttatgcgaggcagtttgtctcttcattgtgttggcaccgattgtttttgtttctactcttaaagcgctactggagtagataatttatgaaatggttgccaagtcttggcatgtatcccttatgtatcaacttgcataatctctactttaatctttctacacatgtgcctgatttgtgttgcctgtgaatgtgggatttctagttttttctcaacattcttaggcgcttttaggtttggcatcctctttattcggcgggataatccattcttactcgataaatgatttaatgttagaagggcacttcggcgtaagggtgattatggacaaccatttctgaaccactaagtcatgggggcaagagattgcattactccatattcaattttcttttacaacaaggtaccaggtaatacatctctagaaaggggaagggaactactaatactggattgggtagtgccaaacagggcctatgcacatcccttctcatggagatggtgggggcgagaggggatcaacttccaacggacgcttccgacggatcctgcccatcctcccgctctcgatgtagcgggctatcgtgaacaccttgcagagaagtaaggttgtgtgctcttgagctaggcgccgatagcgggattccagatcggcatatcgatcccgaagttcatcaagttcttcaagagcttgctcgtaggcattctcggtggtgtgggctagctcggagagaagggtgcatctgctcccttcaggctctccagtcaggcggaggcggcaccggctgtcgtcttcttcgcggtacgggtgcatgcca

SEQ ID NO: 41686 - DNA, 3412 bp, Oryza sativa
gttccccgaagttcgaatccttgagtggattctactctctattgaggagcccacaaagagccgggtcttagctaacactttcctcaagagattgcataaaggacttttccttcgactagtggtatctcttccttttcggatgcgagatccgaccttcacaaacttctcttagccaaccacaagtagattagtggctcaagagtgacacctagccgtctaggagtcctgagcctccaagagtaaaagatggaacaaagatacctttgagatgaaactagtgctcaatgaatcttcaggaagtcaacaccaagcactcacacgaactcaaaaccacatctctcacacacacagtctgagctcaaggatcgatggagaggggaaatgagaaagcaatgctcaaagtggtctcaaagcaaagcaagccaagggcgaaaatatttgagatagcaccagcaaccttgacttggagagggtgggggtatttatagccacacccgcaaatctgcccgttagtgggtaaagattcccttttttggaaatttccgaaagcaccttcggaaacttccgaaaaacaccagtaacaaaattgacttgaacaacatagtttggatatttccgaggaacattcagaaattgaaaagaccctttagaaaattctgaaaaacaccattaccgaaattggctttgcaacacagttcggaaatttccaaagcaccttcggaaaatccgaaaaagaccaatacccaaaatgaaagttcacatcacttcagaaatttccgaaacatccttcggaaatatccaaaaaacaccagtatcgtttttcgaaggcaaaaatacttcagaaacttccgaagttgatttcagagaactccgaaaaactccagaagcaattttaagaacaaaaaccacttcaataaagacttttgagcacttttctcatccctatagttcaaggaaccatccccttgatagtgcggctttcctattgacataaacgaataaaaaaatacattttaccatttgcatattgtgccgcatcacatcgctttctcatttcgtcctggttttgccttaatcatcacatcattgagagctaacattccttcacacatactcaaataaattgtaagtcctctctaatcgcattgttattaatcaccaaaataattaggggcctagatgcactttcaagaaatcaagcctcaccttacagttgtgagaagataaagataagttcatacaggtttgatgataaggtgaagaccgagaacggtttccaatcaagaaggggaggatgatgaaaacatcgccaccatcgatatgaccacatctaccttacatgtttaccaaccaaaggtgcatacattctatgtaatattcccatgttatatatatttgaacaaatgaaactacaccataagtttcgtgtgttctcattttacagaagtacttgcatggatgaagagagggagaccaagcagccagaatgcgtggatgatcatgattggcggccaaccaatattcttccccaagtctactcccacttcaccacgtcacttttggtccattaaagacgagagatgaagttctacatgttttggattcggattcggattcgggcttcctggcagcagtaacttcaaatagatctaaccgctgatccaaaaggactctcggggcacatgagtacttgttggaaaacatatgtaacctattttcagatggttttagtcccacatcaaaattcctcttgaattgtcgagaatcttcaaaacaagccacgtaccccatccaacccaagtctgatatgggacttggcccatgtaattatatcattgggtaagcccaaggggtggatgtcctagggctaaccctaagatgtccctaatcatatttattcagtaattgtcatagtttagagttgggtttgcttaaattattctgccatcatagtctcgccatttattggtttgtaaaaccccaactttaagttcttgattaatcattcatatgcaatcgagttattgcatttcttgttcttgtatgtgttcttcgattcacatgcaatgattagtatttttggtgaggttaatcgggttttggcagggttcataactagagaagacgtgatgctgcaattgcatggttcggattgtgttgataggaaatcaggtcgtgtgtgacaagttttcaccaaatcgatagttatattcacctgaccgaagattggacacccattgtcatcaaaagttacctgatttgtcaccagttaaaggagtaggaacgctcattgcttgcccatgtatcagctccgttctaacaaagtatgggccaaggcccaagccttttttttttttgccaaattttgcaactcaactatgagttttcaaagcaaaaatgtacagggtgtgttggttatttgccataacaaactattggtgttgccacaatgttaatattttgtttggttggtaaccaatttttggcactacattgccatcttttttcttgtttggctagtttttgcaagaacacgggacatagtcttgggtaacaaaccaaatgctagcgtagctactcttgccaattttttgtttaagaaatatattagaaatgcaagcaaccaaaacatatgcacactcacccatataaatacgtacacacacaacctacccttataagcaccatcgaaagaccagcatatattaagattgacgaaatcaccataagcgcctcactatcgacgggtacatcgcacaagaataattagccctaaatgcgaacactcttgccaagtctaaaactttaacctaaatgggcatgatccaccacaagaaacccaaccaaattgagctactcttacttcacactcttgccttttttttttttgcacctcgacagaaaatttagcaacagctaattcataccgataaaaaaggattagcaatgctactaatcaccacggacacctcatacatcacctaccactgatagaataactagacgtaaatgcgagtgctggtaagtctaaaacttaaaaccatattagcaggttacagcataaggaacccaaccaattaaactatgctcacttaacatacttgccaaattttttggtacaccttgaccaaaattttagcactagccaattcgtaccagtacaaaagaattggcaaggctacaaatggcaaagaaccaaattacaagcccatagtttggctaggcctgctcgctctgctaagtgcatgcgataaagtttatgcggcaaaagagaacacgctttgctagttactagtgtaaaaaccgtgacaacaatgaaatatcgatagctagggcagaaggtttttaaccaactcactattgaaaaagaaaagagaaatacgatccatccaaaaaatataagtaataataa

SEQ ID NO: 41687 - DNA, 611 bp, Oryza sativa
agggttgtaataatattagtgacattccaataagcctatatagagttgtaccatatggattaactgtgtcacgcgctttaagaacaccatagcaaagcaaacaactcatttagcggtagaagcctataagaatgtttgatgttaaaagagaaacaaacatatagagacaactggaatggcacggttgataaccttttctaatctattttttaatttataagtatacaatatttgaattcattatccctataaatgattatggtcgttttaacttcaagtaaaataagtggtttatctgtgtaatcatccgcctaaagcgcgaggtcgtccttcagcttattgaatatataattaaagatcctatttcactattatagaaacggttttaaagtggctaaaactgatcttcacataaggttggtcggcgacaattgaagattgaaatgcaaaaaagacttcaaattaaaatgttgtcaatcaacatcatagatctggtcaccacatacaatttttctatgaacttgtttaaatccgagttttatgacaaagttagtttcatatctgaaaccaacaactaatattgcgattatcattatatagttgccggctcg

SEQ ID NO: 41688 - DNA, 777 bp, Oryza sativa
cgcaataaattgattaaggacttttctttattagtaaaaacacagtttatcttctaaaattcataagtaattcatccgagctccgtttaagtccattcaagtctcagtaaatcaagaaaaatgcaaagaatccattaaaaatagttttgtttcctgtttcagtagtcttatagcatgttttgcttgtgtgctttgttcgtcgcgtaggtttcggccatttattgtttaccttatgccattgataacttgggtatcaaaatgactagatgttggtttaggaaatgcttagccatgcttagttcaattagcacacacatggggatcacattattacatagactttgactatgagcatagctttggattggtgccaccgcaatggtgttagttaattaaaatacattgaatggtgggttgtgggtgcatggttttgctggtcgcacccatggcaattaaggaccggttcacgggaaaccctgggagacttaccgtgcttaccacaagcgggagtgggtaactgcttgatctgaagtatagctcgaccctttcctaggcaccggtggcgagggtgggcgtgatggagttgggtcggccggggtgtccggttatccagctgccggattcaccgcggcgcaagaggggaccgcccactgccttttgaggggtgggggtgaaaccttagcgtggtgtggatggttaggggagggttatgtggagggtcttgtcacgatttccccctttgcagtatcatggtgatacttcggggcatggcgacat

SEQ ID NO: 41689 - DNA, 584 bp, Oryza sativa
atattaggtcggtttgttgggcgcctggaataatgagcacctcaaaagtagtttcatggttgaatatagtatattgttgtttgtcaacaaccttatgtgtttctcatatcaagcgctcgtgtccgccggcgcggctacgcggcagggacatgcgagcagcaagcggcgagcaagcagccagcaggcatgaagcaacaggcggaaggcaagcagcacaagcagcaacaagcaagtggcattcctcccgattcaatcctccctagtccctaatcaatccttgctctccttttttcagattctatgtatatctatcctccctgattcatatatgtgatttattgccgaaacttcattacttgaggtatttttcaatgcctattcttctatttaggcttgtttgcaaatggataatggagctgtacattatagcgcagctatgctgctataactgtgaatctgtggtgtacaaatattatactccctccatccctaaatgtttgacgccgttgactttttttaacatgtttaaccgttcgtcttattcaaaaaattgaagtaattattaattcttttcctattatttg

SEQ ID NO: 41690 - DNA, 765 bp, Oryza sativa
ctaagcaagatagtgataacttcagaaagatggtagatatgcgatataatctagattaataacaagatctaactttatcggctactctttatcaggaaaaactagccgattgcgagttagataacgcaactaacaaagattatgaagcatatatgataactcgacaaattacataaacaagattagtgtatcttaatgatggaagcactaatcccgacaacgcaagctgccatgacaagtttacctcttgttgaagatcgaaatcgatgcagctcaacccgagagcaagaactcgtcgaaaacaaacgaaagtaaaaccgggtggtgatgcgtcgagagttttattgaactgttgttgtcaattacatgggttcgggttataattataccctagatacatgataggtccttgccggacacgactcttatctctaacaaactctaagatacacataagtctttacagtagacttttgcccaatcatatctctaagaaaaccacttgaaatatcctaattaatagatacaattgcctatctgagagcttatctccatcgtggcaatcctttcgtagcacgttgatcgattgcagaaacggttttataaccatctcaataaaatcggttgtatcggctgtcctctgtccaatccatctcagccgatgtagacttcagctaatgctttgccgaatccacttcgattccaatgctgaacctgggtcataattaacaaatttgtttgtaacaaaggggaatcatgatattt

SEQ ID NO: 41691 - DNA, 1735 bp, Oryza sativa
ttacatcggataaatgagatgagtgtcggtttcatcaattctaatactttgcaatagcgagagtaatatgctagatcatgcctctagttgttttattttctcgcatgaatagatgtatttgtccggcctttgcgccgactcttctcttgttatatcgccgaccacaaagtttggcaccacgcgcccgaacgcgcttaccgtgcacacaagaaggtgcacatacataatccgttgaattgaacgatggagtgctatcccaaacgacgtcaccccatactcggtaacacacgacaccacccagaagttgtcgtctatctagctaatatagtcgttgatctatgaatatattaacacacttgtcatcaccgatcttatggatcagcgcgcttgggacactgttgattgtgacttgtatgttaatccgtcatattgctatctgtatgaagtagatggtaacaaatccgagtcatcggcacctgcatgcgccgccgctgccgcctgcacgtagcgacaccttgacgccaccgcatgacgtcttcccctttgtcaatgggtgccgaatcaatccagagactttccctcgtcaatccgccatctgaaacgccgactcgacggcctttcgagaccatctgcaacgcaattgacgggcttcgcccgtagcgacgccgaggagcttacgcccgcctcccctcgccgccagtatgcacggcatgcctcccgcactaccgcacgcggccgggacgagggtcgaagccgccgtgagcgcccgtcgccgatagccgtccgccataccagcctgtatgccgagccgagtttcgtcgacacgtaacatgaagctatgattgtcggatgccggtcacggcttgatgccaacgaatgccggtgtcggtgctactagatgttgcaccgccgttccgcctctgagcatggcaacttgctatagtcgtccatctctactaagggctcactagcacgtttgccattggttccatccgtcgtctccattgaagaatggcaattggatcatacctcacccacttcttgtgggagaaggtcgtaatagcccattgggcaacatatgagatgggctggccaggttttcaagctagccagtataaggaggtgggccaagtagaaattggcctattaaaaggagtcgggcacaaaccgtgattttggtccgaaaatggcattttatttgaaaagtccttggtttccaaggcattatgcggaactcagaaattatgcggaaaagtcctatgggacattagaaactacggggaatatacattcgccatttatactttgaaccttcatgagttgggtttacgccaaatagagaagaattaaggatttataccttagtcccgtatttctaagtatttgctttaactatttagttagtttcttgaataatcatagtcaatcctagaaacattgtttttaggcaaaagagcttctatgaacttgtgaaacctttgttttagcaccccttttggaagcatcatattttatggtttatttcctggtaattgtttatttggggtaattgattgttctgtgggttagtagttctgtaaattacacatacctttgaatagcagaaaatcatgttaattgctaggattgtaataaaaggtgtgtatagaaatttactattttgtactcgttttgtgcacttcatttactagaagtaaaccggtagaaagttgcataaaaggacatcatgtaagta

SEQ ID NO: 41692 - DNA, 2022 bp, Oryza sativa
tgcgtggcgtgccttccgcgcaacgccggcggcgcaagcgttctgtcgctctgctcaaggacgagcacgtcaacgcgttcctcgcagaattgccaactctcggctgaatattgggaaagttttctaaactctatatttttcccgtctctaacaacgtgtgtattatattatatatctaaatagttattaaaaagttttaaaatattgagcaatatatatataatctgtcacgctcattgtcacgctcatttcataagttatcgatatctataagttataaccaatgttctaaaagatatttataattactactagctccatccgtccaaaaatataataacttagtatattagaacgaaaggactagaaaataatgtccgtgcactgcatcggccagtattaggtaattaaagattaacatctgttaggtccacctgccaggcaacttgtttagaatagcttatttcttatatgccactacaacttcaactaaagtttttttaaaaaatatatatataaaaactttcccgtgtactaaaatgggtccatccacataacgtatattgcctacatatattcactcgtccccattttaatttttttttttgcgcggatcgtccccattttaatgattgaatcatatactgtaatcttgacgcgtcgaatgcaatcaaaaaaggaagacaagattcgtggaataagccaaacggcatattcgtaaacgagaagtaatttgtgaatacaaacttttatatacgtgttcttagcgatctaaaagcaaatgctgaaaaataaattttaatgagaaaacctcaaaatttgctttaaatttaaagttgaaaatttaaattttagctaataagtataagtataagagaaaagataataccataggaagtcgatggtagagagagagagagcatgttcatcaggaaactgagtaagacggtagcgtaaaataagaggaggtggttgttcaatggtagaggaagacagtgacaatacgagaatctaagctagagaaggtgacagggaaaggacgagaggtttagggaagcaaaatcacgaccagattagattaaacaaaaagattgtagtagcgtgttcggtgttcatgcacgatggatcgaacagtggcagctactgtattaatccataaatcaataaatcactagtactgttacttattgtccatgatgatgtgtgcatccgaactgccgatttattctctgtacatatgtatatgcatggcgtcatctatacctagtagaaaaaatgactgtgcattataacaggaagaaaagatgagaaaattgagaaaaagttgagaaaaatttacagtatgtaattaattaaaatacaaattttctgaaatacttgggtatttaataaagtaaacatgggaaataaaatgatatggctagatttaaattttattaagttctccttaattaattacactctttgagtttttttttgaaattttcaaagcttaattgctaattttaataatacaaatatcatttcaacatttatttaaataaaatacttcctttcactctgggccatttttagcccatttcctcccttagcctgcagccgagctggcccgctttcctcccttctcctcccctccgtcttacctcgcaagcacacatccggcccagtaagtaacctaaagtctaatttaccccctactcctcttctcaccaccgtgtgggccccaaccgaaagtctaacctaattgctttgtgttggacccaccggcgcacgcgttgcatagcaaagcagtgcttcggcccgacacaagattgatctgagccattcgttttgatggacggctcagatcagttccgaatgcatcaaaaccaccactgacgtcaaaaaagaccctaaccctagattcactttttcccaccgcccgccaccactccccgtgggccgcttcccttttcttaaactctccccatcagcggtgccactccccctacacaacaccactgacggcgctactccctctcg

SEQ ID NO: 41693 - DNA, 653 bp, Oryza sativa
aaggttataccatgccaatgggtaaaaagttctggaaaagaagagaggtatgactttgactttaccaaggctgataagatttttgacttgttacttcgggagaagcagattcaacttcctgctggtcatattatactatcggctgaggaacttggcaaaaggaggtattgcaagtggcataattatggttctcattctactaacgactgcaaagtttttagacagcaaatacaggtagccattgaagggggaaagattaaatttgatgactcaaagaagccgatgaaggtcgatggtaactctttcccggtcaatatggtacatagagccggtagaacagccgatggaagcaggagtaaaagtttttagatgaattcggctagaattattaacaagtatcagaggaaatatgacaagcagcaataggagaggtattatgaagaagacaatggcggttttgatcctcgttgggactgtgagtttttcagattttgctggaacgagggtatgaggctgccatctatcgaagattgtcctagatgcagtgatattgcagaaagttcaagccgatctcacaatagaagcaatcggctgaggttgacaagagttcctgttcatcaaagattgggcccagtaaatcaagatcatgatca

SEQ ID NO: 41694 - DNA, 1175 bp, Oryza sativa
atgctcgggacatagcatgtactcgtcgcaaactcgtaccctataaatatcttattctaaagcaatcctgtcgatcatatgacatgtagggcacacgaacgtaggtacgtatatatagtacagggctgggacaagaaagcatccaataatctacatcttatgctgagaagctacggattcaacgagcgagtgctagcgtacgtaagcatgcatgttttcttctactactacttaattaaatcagcattatctaaaaatatatatctgtatcaaaggatgcaagttaaatagactctttcatgactccggttaattatcgcagtcctcactcaacaaaagagtcatatatcatccgatcaatcatggatgtgtcgtaaattaattagccacactttatttaatgaattaagtctttcatctatcaaactacgctatttaacggagaaacattgcgtcttaagactgatcacatgactacaaaatttcatcgtatgccgataagtactgataaactattttatctgcaagattaagttaatgctgacccatgtgattacgttcgtacgtgagctagaaattaaaaaagcagagagaccagcattcttacaaagagtgtttaaacgctctctatctgcatacggtagcccctatataaacaaaccagttgtcgtccagcaataacgaacatcaaccaacacacaagaaaaaccaccagagcctctcttcatgcagatggcgccttccaagagcatcctcgtcgtcgtcttcgccctcttcgccgtcgccgcctcgctgcctccgtcggcggccgccagggacgcccaggtgttcaagcccaccgtcgccgtcgatgtcgtgcatcaggaacaacaacaacaacaacaacctgcagtgaacgccattgccgacgtcagccagccatctacatctctggttggattgccagggcttccgccactggcacctctttcgacgatccaaatcccaggacttccgccattgccgcaacttccgacgatccaaaatccagggctcccgccattgcaaccactttcagcaatccaaaatccggggcttcccccattgccgaacttccgacgattcaaatcccgggctcccgacattgaaaccggtttcgacatccaaatccaagggctccggcattgccgaaactt

SEQ ID NO: 41695 - DNA, 651 bp, Oryza sativa
aagatctagccgatgggtacttacttctgtgtactcggccgatggcgcgatggacggactggcggaggacgacatctctgcgggcggaagtctggccggaggggagattgcttcgaagtcgccttgtgcaccgaggggatcgccggagaaagagaacatgagatttggcttaagcggtgaaaacggaagtaacagtgtgaagtttctcggggacaagtatttaaagcagagcgataatggtcggaaaaatggcaagtgcgatattctctcggagatacgatatggcaaaaacgaaacattaccaaatattccggacttggggggcatgtgttaacaaccaaatttggtaatttcagtatcaaagacaaagataaaatcgaagtggaatccaagatagagatcgtcccgcaagcagagcaagaataagctaaagtccgaatcggctgtgaccaggatcgacagagtccgagctagacaaggtagcccattgagtaaaacccgacaatatgacatggcatacgttgtcgggttggggtaatgtgcttcatgaggattgccatgcatggatagagtcctgagaaggcaattgtatctataaatacgatatttcatgtaaatttcctcgcgaaatgtttgggcaaaagtctgccg

SEQ ID NO: 41696 - DNA, 923 bp, Oryza sativa
gttttttaaactgctaaatagtgtaatttatataaaatatttgtatatgaaaattgttttaaaaaaatcatatcaatcgattttttttaaaaaaaatagttaatacttaactaatcatgcaataatacgagtttcgttttgcgtgctaggaaggaggggtcctgaacacagcctaaatcgtaatacaagagttcatctaatcttaaccaaaccgtctaaatcatggtccatgataatattaagggttgttttagctgatgtggtattctagtcaagaaaaaggcaaacacatgacatatgccccccttctctttctcatctctcttcagggcgacgccggcggtggagccttgcttcgatgcggcgggagagaggagacgaggcaatggcgggacgaggggtggatggggatgtggaggagcaccgcgcgatgcgaacgtgctgccatcgccactgtcgtgtcctgacgctggggccacctggttccctctcggtgctgatgcatagggtggccccgcgcgcgaggcgtcggttccgtggttcactgccgccattgccggcctcacatcccgcagccgtagcccctggctcctcaaccactcggtctccagttacgtttcatcggttagttcaggctgcgtttagtttttaatattgggaagaagtttgggataagttggtagtttaaaaaaaaatttaagagtttatgtgagtaggaaagttttagatgtgatgcgatgtgatggaaagttgaaagttttgaagaagtttggtgtaaaataaacatggcctgagaagtaagtttattagtcacaaacaaaaccgtagaccgaattgctctgtctccatgctccatatcttttactttatctttagaaaagtaaatgtagtactccctccgtctgacaatataagggattttg

SEQ ID NO: 41697 - DNA, 653 bp, Oryza sativa
atatcactaacacacaaaccatgcttaccagaataaaaagcttacatttttgcacagcaaaatggaagattatttccctcaaattcttttttttacatgaagttcttaattatcagcgtttcagtgaggttcctccaataattctggatgaatgttcagttgaaaatatcctattagacctcacctggaaacaaggaacttgactgtgtcctccacatccttcaccacgcttggttctacacaccgcatcatcactttcctcatcttccaaggaaagccatgcaaataccagtagtgcagagatatgttaacccaattgctacctaacaagatgttaagagtaacttggcataatttatgcaataaatattgggttgctatgtcatgttcactgtaggttttatctgagtttgattattgaatattccacttataggaagctagcaaaaggttcatatatctggcaattcctctaaaatgtatgaaaaacaattggtaggcaattcatatagatgcatcaactttaatctaaagacggtatagcctgtatagtatttaacaattggtgaaccactgaataattaataccaaccagaatagccccaacattcttccaaaaaatgaagaaagagtattatatactccctttgttt

SEQ ID NO: 41698 - DNA, 736 bp, Oryza sativa
agaaattgtgttgcttaatttggaaatggctttcccaacttgtttctgtttcagtgaaacacaataaacaaaggcaaaagtccattttacaccctcaaaccggtaagcttgtctacaatacacacccgaattactactaatacacttgaatagggatggcaatcgggcgcgacgggcacgggtaatgtctacccatacccgtgcccgtgagattatttttgcccgcggacatacccattactacatgacggacaataattgctgcccatgcccaccacccgcggacatcacatgcccgcttacccgccacaactagaacagtgcaacaaaatttcacaagtttagcaagttctccacctcggtgttgtgtcctcttacaacgatggagtaaggggaagagaaaaaagggagataaaaaagaaaccgtagaaaacaaagaagatgagttatatatcctagtggattttactcatggcccacatgtcagttagatttcacgggtaaacgggcaaagcgggcatgggtagtcatttcccatgcccgtgctcgtttacccatagggtacagtttttgacccaataagaaacccatgggtaaaaatggagaacatacctaatcctaataggatttttacccacaggttaatgggcaagaactattaatatcggacacttaacacccccaggctgttttaattcgtggttttgatatgccggatgccacgtgagcctttgcc

SEQ ID NO: 41699 - DNA, 784 bp, Oryza sativa
ttacctcttgtcgagagatcgcagccgatgcgctgactcgaagcaagaactcgtcgaaaagtaaagcaaaaaggatggcgatgcgccgaaagttgtattgattggattcaatcccttattacaatgatttggggcttatatttataccccgagtacaaaacctgtccattatggacgtgattcaaaactttgctaaagataaaatttgaacaagtccacatggctgactattaccatatctctaattcaaaccggtataaatatcctaattaatagataaaattaccttaaattagctcaatctctatacgacaatatcagttattccaatctaggcccaacccgagcctaaatcaatccgtattggctatctggcatatcggctaaggctctgttcgggagtgagggttgggaaccctcagtctccggcacgtaaaacgaagcagcgtttagtacgtgattaattaagttttatctttttttttaaaaaatggatcaatatgattctttaaagtaactttcgtatataaactttttttaaaaaacataccgtttagcagtttgaaaagcgtgcgggcggaaaacgacaaggaggagttgggaactactcctaacgaacgtagcctaagtctgtttccatctctattttcagttgatacgatgtccaaccgatgcacagcctatcctctaatccagttcgaatccggaccaaaactgcctcgatttgtcctccttcgagtatgatgcaaaattctggtgttaacaaagggccgaatttttaata

SEQ ID NO: 41700 - DNA, 642 bp, Oryza sativa
taggagaatgcccaacatcggtcgaccggaggaggtgggaaaatcagtcgcttccctccccacatgcgcgcacctgttgggcccaccaacttatctctcctcttttttcacaaaaatgtttcagctagtgtacttataatgttttactattttaaatagatataatgttgcagtgaattaaaatattcttttgcaacaaaaaaacccacatattttggaaactctctattaagagaatttcgtttagtttttgctccaccaaaaatgtttcacctagtgtactcacaatgtttcactatgtatagatctaatgttgcagtgaatgaaatattccattgcaacaaaaaaaaccaacatattttggaaccccctagtaagggaatttggtttattttttggttcacctaaaaatgtttcacctagtgtactcacaatgtttcactatgtatagatccaatattgcagtgaactgaaacattcttttgctatttgctgaaacattgtttttatataaggtgaaacaacacccgatttaaacgagtgaaacattttcgatctacttagtgaaataattccgatatgcttggtgaaacatcgtgccacatttaaaaataattcaataataagctaatttttttcgtc

SEQ ID NO: 41701 - DNA, 614 bp, Oryza sativa
gtctgaccatcatcaggtatggtgcctcctgacaggcgtattctgttgtgcctccagatgcctcaaccacaatgttagctagccaggtacccacgaaccggtggacctccaggcgaacacggtgagaaagctcgccactgaccggtggaatcgtcgtgtactctggcgcgttggggtagcccaccaccagtgtcatacgtgccaactccgccacaaagtcgatcatgccttctccgcggtggttgggtgggtggccggccatctagagaagacaaaggagtaggatcaatgcatgctcaaatccaaatttaaataaagcaataaaaactcaaataagggaatcgaataagagcgaaatttttatgcatagatcattttgcatgagagcgaataaataagacagactcacataacgataaaataatgagaaattagatacatactaataataacaataaaagcataaataccttgcaacccatgttcctaagctatgacctaatgcatttcacccatcagatcccaactgactgacgaataaatctcaacagttttactaaaaccctggactgacttgttttgaaaaatctcacttaaacgagcgaccaagattt

SEQ ID NO: 41702 - DNA, 607 bp, Oryza sativa
gtatgtaaggattcgtccgtccttacctaaattttttcatccgcaacatcctgagtccaacactggccgtgccaaagaggcaagccgagcggatggagctagcgaacaaggctgagggttgaaaagaaatgaatgggactttcagcctaaaaccaaggagtattcaactaaaaaaaccaagcaagctagataatgtatatcaatttcaaaatatttttactcgttgcaacgcacgggcatttttttctagtatatatatatatatatatatatatatatatatatatatatatatatatatatatatatatatatatatatagatgcacacaacaaaaaaaaagtgattggtggacagaaaaataagtgattgacgaaaaaaaaatagttgacgatcgataagttataatttttaagtagctataatataagatgtgcatgcagaagttgcattacagagacataagagaaaatcagagagttctagcccatcactttcattgttgcagaattaatcgacacaactatggatagggcagtcaaaataatggggagggatttccctttactatcgcgtccctttcaaaatctaatccgacctacttaa

SEQ ID NO: 41703 - DNA, 681 bp, Oryza sativa
atgcagtatgcacaccttgaggcattcacacactgacacacaagttccaggcgcttgaacttcttgcacctgtgcaccctttggcatacatccattgctcatctcccggaaatttcctcaatgtgcattagttctcaagccactacaaaccattattgaaattaaaatagcataggattaataaacagaaatacaaggaaattaagcagatcccaaaatactgaaaccaacccaaaagtttttaagaggaagattactactgcagtgtctgttctaccacttttatcaaaagcaaaaactgtttctcacaagttctagctgtcctgttggcgcccttgcatcgattgccctatccaaaatgatttgcgatgtgcaatcaaacacccccaaactttgtaccagatcaattctcgataatgaaatcgtcctaggtaaaatgcacaacccgaggacccgcgtgccaactacttcgtagtagcatataacagggaatcaagcccaggaacaacactagcggcaactttcttcggtggaaataaacacgcagcgactgaacaaaatccgtaacaacgaggattggggagaagtaaggaagcaaagctcgcgggaaggaaccctaacgaacaaaatttttgctcgaaacaaacttgaatccgtaactaactaggcactccaacacgc

SEQ ID NO: 41704 - DNA, 672 bp, Oryza sativa
attagatcgctttaaagggtgtgatgtgcgattttattttatgaccaacggtgaagattatcctatcgatttgatcaaaggccatattttcctagttaacttgggagcttgtagaaagtgctcattttttatagatatagatagatatagaaggtatatatttggagctatctctctatacttgtgtgtacaacgtagatatctttgctatgaattaatgtcagtacctaatgataaatcgtagaacataggtacctttgccattcggatatcttgcaaagaactgtaaaaatgtaaattaaactataaattaacgttacctcaaaaattttagtcgatttaaaaacatgaaaaaaatttgtactgaaaacaaataaatggttcgttatttatacactctgatatcaaattctgattctcaaaatatatagatctaacttcaattagtaccatttggtaatagagcaactacacgcagtggcttagcactgcggttcatccggaaccattggtgatggattaacactggctgttcgggcagaaaaatgattgtgtggaggggagcattcaagttctatatacaacactgaaaattttaaataactcctgtacattgtagtttgagtcataaatattttgaaaaagtacttggaaatctcataatcttctcac

SEQ ID NO: 41705 - DNA, 687 bp, Oryza sativa
aaaaatcggcaccttgttaacaacagaattttgcatcatactcggaggaggaacaaatcgaggcagatttggtgcggaatcgaactggattaggagataggctgtgcatcggctggacatcgtatcaactgaaaatagagatggaaacagacttaggctacgttcgttaggagtagttcccaactcctccttgtcgttttccgcccgcacgcttttcaaactgctaaacggtatgttttttaaaaaaagtttatatacgaaagttactttaaagaatcatattgatccattttttaaaaaaaaagataaaacttaattaatcacgtactaaacgctgcttcgttttacgtgccggagactgagggttcccaaccctcactcccgaacagagccttagccgatatgccagatagccaatacggattgatttaggctcgggttgggcctagattggaataactgatattgtcgtatagagattgagctaatttaaggtaattttatctattaattaggatatttataccggtttgaattagagatatggtaatagtcagccatgtggacttgttcaaattttatctttagcaaagttttgaatcacgtccataatggacaggttttgtactcggggtataaatataagccccaaatcattgtaataaagggattgattcaatcaataca

SEQ ID NO: 41706 - DNA, 740 bp, Oryza sativa
taaaattttcagtgttgtatatagaacttgaatgctcccctccacacaatcatttttctgcccgaacagccagtgttaatccatcaccaatggttccggatgaaccgcagtgctaagccactgcgtgtagttgctctattaccaaatggtactaattgaagttagatctatatattttgagaatcagaatttgatatcagagtgtataaataacgaaccatttatttgttttcagtacaaatttttttcatgtttttaaatcgactaaaatttttgaggtaacgttaatttatagtttaatttacatttttacagttctttgcaagatatccgaatggcaaaggtacctatgttctacgatttatcattaggtactgacattaattcatagcaaagatatctacgttgtacacacaagtatagagagatagctccaaatatataccttctatatctatctatatctataataattgagcactttctacaagctcccaagttaactaggaaaatatggcctttgatcaaatcgataggataatcttcaccgttggtcataaaatcaaatcgcacatcacacctttaaagcgatctaatatccatccaattttaaagcccgtctagagcccatctaaccattacataaccgtatacgtatctcatcatgcaagcttctgaattatattcgtagacatcgtcttgctaatatatctctgtcccgactcgagatgtggccatgt

SEQ ID NO: 41707 - DNA, 638 bp, Oryza sativa
attctgtaatttgttttgttattagtctatgtttaatacttcaaatatgtatccgtatatccgatgtgacacgtcaaaactttacaaccctatatctaaacagagccttattgttctcacatgacttgtcttagaagcaagcttgcatgttaatttaatcacttcctgtttgaaggaaactgtgagcaggcataaaagcgaagatgggatatatggaatttatcacatcattcaatcaacatatgggtgctctagaaaacgtgattactagacgagagtttatgtattcattacttgttttttcggttgaagtttttaatttgagcttacatcatcatcccaacatatgtctaaaagacaaactatttaggttggctacataaaacaagtgtactaaaagattgtttctgatgaggacacgattagctcggatataaccatgactaccttatgtattaatcaatcaaaagtgcatataatctatattagatttacttgttatatatttgaataaacgttgctacataatgagttttgtgtgttttcgtttgcagaggtacttgtttgggcgaaagaaaagagaccgagtgtaaggaatgcatagatgattgaagaagtttacacgttttggattcgga

SEQ ID NO: 41708 - DNA, 982 bp, Oryza sativa
atctgctcgagcaattctgattaagcccaattatcacccacaaccaaattaatgcgccagcgccactgcgcccgggaaccgggcctgatctgatgcagcgtcagcttgtgcgtcgcccttcagcaatagcgtcggctgcctcaagtcagccggggacgcagacacgcagtgccgcaggtcatcatcgtcgaggtcgtggtggggccaatggctagggaagtggatttgaaggaggaaacaagaggtagcgggaggcgacgatgaccttgggtttgtgcttagctccgcctagagcttccgagttgaaaggagacagcactgtggtggagtgcggctgtgctgcaggtgggaagttttcggccgagatgccacgcaggcggtgtcggcaaccttttcatgtatatttgttgactaaaaaaatacccgtgcattgcgacgggtgaagccattttaatcttattattattagacggtttagctaaggtgaagtttgctgtgggaattcgcttggatattttttttaacaaaatcatgagcttcaattagaagtgctatatatagtctcaagttagcatgcgagtttttttaagagatttcttatatgacttctttcgtatttcaaaaagcgaatgaacttaaaaaccaacccaaacacggatctatatttccaaaagcaagtaacttaaaagcatgttcaaatacggatgacgtactaaagtaccggcaaaaatatcttccatttttataatagtagagattcgacgaataaccgtgacaaatacaaatacagactataaattaggccttatatacatgtgtgccacattagaaaggctcgcaccacatataattgtatagcgtacgaaaggattgcacatatcatatacctacttacataatttgttactttccgttcgtcacatcaattttccatctgtaagtccgatcgaatgatggcatccgttctcacacgaacgagtaa

SEQ ID NO: 41709 - DNA, 655 bp, Oryza sativa
ttattctccacataacaccaataactcttactcccatgaagtggacagacccgttcaaacgaattaattttaaaatcacatccactagcatgcaagtggatcggtagttttctacatactatgaaggtgtaagattttatatatcatgaagatatacttatcaatggtatttggcaatcttattaattcccctaatgccaaaatatagaccggtttatgtcactctaagtggtttaagctaattgttgaagattagtgaaacaatcaaattggtaattattgataaatccactaagagaaagttgcataatatttaatctcttgtattgagctaattattttatacataccgcatatgtgtatcgttgcaacttattttcccatagtcctccgtaaggataaaactttgtttgtattgcacatttgaataagtggttatacatattgctcctatacgttgatttatttctcatgttcatagtagaacttatgaaataagtaaacgaaagattaaacattgtggtaattttattttcattattttacacattaataaaaatgtggttatgatattggaacatggaagtttcaacggatctcttcttgagggggagcatatatgctaaacattgattatcatacttaagacttggaa

SEQ ID NO: 41710 - DNA, 694 bp, Oryza sativa
tttggattttaccaaatgtttgttgaatttggtcaagttttattcaaatccagtcaaaacatgtaaaagtacttcaactaattttggtccgacaagtgccaaaaatcacgaaatttctattttggtgctaccgaaattttggctgaaatcgaaaatgcaaaccctagtccctaagtaattatgaactaaaataaggtgttaaatcaggaaattaataccggtagaacagcggtgaaatcgtggttgtattactgctccctttaaggtttaaataataatgtccatagatattatgcgcccatagcttttttagcgaagaccaaagatttgtggttgttctttgtgagcgtgtattagggagtacttttatgatgagcttgtgtgggacgcgtatagttaaaaacaaataatgttaaatcatctacaaatttgtcaagatcaaaatatatttttgtagtttcggttaagtcttcatcgttcaaaaccttttgttgtgttcacatatatatttacatcatttttgttgggtttatatttatatcctacacgaacacgatgataccgacgtgtttggttcggttcttgccagtaaagcgagtggtttgttcaattatatttggtggtgacattttttatatatgaaaatattcgagatgttcatgattcgaatagcaccacaacagcatgtgtcatg

SEQ ID NO: 41711 - DNA, 703 bp, Oryza sativa
aaaattttccaccctgttacatcgaatgtttggacacatatatagagtattaaatataaatgaaaaaatacctatttatacagattggcgtgtaattgcgagacgaatcttttaagcataattgctccatgatatgacaatgtggtgctacagtaaatatttgctaatgacggattaattaggcttaataaattcgtctcacagtttacagacggattctgtaatttgttttgttattagtctatgtttaatacttcaaatatgtatccgtatatccgatgtgacacgtcaaaactttacaaccctatatctaaacagagccttattgttctcacatgacttgtcttagaagcaagcttgcatgttaatttaatcacttcctgtttgaaggaaactgtgagcaggcataaaagcgaagatgggatatatggaatttatcacatcattcaatcaacatatgggtgctctagaaaacgtgattactagacgagagtttatgtattcattacttgttttttcggttgaagtttttaatttgagcttacatcatcatcccaacatatgtctaaaagacaaactatttaggttggctacataaaacaagtgtactaaaagattgtttctgatgaggacacgattagctcggatataaccatgactaccttatgtattaatcaatcaaaagtgcatataatctatatta

SEQ ID NO: 41712 - DNA, 747 bp, Oryza sativa
attacatttacagtttctactggcaaactatgtaagtgaagtgtaaaagagtagagaacttacaaaatttcttgggcgtttgtttcgattcgaagtcccctcatattgtgtggtgttttccacgatagattcttcataggttaggccactagcatcacaatgatctgtttcagtgtttgaatcacctgttttgtcaggtcagataaatataggcaagataaaacaaatgacatgggtgaagaacaaaatggggtccttcccaagttactccaaaatcaattgagtacacactacacacttatgatgtgatgagacgaggaaacaaaaataacagcttacagtactcactctttattccagggccgtttctgcattctatacaccggcattttgcagtgcatctcaccttgtgttgtaagacaaaaaaacagccatatcatcatatatacctaatgaagaggaatgaaaaataacagaatctagaaataagttatgtgggctgttgccataatgaatccctttttcccccttcgttccagaacaggtatcaccccttcaaaaatcaagaatcttgacttgtatgtcaagtacatttttttggatttcatgaattagaaaatatcattctatcagagttcgaatttctaaactaataaactgaattctttttttttccgtttctggtccttctggtttactagaagactaaaatgttatgtcttttttgtttgcaacaagaacatcagt

SEQ ID NO: 41713 - DNA, 619 bp, Oryza sativa
  unsure (1)..(619): unsure at all n locations
aaagcgcgcgtaccttaaggaaccgagncgncgcggtcatgcgccgaagacgaagaggcggccgaagaagcaaatcggcgctcgcgctcacgaggaagagaggnacatggaggcgtgcgtggcccatgtactttagggccgaatggcagagtgggctgcggcccaaataatctttttacccggcccggcccgcttggaaggcacagaaggattatcttgttattgtttgagaggaaaggtaaacaaagatagatatgcaaaatgaggtaactaataattgagtattgattattttcaatttgagaaaggattcatatgagtttttaaaacaactttcttatagatttttttagaaaaaaaattatatcgtttagctgtttgagaaacgtgcgcacagagaacgagatattttttttctcccgatccttatctgcaaaacgtagcctagtggggtacctccacaaataaacaaattataagctgaattctaaacttggactccaaattacaacttcatctttttaagttagcatattttttaaactgctaaacagtacattttatgtaatttaaactatagtagttaacacttaattaattatatgctaataagaagcgt

SEQ ID NO: 41714 - DNA, 872 bp, Oryza sativa
tctctatgtagaatgaatttgaagatgcgactttgcacgtagatgtaatactattgaaagtacatgtatgaattttcctagaattttttgtgataatttttagttggtgtacacggtgtgtacacgcgagggcctgtgtacatatatatatatatatatatatatatatatatatatatatatatatgagataatttgttcaatgaaaaaaggcattaattaaagttactttccttttgttataagttacttctataatatatgtaaattacttttagcctttactgaatttacttttatatatctaagaagtaacttagtgaaaactaaaagtaattttgacatatcataaaagtaatttgtaatttttcatcaaaatataatcatgtgagatcttattgtaaagatttaattattacgaacacaacagtgtaattggattctaaatcggatgagtaatttaagagaaaattttatttgaagcatagatgagaggaatatttcccctacttgctcaatgaattaatagcaactaaaacttctaaagtactagtacatgggtatctctggttaagactaattggagatgcctctccaattagatttaccgctccaggttatgtggacaaaaacaaaggccaagagggagggggagagggggagggacgaccgtctccacgccgtaccctcgccatctaggccgacggggagagggagagggggagggacgaccgttcctgccgtacccctgacgtgccggcgagacgggagagagagggcgagagggagtagcgccgtcagtggggaggtggagggggagtggcaccgctgatggtgagaggggaggggaggggaagcggtatagggggagt

SEQ ID NO: 41715 - DNA, 1787 bp, Oryza sativa
aaggaggtgggccaagtagaaattggcctattaaaaggagtcgggcacaaaccgtgattttggtccgaaaatggcattttatttgaaaagtccttggtttccaaggcattatgcggaactcagaaattatgcggaaaagtcctatgggacattagaaactacggggaatatacattcgccatttatactttgaaccttcatgagttgggtttacgccaaatagagaagaattaaggatttataccttagtcccgtatttctaagtatttgctttaactatttagttagtttcttgaataatcatagtcaatcctagaaacattgtttttaggcaaaagagcttctatgaacttgtgaaacctttgttttagcaccccttttggaagcatcatattttatggtttatttcctggtaattgtttatttggggtaattgattgttctgtgggttagtagttctgtaaattacacatacctttgaatagcagaaaatcatgttaattgctaggattgtaataaaaggtgtgtatagaaatttactattttgtactcgttttgtgcactttatttactagaagtaaaccggtagaaagttgcataaaaggacatcatgtaagtagttgcatgtagcaaatacatttattgggcaaatgagtaatagaattattcatatatcttctctttgtccaattgtcgccacatttgtggaagacacaattatatattctccgcatagaataaatgtatacactcatcatgaagagagtatattattgacttagagatatttattagtgcatgactatcatagaagataagctacaactaatttatattaattgtgtccaagtagatacaatgtcattgaatttgcgaatacctagacgagaagtctatatgccaatatgccctacaccaaaattatctatcaaaagactatgtacctatgcagtgtctatagttaatttgattgataatgttatgtccatcttctacgtataaatgactttacaaatgaagtattgtttttatggatgtatgtaaattattttgagtaaattggtcatttacatttgaagcaattttggcctagatgcaacatgtttagttgttagaattgatacacaagaagttgtattattgtcaacatgtgcatttgcacgcacatatatgacttatactattaatatgttcatgaagaacatgcatactcaaaatttgtggaaggaaaagaatttggtgtatttaaatttgatgttcaacttagggggagacgaatagtaatgacagtaatcttgcattcgttcttttgagataatattttacaatacacgagttacattatagtttagattaagttcaacatgaagaacatggttaagctcatgtagagcatctttatcttttgctttaggcatagaagcttctgcattagattactgaattttttttttatataggtcatctcaccttacctatattgcctttttttacctatagtaattctttaaccttttgtggaataaaattgtgaattgtatgtctaaaattgaatgtaaatatttgtcttgcctattatttgaagtatttttggcgaatgtattcttattatccactaagcctcaatcaaccaagtaggttgatagttctaagtgcattgacgccatattggcatacatgtaaagttgtttacttatacacatgaacaattagaatatttatggttaagcattgaagcttaaatatatccaccagaaaccacattatttcttttagaaaagtcgtac

SEQ ID NO: 41716 - DNA, 680 bp, Oryza sativa
atgtatcagtagtagcagcaacaaccatggatggatcttcctagctgcaaacatagtttcttctatggatcaacatttcgacatctaaaatttagaggtcagatgataggcagagaaatctagatttcaaaaaattaaatatgttaataaaaaatagcaatcaaattaaaatgtacgttgatggttgtattcattgttttatatcatacaatgatgaataaattcctcaaactggcgacctccaatgctttcatactgtcacacccagaaattcactaacccaaatttcaagcagaatgtgtattaaaatctctgtccaggactagccagagtacacagacgataattgaaaaaatagatctacatcttacaaaaataataaaataattcttacaaatgcagcagaaaaataaataaactagacttaatcttcacgaccaaaagcatagcttcctccataaaccacaggcatcctcaacgttcagaacaaactcaatcctcatagaactcaccatctaaaccaatctctgcctcttgtggggaggaataaagcaagactgagtaccaatcatcgtactcaacaagtcatactaacgggaaggtatgatgcaagaatggcttattggatatttgcaataaaagtagcatttataaatcatattttgaataagttaaataat

SEQ ID NO: 41717 - DNA, 621 bp, Oryza sativa
acggaaaaatacattcgcccttttccctcacacccacttcaaatttttcacactctctctctccactcttttccctctcacccacttccaattttcacacaatctctctcccttttcttttaattctctcccacacgcctctttcctctcctcccctctctcatgttctctttctgccactttcctctcctcacatccccctctcctctctctttatgcctcccactgagcgcacgggcgtcatgacgacggcgatgacgagtggcggcgcgatgatgagcggcagcgcgacgacgacggcgcgaggacgacgactgctggcggaggcggagcgatcggccagcctttttcttcttttcgtcatggttttgcaaactttgtgttgcgtcgcacagtggatcggctggttgccgtttctttgctcgagaaatggtagctttgggattaggatcgagaaaggctagctatgcgctcaggtacggctgcctgtgcggggttggacactggactaaagagagacgacggcgatccgatcggattttttcgattttattttttttgtccgttttttttccatgcgggtggtataacttaaccgtacgggataatcgacttaatatg

SEQ ID NO: 41718 - DNA, 663 bp, Oryza sativa
aaaatataatcatgtgagatcttgttgtaaagatttaattggtacgaacacaacggtgtaatcggatcatagatcggataagtagtttaagagaaaattgtatttgaagtatagatggatgatacctcttatagatggagtggtagctagtttagacaaaccagctaccactagctatgtagttacgtccaacccggagacagtggcagtggggacaagagctcaagctagagagacgacggcagatccgggaggacgacgcctcccctgctgcgagtgacggcggcagcagcgtcctcctggggcttccacaggcggatcaggcggtgtcgtgcggcttcccgcgagcggatctggcagcgacggcggagtcgacggcgccgcgggctgatctagcggcgactgcggcttcccaccggtggatccgatggcaacagtggcatcggtggcttcccgtgagcggattcgacggtgacgaagatcaagataagatctctgtggtttttataatttttcctgttcgttttctctttggattgttggattggattttgtatatatctttgaatttgtgttttatccgtcttacgcgatgtgttactcgttcgtgtgagaacggatgccatcattcgatcggacttacagatggaaaattgatgtgac

SEQ ID NO: 41719 - DNA, 1088 bp, Oryza sativa
tgtaaatatgatacaatatatgtcatacttaaaaaaggctatttatataatttttctgaatccaacaaatagtaaaataccatgtaaaatgtcgaacacttttatacgttaaaaacgaagcaattacttctaatagctactcgcctactgcaacttcctcacgtaaaaaattagtcagtccaataggtataatgtataattgattggtagatatataatccagagattaaaggtggtgtttacatccagggacttaactttagtccctgtctttagacactaatttagagtattaaatatagactacttacaaaactaattacataaataaaagctaattcacgagacaaattttttaagcctaattaatctataattagagaatgtttactgtagcatcacatagaatgtttactgttagaggttgtttggatggtgactatactttcccataactttggtaagctattttgaccatcttagtgtgtttgcttggttgccacatttttatcatgtcacactttttgattttatgatcccacttattatagacacatatctttaccaacactttagctatagaactttgataaactgaagcaagcatccaaacagcccctaacaccaacatatttctgactataatatgtcttttcttctattccttttattttttgtaacttattttcttgggtataagatagaatctcttagctctgttttggctttgcatgcaatccaaacgccggtaacgtttctgctcatcccatgtcgatgtcgcggctgttcccggaagccacggaaaatgctgcgcgcctgacgtccgacgtcagagaaaaaatcggacgcctcggctccggcgcctcggacgtcaaagaaaaaatcggacgcctcggctcccgcgcctcctgcagctctagttttaaaacgatttctctcttaaactaattatccaatctacgatccaatcacaccgttatattcattgcaattaaatcttttcaacaagaccacacatattatttttcagacaaaaaaaattttaccctctctattgatatttttttatggtgcaaatgatgatcaaa

SEQ ID NO: 41720 - DNA, 687 bp, Oryza sativa
attattctagttaacgcgatcatgtggacatccaaatttaatataaattaattgaaactaaataaaactcctagaataaaacaaatgtcaaatcacctccaattgcatagaaagagatttgattatttattatgtattatgaacactgctggaatgttcccctttcaatgttaattgactgctgtgatgaatgcaattaaaaaaaacacaaattattgtgcttgcaatatgttgttttatcatattggcaaacacatgcttagcacgcgcatgattacttctagtagtaaatataggttgtaagtcaaaacaaatatgtatggtatgcacaccttgaggcattcacacgaatgtacgaggcacttggacttctggcatctgcacccattagcatacatccatgctcattttcctgaaatttactttatgtgcatgagttctcactacaaaccattattgaaaatttgaaatcaaaacagcataagattaattatttgggggtgctccaagaaagaagaatgcattaccggcactgcattagagctctggggttcaatctcacttgcatcttgaaccctaacaatcttgggatcaaatgctctcggatttttcatcttgatcatgtccacacgctcctccacaaagtcctcatagtactctctgttcttacagttagtgcaacggcag

SEQ ID NO: 41721 - DNA, 685 bp, Oryza sativa
ccggacacgactattatctctaacaaactctaagatacacataagtctttacggcagacttttgcccaaacatatctctaaggaaactatttaaaatatcctaattaatagatacaattgcctatctgggagcttatctctatgatggcaatcctttcgtagcactctgatcgatcccagaaacgatttcataaccatctcaatgaaatcggctgtatcggctgtcccctgtccaatgtcatctcagccgatgcagactctagccgatacctccgcagccgatgcgcactctattcttcgatcacaatccctttgccgaatccacttcgattcaaatgccgaacttggttcattacttaccaaatttggtcgttaacaccaccccctatcaaacgtcataaaacgaaatggcatagtgacgaatagcaccatcgtcatgaggaatttgtcacagaagatcacatttcttgtagtgtgcggcgctaaacggcgacggcaatgcgactcggctagcggcggcggcgcgcggccggcagtgacggtggtggcagcggcgcatggccgggacggcagcggtgcttagcggcggcgacgctagggttttggtggggttacacttttagggttacaacaacaacgcttaaagaattaacacctaaactaggagatcacgagaaggttcctc

SEQ ID NO: 41722 - DNA, 672 bp, Oryza sativa
tcgattttcccaggcggtcatattaagtcgattatcccgtacggttaagttataccacccgcatggaaaaaaaacggacaaaaaaaataaaatcgaaaaaatccgatcggatcgccgtcgtctctctttagtccagtgtccaaccccgcacaggcagccgtacctgagcgcatagctagcctttctcgatcctaatcccaaagctaccatttctcgagcaaagaaacggcaaccagccgatccactgtgcgacgcaacacaaagtttgcaaaaccatgacgaaaagaagaaaaaggctggccgatcgctccgcctccgccagcagtcgtcgtcctcgcgccgtcgtcgtcgcgctgccgctcatcatcgcgccgccactcgtcatcgccgtcgtcatgacgcccgtgcgctcagtgggaggcagagagagagaggagagggggatgtgaggagaggaaagtggcagagagagaacatgagagaggggaggagaggaaagaggcgtgtgggagagaataaaaagaaaaggaagagagattgtgtgaaaaattggaagtgggtgagagggaaaagagtggatagagagagtgtgaaaaatttgaagtgggtgtgaaggaaaaaaaagaatgtatttttccgtgtggtccacttaagaggtccgcacgtgaaaat

SEQ ID NO: 41723 - DNA, 561 bp, Oryza sativa
ttttgattactcctttaattcataatatctggcaagctcccgcttctggcttataggagaataaactaaaccttctagtttagtttggcttgtgcgttattcttacttataaagatctttttcttcttgaaaatataaggcatctttaacacatgggcttttctccccctgatgccgatatttgatctttatctaatagcatatcacaaaaatcccctatcataggcactggattaatggaattcggtctatttgtatccccaacttcatgtggaggcccatatatgtatgctatggtggtgatatatgaaggaaatgttcattcattgaacacgcacttatataaaataaagggggtaaatatattatatgcagtgagctaacataaaaattaatgcaatggcatgaaaaattgcacatccctaatactgtaggttatcccaattcatagagggttattattctgcgacaatgaagcccaaacaaatatccactagtcgacaaaattactctattttctagctctttttatttgcccaagacttgatccaattactgata

SEQ ID NO: 41724 - DNA, 531 bp, Oryza sativa
gcgaattcgagctcggtaccctgtcgatacatgatagccgatgtgtttacatcgccttgagatggccgatatggttatattgctcttagttattttttatattgtaatcggttgtgttttgccgatatacaatagccgatatggttatatcgcccttagttgttttttatattgtaatcggttgtgttttgccgatatacaatggccaatatggttatatcgctcttagttcaatttataattttattaatgccttcgtcattgtaaaattaggggggcacatatattacaaaatgagctatcctattacaagaccaatcatctagacaagtaacgctggatagccgacacagcccgttgtctaatttgatctacttcttcaatagcttgaatgtcttgggtgtcagttccagagatgaatttgagggacttggtcatgtcagccacattttttatagccgatctcaatctagacttatgttcttcaacagcacttgggagattggctagcttctgcctttcaagattcaa

SEQ ID NO: 41725 - DNA, 833 bp, Oryza sativa
ctgaatttaggcggttccaaaaacaaaaatttctatgctataacatcgaatgtttgatacatgcatagagtatttaatgtaggcaaaaagaaaaaatcattacacatattgcatataaattgcgggacggatattttaagcctaattgtatcatgatttgacaatatggtgctacagtaaatatttgctaatgacggattaattaggcttaataaattgttttgcagtttcctgacggaatctataatttattttgttattaggctacatttaatattttaaatatgtgtccgtatatccgatctaacaaccaaacccaaaaattttccccaactaaacaagcccttaggtggtgtttggatccagcgacttaattttagtctctgtatttagacactaatttagagtattaaatatagactacttacaaaactaattacataaatgaaagctaatttgcgagacaagtttttaagcctaattaatccataattagagaatgtttactgtagtatcacataggctaatcatggattaattaggctcaatagattcgtctcgtgaattagtctaagataatggatgggttttattaatagtctacgtttaatatttataattagtgtccaaacatccgatgtgatagggacttaaacacgttgaacggtactcccttcctcctaaaatagaaggaattttgggtgatgtgacatactatcctataccttataaatctgaacgcaaatcctttatattttgaggcggagaaagtattactaattagtactaatatttcgttgcggcaacatactgacatgtacatacgcagcccg

SEQ ID NO: 41726 - DNA, 582 bp, Oryza sativa
ttcaaaatatcctattccaacaacccgttatctagatttttattacatagaaggtgaatcaaattcccatctaagggttgtccatatttatgttattttaaaccatatcattttttcataaaagttattaaagatgtgcatccatttagtttcttaccaaactttgataaatatataagaaatcctattaaaacttgacaatattaattaatcccctagcgttttcacaaaccagcagcgaacctccacttgccattcaaactcacatacatttgctagttcacggaacacataagattttttttttaaaaaaactaaaatggcaaagtagacgcataaagtaattctaaggctaaaactacgcataaggtatacgtacactgtgcatgcgtatacaccgtagtatatagtagtagaatatttggtccaaatagaggtgtaactttcttccaaaatgggccttcctactctggcccaaatggtcatatggcccatcaaaagtgagcggatccgactcgacaacaagatcccccgcgcgcgcacaagaaaaaggagccaaatctggctaccgatcgatcgatg

SEQ ID NO: 41727 - DNA, 689 bp, Oryza sativa
agggcgatctccaccacgtcctgttcctcgccggcctgtctccactccacgtccggctccacctcttcgtacactcgccgttgttccatcgccgccgccgccgctcgccggagttcgatgtgtacacgtcaactaagcttgcttttgtgacagcgacgtgttgtaataaacattatattacactttatatagatgcatgcaaatgtgttgtgagaatggaattagatagatagcttggattggttgatggagatggcaggagcatatgcaatgcaacctgggttaggttagctaagctaattaaggtagccatggatggagatggagtgagcttgacgccatgggtgacctccttccttggggcaaggacatatgcttctttgcttccaggggcggatccaacgtgaatgtaggggggactcatggataccccggagcaccccttcgattttttccccataaatgataaactaaaggtccctaaatagctggatattgaagaaactgtgtaattgagcccccccccaattttttttttcctggatccgcccctgtttgcttccttcatggcagatttttttttttttttgctacacctggtgtattggatcttgggtaataccaaaagttcatcatagttgggccaattgggccgcctatatgcttttcaggaatttcagcctatatgt

SEQ ID NO: 41728 - DNA, 591 bp, Oryza sativa
tatgcatggttcaaggccttacagaaaatacatgcactgcaaacatttaatccaataatacatattattagctatatatagtgtactagtaatcaatcattcgagctagtaattattactccctcagttttaaaacgcaagatatgttagttctttataagttaaaagtttgactaaatttataaaaaaaaatataatatacattacacgaaattaattttgttaaattcatcattaaatatatttttataatatactccctccatcctaaaatgtttgacgccattgactttttttaaaatgtttgaccgctcatcttatttaaaaaatttaagtaattattaattctttttctatcatttgatttattttaaatatacttttatgtatacatatagtgttacacatttcacaaaatcttttgaataaaacaaacggtcaaacatgtttaaaaaaagttaacggcctcaaacatttaaagaaagagggagtatgattgatgttaaaaattaatgttattatattctttataaacttagataaatttgaggtttgattcgggataaaactaaaacactttacttaagctta

SEQ ID NO: 41729 - DNA, 644 bp, Oryza sativa
aattattactctaattaataagcgaataaaatgtcattacagaggtagatagttcctctcaatcaataaagatctaagcagcggaaaaaaataagataaacggcgccgacgactccactccacaggcagcttgaccagggctacacctaatcttccacaccatcagcatcactgtagaactcctcctctgatgaatgattgctaggtgagtatatgacatactcagcaagccacgcaacaaatatgcaagtgcacaggataacaaaggatggcatagtagggtttcatttgcataaacagcatttaataaacatttcagaatttaataaaacagttaagtaataattaaacaatattaatccaacgctatacaacataccctgttgcttaggcccaaccattctgaacaatcatcccggctgcacattctgaacaatcatctcggctgcacagttctatctccaaaccaggaattaaccattccaaaccaggagctaatcaaattattaccagttatagcatcttttattatgatgagaagtgtgagactaatcacgaaagacattgttagaccccgccataacccggggcacggcttttcgaatagtgtgctctggcccgaggtgtccactgtcccacaagac

SEQ ID NO: 41730 - DNA, 605 bp, Oryza sativa
gggcgaatccgagctcggtacccaaattctgtcccttcccataaagagtatcttgcactctttcccataatatttgttttgtggggactaaggaaaaatattcttgtataatggagtagtacagttggcaataagtcttggaaccaattaattagttgaccagtcccagttaaaaaagtcaaagtctttatacaaatccaaatatcccatctacgtacactttgcgtgggaaatcaacattcacctgcataaatccatggactacagatcgatctgattattcagagtcgtcaattggatttggaaagatagtgataatattcatgtccattcaaacaaacaagctcgcatttcaacccaaaacgagattgcaaaccgtgagcgagtgaacctcggcagttcgctgcatacacattggtggatcaacctcatgcaggttttggtccaggtacgggcagatcaccgaaaatgagagactgatattgattgattcagcttcatatggatcgatcgttcttattaactttacgtgcctttcatcaaccagcctcatctttgcatttatatttatgcttaccagccagaatttgaattttcaatcttaa

SEQ ID NO: 41731 - DNA, 615 bp, Oryza sativa
ccccccccccacccggttgatcggatagaatcattatcgggaatgataatgataaggtgaattaggcttgggtggcagcggctattcacattgatggagtagaagagcaatgtctagtggatttgcagcagaaaccataggagcccaccagataggcggataggaggaagaaatcaaatttgtactagtacatttttatgagtttttaatgtttcagaaaatgcatctttcttgggttggattgaaacgttgtccttgatacttcgatggtgtttcatatttttgtttaagaatcttgtaattggttaatgttccatatgtgaaaataatagtacgtttcaatacatgaaacatttttcaggtagcggtaaaacatcgcccaaattttaaagaaaaaaaaaggttaaaatcaaacactcgatttgctgtcgcctcccagcattcatgaacttggagaaagtttgtccgaaacaacggcgtcacacagcgcgtccgactccgtttctcctgtaggtcgagtcggagtcggtttctcaccccatgtaacccatgttcgaatcggattcggacactacaaccgccataactacctcggctatatatatgcaatgcacg

SEQ ID NO: 41732 - DNA, 716 bp, Oryza sativa
  unsure (1)..(716): unsure at all n locations
ttttagattttggtaataagttttgagatggtttattttaaaattaaaaattaaaaaggttcaaataatgataaaaaaatcacgtttatacttttgtctgattaatttactagccgcttggtccatctgaaaatccaatgcattgctatacattcaaataatatatttgatcgtttactttcactcccggaaaactcttctttagtcctggtttacaacccctttagtcctatattacaaaccgagactaaatgcaacccgggactaaagatggtcgtccatctttagtcccgggtgaaataaccgggactaaagttagatgtttaccaatcatgactaaagatggtagtggcagtcccggttggtcatcatttttttctttttttttcattggttctttgctgcttgcattttgatttttccttcgagttgatccctacatgattttcccaaatcgagtgccctacatatcctaaaatcaaagtaacatcacaaatcataagttcatataaaaaattctccaaaaaaatacatcacaaatcaaatacatcacagattatatatctcagatccataccatgaatcacaaattctaaaaaaaaagaacaaacaaaatccaccgctgccgctgacggcttccgcctttcctctggcagaggggagggcgcagncgaccagccgccggccgctaccgtttatangaaatcgtgccgcat

SEQ ID NO: 41733 - DNA, 4907 bp, Oryza sativa
cccaaagaaacaatccaatactccccaagaaaaagaaaccttcttcctcccaatttcctcctcccccggaaagagcaacccacccacgcccggtttcttggaaagaaaaaaaaacttataccaaagcacacatacacacacacagcacaaccaagaaggggggaaagaaagggggaagcacaaagctagaaggcccggagcactgaccgtggcgggctggtgcgggaacaactcctccagcgaggaggcggccgcattcggcgggtgcacatccatgcccagcgacgaggaggaggcagccgcacggttgaggagagagaaagagagagagagagagagagagagagaagcggaggaagaagagggggtaggtttccgcttggagaggggagggagggtttcgcttttatctgagccggattgctctggctcgctcagtgagcccagccgtcggctcgtgagccgagccgagcaagtactcaatactggcgataatactggcctgtttagttccgaaataaatttttcatgctatcacatcgaatgtttgaatacatgcatatagtattaaacgtagacaaaaagaattaattacacaattcgccaggaaattgcgtgacgaatctttgaagcctaattgcgccctgatttgacaatatggtgctacagtaaacatttgctaataacggattaattaggcttaataaattcgtctcgtagttttctggtggaatcttatttgttttgttattagactatatttaatactttaaatgtgtatccgtatatctgatgtggtatgcagggcaaaaatttttgcgaactaaacatgccctaactgacgagctgtggtgagctgtggctttggctaggcttgagcctggaacgaactgggctcgactatgtgttttggtgggtgttttttccttctaataagaaattagtattaggaaaaacaatgtcaatatatatattggggatatatatctatcacaatgaatacgtaaatctgcagcaaatctggttttgttttcatattccttctcccattcaattcagttcttgcactttttccattgagtaaatttcacattactgtaattatttgttcaaaagtaggtatttcgtgaaactataactagcatttttttaattcaaaactatatattttcccttgcatgtacacgacatatgggcccaatttacaacaccggtattacataggtgtatcatgtgtggttctaaacttgttagacaaataaaattatacattatcgattatcgttacagatatccgaaacatccatctaaatctataaacaaattagttgcagttattcatttcatttattatgtttggcgcctgccaattttgctgccaaattttcatactgctctccctccattttctgctcttcctcttcctacctacgcaagcaaagtaaagcaaagctgagcaaagcaaggcagcagggcattgtgtcactcattgtgtgagccaacctcctcttggacccccttttccttacttccttccaaaaaggacagcacaaactgctgcagatttttttttaatattgcacctccctttccttgctgaagaaaaagaggaggtgaatctgaatatatactccatgatgttgtcatggcctttttgctgctttgatctctctggctttacctgctcttcaggcaattgaacttgtactgctactacacttcatcttccaaagctttttcacaagaatggtgcctttagttgttttcgaagaataacctcttgtttaacctatagttgattataggccgtaacggcttatcaccgagaaaaaataatttatttgtaaattttttatatatacttgtatagcgatttaaaagtaaaagctaaaaaataaaaatatgaaaacccccttgaaatcaactccaaaattaagttttaaaacttaattttctatagcagtttataggctgaaaagcaaatgattgagttaagtgatgatggaaagaaacaagtgcaaccatggccttgtttggatcctccgagctattaaatagccctccagaattttgctatttaggagtattaaacgtagattaccgataaaaccgattctataacccctagactattttgcgagacgaatataatgatgtatattaatccatgattagcggctgattactgtagcatcactgtagcgaatcatagattaatatacctcattagattcatctcgcaaaatagcctagcggttatggaatgggttttgtcagtaatctaggtttaatgatccaaacagggccatgaggacagtttggaagatgacgaactgtgtgtgaaggtgacgaactgtgtgtgcagagcctcttggctgttactgacctgaatagcattaatagaaatatatagctttggatgccatgaggacagtttggtcacactccatgagcaggggcacatagaaatgaggtatccttccttccttgcatatgcattggttaatagcagatgttctcttccacaaggaaacaaagagggttcttatttagttcagtgattataaaaggcagcatttccatcatcaattctttttaaattgtatgtattctattcatataatacccttcagcaaccactgtacaatgttagtgtgtgctcgttgtagttcatggctttaatttctaggcttatagtttacaagttatggcattgtattattgtttttctcgacataatagacacgccaacttggttggtttcacaaaaactatgttttgtttagaaaatcaagacaacatgggttttacagaaagaaaaaaaaagagggggagtatgggttgactaataaagtcgtggctctaaggaaaaatgcaccaactcatgaacagcccctagcattggatacgaagcacaatcaggatttcctttcctttatcacggtaaggatactcctttcggtagtaagcctagtaaccacatgattaaaaaaaagggagaagttttaacaagattaaagttttgtttaatttttttaaaacatggctgatatacagagcaatttaattaccctaccaaggggtaggccctgttaccatgatagctatagcatcaaacatgccatagaggggctaaatagagatttaaaaactaaaggctgagattacactcaattgtgataaacaaaagctactacatgcgtagggttcaaaactagcatggcacaagcttttttaacttatttgaagtcctactcaattctagtaatgtaattgcaagcagtagagagattgagatatgaagatcaagcacggagacacggagactttttagcaaggtatcatagactcagtaatctattagtcctcattggagcactctacattatagtctcacttctttttatggtcacaaagtccatagccgctcttttgtatagctattcttcactatggaagccaaactccaactctccaagcctttcccaagatcatcgggtcttccacaaaatccttaagagatgccatgaataacaagatgaaaacttcacttgaagctactcagcactactcttttgtgagtgcgtacaaagccactacctcgctcaagtaatcactctgaaagcttaagtcctccacgagttatctcaagttgcaatgttatccaagagataggaacaggtacatagcatagagtatttagtctcgactagcactgtatatttatacctcaactacacaaactagccatttttaaacattgcctttgaagtgcataggacatagtctaaccctttaaacttttgcgatggtcactgaaacaactagcagttgcgctataaaagggcagatagttcgatcttcaccggactgtctagctggtgattgtttggctaatccaacccatagaaagtacattgcctagacttgttcggtccattggtgatcaacttcatccggatagtccagcttgcctagtcatttcagcctattgaagttgagctggacaaattcattgtcctacgcgtcaaatttgtatataacaaattgaccagccatttgaaaaacaaactattcagacaagtctagaccaggttggaaaaacaatagctctgacctatttggttgcacccaagctatctggcccactgagccattagggcaacttaaaagaaatgcatcaacgattcatcgagctcacttcaacttcaaccataaagacttagcatttgatttgagaggctagcagaccctagtatgcaccgcttttcttgtatctaaaaaaacatctagatttattctcgccgtctcaaaataaactaacttttatcaacaaatctagacataaacaacttctgattatgaatctagatattaactatgtccagattaatagcgacaagttgggccatgggtaactaaaaatgcccataccgcctttgcgttaatgggcctgggactcctaccgacggccctactcgacccgactcccggaggcggagatcgacttcgccccgccccgccccgccgccttcctccgccgccgatctccatcccgcgagggtgaagcagcgttgccggcgtcgtccccctcctgctcacttcctcttccttccgctcgccgccggtgagcaccccgtatccctctcatccctctccgctctttctcccctcttctaggtttcgaagctctttcctctttgccttaaacccttgttaggactaggagtagtagttttagttctttgctccatagaaaatatttgtgggcggttgaatcgattgcgagttgcggcaatctctgatgctggatttcgtatcgacagggggcgcgctctctctgatggtgatggatccccttaccaacaaggctgccttcagtggcctgagacagtatgtgaaggagc

SEQ ID NO: 41734 - DNA, 575 bp, Oryza sativa
ccctgagtttccgtgccaacgtttgactctccgtcttatataaaatttttttataattagttttttcattgttgttagatgataaaacatgattaatactttatgcatgacttatctttttatttttttttcataattttttcaaataagacgaacagtcaaatgttggacacgaaaaccagatttgtctttttttttttttggagggagggagtacattggatcagccttgtcctttgtcgctgatgctatgaatgatttataccactacaaaaataataaagcagtagaaacaagaaagtcaagtgcctagataggagtagtagcttagacaatggacaatgctagtcttgtctgcaagtgaattcactgaagatgctcctaaaaactcaccaaagatgttgacaaagttggtttcttgattcagattaatccctagaagaagcagctattgacctttttttaaataaaaaaaaattaaagcaaaactatagatcaggtcaggtcaaaatcaatgtgagcgtggctccatttctacaggacaaagggtgtgcatttactagtagtaacaggta

SEQ ID NO: 41735 - DNA, 628 bp, Oryza sativa
ttcgctggaggatcgttcgcacacaagacaactgccgaaggaaaagaactcttagatctgatcttagagaacgattctttcggccaaagcgaagcatgcccggagatcgagattatccatgagtatcctctgcacgtggagtcggaacccgactcaactgtcgaatcctcattccagtcgctggagccggaggaagaagaaattcatcctccgaaaattccattccaattcaggggtgatctttatgaaaattatgagaacaccctgaattattccagcgaaaagaaggctcatcccaagcatgagccgttcgagaaggtgatgtttgtatcttcgttcgtttcttctgaatctatttcccatcttcatgaaactgaacgtccctcatcaccctcgatcaagcctaagccttgtccctctggccctcataatgatgttctcgtttatcatcatgaaacaacccaattcttgcacgatgtatctcttgagaaggaaaacccttaggccacggacaagcttgagacattgactctggaggacgagagaaaacattccacatatgagcatgaaagtttctctttcaaaaccccccaggattcatgctcacataaggaatccccagagtcct

SEQ ID NO: 41736 - DNA, 695 bp, Oryza sativa
tttccataggtgtgcctcctccctttttcataaaactgagaaaagtgatcaatggggaaggggttgtggttttgctcatcatggaggtcatccctgttgttgaagtgaatgtgcaagagctccttgaatgcacggcagttgatagagcatcgaagggtccccgacatccacttcatggcatcacaatcgccggacacctacacggtggcatagaattgccggatgaggtcttcatcaaaacgttgcttcatggtgacaatcttatcaatgccaacgggcttgaacatctcttgcaaacctaaaaactccggtgtctcaccaatgtgcctccaagaaattcacttgtgttcggcgaaggctttgtttgcatatacttgctcatacacggacttttgataccgtgtatggaatctcagatcattgcaatcattaggcctccggaattgatcgtgatgacagatgataatgtattgctaggcattcctcaaatagagcacaaattggatggtgggatctcgaggactcccatcatcactttgactcatcatactcaacatcggcacttgcattattatcaccaccatcactaccattgttataaccacttactttcaactcatacccctcaatatttttcataaccccatcacctctttgaacatactcatctccgtttgattcctcattctcactga

SEQ ID NO: 41737 - DNA, 675 bp, Oryza sativa
ccaagcgaatcggccaatgaatttccggaaaagaagcgatcggcgaatgatcatcgatgcatatgcattcgatcgttgctgtctatacgtcacagatcacagatcgaataactactccttgtgttgtcgcaaagtaaaagagaaagggaaaagcgaaagtaaattttgttccaggaatgaattccgtggcaagtatacatacagggcactcttgtgccgcacaagatagaaaatggtccggaccgtgcggtgagcaacgaggcccaagcacgtacgggacgaaagcgcgataaggcctctattcgtggcgggccgtcacaggcacgacccaagccatgccatcagtcgctgccgcaatcaatcggtccactccactagacgccgcccgccagtgccgccgggcgacgagaaagcgctctgctaccgcctgatccgcgcgcgctggcgtgtacgccattccgccgcgatcgagccaattcacgtggcggccggaggcgacgagatgccgtttttctccaggtctccacgtctccgcggcacaggagccgcggctgccttcgagttcgtggtccgaaatttgagagatgacgcggtgcggctgctgcacgggcacggtgccggtcgtaagctagctagctagactgcctgtggcaacatctcgccccatattgcaaa

SEQ ID NO: 41738 - DNA, 789 bp, Oryza sativa
cctctcctttgagagggtcgtgaaggacaaaagagagagggagaagacaaaagatacatgtaggggcgtacacgtatctattccctctatttcaaattataagtcattttgattttagtcaaaatcaaactactctaaatttgatcaatcttgtggacaaatatagtaatatttacaattccaaattagtttcactaaatctataattaaatatattttcataatatatttgtcttgggttgaaaatattactactttttttctacaaacttagtgaaccttgaaacaatttaattttgaccaaagtcaaaacaatttataatctgaaaagttgtttctaagaaacaataccatctgttcctttttaactgccaaaaaagaccggcatatgtggactcgatccattaaagtcgtgcattcgttgtgagacttggtagcgaagccaagcaaaccgcaaagcactaatcagaagtaccttagacaaagatttgatcactgactcgatgaactctatcatattggtagctacatatggacatggagaccggacctgaaagtgactagcgacaagaaagatcaatcactaagccagcatgcatcaaccaatcatagtagccacataatgtccttagatatttcagattacgataactaattaaacagtgtaacatttcaatgttacaaaacaatcctctagagaagtggcagggatcgaagaagataacaacattatacttgatcctgggagaatttctcatgggattgtcgacaacaagtcctgtatatctg

SEQ ID NO: 41739 - DNA, 640 bp, Oryza sativa
ggccatcttatatatatcatatagaagatttttcatggaaatagtcaacggtttatatcatataggagtataagattttcatggaaatactcaacggttcaatcttcaggaacaggatactttgtctttaaggggtaacgatagaaaaacctggatcctctaacttcgagggagtaaaggtaagtgtagtgtatgagtgtagtgctacagtggttcgtagatggcacagcaggcggtataaataaaacaaaataatataaacttattatattacagctcctatttcagtatacttatcatagaagctgcaactataccaaatattttttaaatcctgaataatatagagtggagttgactcttcgctgcctaaaaattaggctataaagacccgccgctcctcggctctactccacacccgaagtagaagccgtaccaaacgggtctaaaactatccgacatttattaatataagagcaagtccagtagcatactattagccagctatcaacatattttagtgagataaaagatgagagagaaaagcttcgggctatagatctatagccagctacagagtacggactccaaaacccaatgcgtgtatgataggtgggaccatatattaatagtatagtaa

SEQ ID NO: 41740 - DNA, 735 bp, Oryza sativa
  unsure (1)..(735): unsure at all n locations
ccataagtgcttgtggccaccattgtacatgtcctaacgcggcctcccaaggctgatcggctacgggtgtggttggtgttgatgtgcgggaatgggggagagacccgtcgctgcctctgatgccaccggatgccgtggcaggccttgtctgccaccaagaggtctggagggagagggatggatcagctgccctaggagatgtgtgagggagggagtaggtgtgatggagatggactagctgagagagagagagagctgagggacttagcctcgttggtttgtcactgtgctagatttagcctcgctgatttagattgcgaaaatgaattttcatatgtggggtcgaaagaggtccagtgggcttggcagtcaccacccatgatgacggactgatagggtggcgtgccgtatgttgggatggtaatgggcttaacatcttgacctacaaaatatgatggttgggccaaaaagggttgtgctgaaatttaataattttcttgtgctcaaaaatttaagagttgaaggggcttgtgaaagagtagtgagccttgaccatttaccacccctaaccctatgttcgtacattcgcgcaaacataagggaggaaaggggcataaaatggaataagttcactttgacttccttaacttgngggcgaatttgatttgaatccgtgaaccgaaatacaagatatcttgaacccttaataattttaaaacatatacatttgactcc

SEQ ID NO: 41741 - DNA, 765 bp, Oryza sativa
cgttaacaacaatgaggttgatcgagtcttctacagtggaagcaatacggatcaagatctcttgtcaatgagtagcatagatcgagacctgtggcggcatggattgaggcctttctagtggctatggcacggatcgccaatggttgagaggcggattgaggactttccgtggtagtatggatccatgcttttctaactgtggcaatagcgattgaggctggctagacgtgatggtggaggcgagtggagcaggaaggagacacaggtggtgagatatcgagcggatgcgcgcaagacccacttcttccattttttcagtatgtccccaataggagttatgtttttccgatcataatgggtctttctgacaattattagtcgaaaaactggccactgaagctcccattttcggtctagctgacggtactttacactggttttggcaatccctaggctataagcgaacaaagcagaggtccaaataataataagaatagttttacaataaaaatattttcgtagccacttcagcgcaattgtattcttggctctgttttctaatcaaacgatgttactccttttctttagctatatatatatttcttatggaagcttgtgtttggcccctcaatttgttactagtacataatggcgccaaaaatatggtctctatgtagatttgcccttactttcctataacctttatgccttttatttgctttgacatcaagcataggacataattttaccctatttgggttttca

SEQ ID NO: 41742 - DNA, 688 bp, Oryza sativa
cgttaccgaagaggagaagcttgagcagagtcggtgatggagacagaagaataggaggttgagagagagaggtgagtggttggagggagaagaaataaccctcacatgtgggtctcagaccctgtttaaatgggataaaactttttagtcctatcacattggatgtttggacattaattataaatattaaacgtagactattgataaaagccatttataaccttggactaattcgcgagacaaatctattgagcctaattaattcatgattagcctatgtgatgctacagtaaacatgcgctaattatggattaattaggcttaaaaaaattgtcacacgaattagctcttatttatgtaattagttttataagtagtttatgtttaatactccaaattcatccgatatgaaagggactaaagtttagtccctggatccaaacaccccctcactcgtcacatcatccaaaaccaaaaccagacactatactacctagaatcttgggtatactggttttacaagttgagagacgtgtgatgtatatctggtattgtggttctctgaggacgtaatttaaactacgtgtgagcataagggacttaaactgaacttattccaagagcgtgcaacagataaccgggccttatggcttataatcttgggcacactggttttacaagttgagat

SEQ ID NO: 41743 - DNA, 689 bp, Oryza sativa
aggggaagcagcccgagctccttctccccacaccatcaccatctctctcttctatctctttctcacgatttcactctatgtaccgccgcctagagccgctgcgccgcgcctcctagcgccgccgttgccggcggtgcctcgctggagttcgccgccgcctccccgaccgccggtcgctgagccgggactcgctgccgcggtgcgtcgccatcccagaccgagccgagcaaaagagcagaggaggaagaagaaggcggagccgagccgctgacaggctgaccccatgccccttttacctccatcccccactgacaagccgggcccgcgcatccttcctcccatccatcgccgataggtgggtcccctcttctgccgtcccagctaacggaatattccaacggaatattcccttacccgtcccaaaaaaatttgggttatttttttttcgccagaaaattttttattctttagaaattcgtagaaaatcaaccgtaactccgattgaccccgttcaagttcctaaatttttctaaaattgaaatctacacagtgccactattggttctctgatttgagctaaatttaatggcttttcttaattagctttgtttcacgtttagagcctaagtacgaggaagctttctgaccgccgttttcgagggagaaagacccgcaccctgtgcaaggca

SEQ ID NO: 41744 - DNA, 1244 bp, Oryza sativa
  unsure (1)..(1244): unsure at all n locations
ccccccccccccccccccgccgaccgccgttgtcgcccccgcggatccatcggcggcagcactggatccgtcgccccagcagcccgccgtcgtcgccactgccgcttccgtctcccccgccacccgccatcgtcgaccccgctggatccgtctcccccaccgcccgccgtcgtcgccccagccagatccgtcggcggaggcaccggatgcgtcgccccagccgcccggcgtcgtcggcggcggcggatcagtcgccccagccacccgccatcgttggcggcaccggatccgcgcagtgcggcggcgcacccgagtcggccaagccgcccctgccgtgncggcgttgagnaagaggnagggtcgcctcatcgtcgttggtgaggagggaatgccgggctgccgagctgaggccgccaagccggccgccgcccgccaccgccgctgtagccgctccctatggcggcggatccggccctcccgagggcggcgccgccggatccgccaaccgcgccgacgccgccggatccgccaaccgtgccgacgccattgccatccgccgctcggccgctctgagagagggagagggagagaaagagagagggagagagaggagagaaagagagggtgagtaaaaaattaatagagggagagagaggagatgaggtagaaaaattttgaagtgatgggagggaagaaagagtggaggaagataaaaaaattggggtggtatttttgcatgcggaccacttaaggagccgcatgcaaaaatagttattaaaaaataatttaaaaatatgagaacttggaatcaaaatttttaatactaaatgaactcaaatgaaaacgttgccaaaaacaaagttgtagaactcattgagatctaccaattttcttttggtcatttctccatccgagttttattgaactacagaaaatttgaactttataatataagaaattcaaataatttttttacatagtaaataatttcaaatagaaaagttgtcaacaacaaagttgtataacttatcaagatctgcaacttttgtattggtcatttttccatatgactttgtttgaacagtttgaatttgaatttcaaaatattacaactttaaacaacattttcaaatacaaaatgatttcaactgaaaaagtcatcaataagaaagttgtataactcatcaagatctataacttctattttagtcatttcttcatccgataaagtgatttgtaagatt

SEQ ID NO: 41745 - DNA, 889 bp, Oryza sativa
tatgttatttaactatttagtctgagtaagatatatttccatctttgcgggttcattgtttagtattcatactaagtgctctagtactaggactctggataaagaaggaagttcctgtacgagtattagagtagtaattaataacttagacgtggtgtctaggttagagagtattagagtagtaattaataacttagacgtggtgtctaggttagagattacctttgttttgtgtatcccatggatttgtccgaggtaggcggcaggtggtgacagccctgaattccgtcccagtaatcctccacgtttggatgcatcatagagctatagataggaaattacctttgcttagcttagaaaattaagaaacatagaaagtcctctctagcctagcctacctaccatcagttgttgtccttggacagtcttagtcttaggtagattacacacgttccctgagttcgatatccttttggggtcacccgaaggtgaagtgctacagcgatattccgtgcacttgtggatttatctgtggtcgtacgaaataccaacaagcatttctggcaccgttgctggggaacgggtgctaatttatctgagtctaggtcatcctcatatctttatttttatttatttttcttttattcttttccttgatggagcaacccacaattcaaaacctttctgctcctcgggctgatctttgtgagccgtcctgttcttcaaaaccaatcctttctgatggctacgaaatcagtcctggctttatagccatgattcgagagcaaaccctctctggtagtatcggtgaaaacccatacctctatcttcgggatcctgagctagtgtgtttgtgcctatccatcggaggcatgacacatgaaactct

SEQ ID NO: 41746 - DNA, 678 bp, Oryza sativa
ttatacttagggttcggttatatttagaccgattgagtagtaggaaaatatatcgcccaggctctatataatatgtataggttctgggtagatgaagagtaggtgcttaacatatggcggataagtaatattgtagtgtatgtgggatctgaatggtagtctcattaaggtttcagttgtctaagccgatatcgaggtacgataaatatcggctagggtttgggtgttcgcaagtcgtcgctacagcatgacgactaggtttggtgtcttctcgacccggtgtcaatagacaatacatcagccagaggtatgggaggtttgtacaggtttagcaagtcagaagtgttactttgacacccgtgagtggcgacggatcgcctaggatcacacagggcccgagagctaactgtgcggcgtgctatggaggtcaagcaaatagtgaagctccgaccactgtacgcatcgaggcgtggggtgccaggagcagcacttcgaccttgggtttggttttgccgggctttacaaccaatggttcaacgtcggggccaatagaccgcatccgtccccatggaaggtgtaaagttccaaccgacggctttttagtggctaaagggtattttgggataaaagaaaatatttaaaaaggcaaatataaattcaaataaaatagcaaattgg

SEQ ID NO: 41747 - DNA, 1041 bp, Oryza sativa
agagaattaagaaatatcgtctaattcaattttagaaagtttacagacccaaaaagcagggaggctggggaaatggctatggaaaatgatgaatgaagagggtttgttgcaaagtcttctgaaggctaaatacttaaaaaaaaacacccttaaacagtgtgttttcaaacctggtgtttcttttttctggaatgggttcatgagcattaaagacgattttatgaaattctgttccaaaaagattggtaatggtgaagatacccttttctggcaggaaaagtggctagagaattcatcacttgttgagatgtatctagaattgtacaatataactttgtcaaaaattaggatagtagataaagtttttaagggcgggctggataggctacagtttaggagagaaaaaaattacagttcttgagaaaataccttaagatacctaaattttacactaaaatttttagtaccttgaggtattagtagctagaggcattaaattttacactagaaaatatggcacctccaggtaccttatcaaggatggtaaaattaccctttaggaaagcctgatagaaggaaaggctgttgcctggggtaagctacagagggattgtgaaaatgttgtccttaacaatgagaaggtgcattaatgtgggacttggataagagaaaatgtttctctgtaaaatctttatataataattcacaattacaatgtctaaacttcccctttaggaaattatggaatttcaaaatccctgttaaagctagagttttacctggctgttgactaagaatatcatatttcttgtcctttgactacatttatttggaatgtggtggctagttcatttggctttaatttgagaaaatccttaacactcatcatttgttgggtgactggttccaaaagtttgagaaaaagacaaaccctgattgcggttggtattccagcagtactttggtgtatatatttggaaagccataaataatgcatgttttgagagaaaatggatttctcattccaatgatctgatatat

SEQ ID NO: 41748 - DNA, 543 bp, Oryza sativa
  unsure (1)..(543): unsure at all n locations
attcatgggtcccgcattgatatagacgtgctcctcaacggtgacataattttatcggtacgtagcaggccatttaagcattgttgtcaacggtaacatctcactcggaccaccttaaccgaaaaatgcatactcctatataattactacaatgtagccagttgagatccatacttggcatcctttatggaatgagtgaaaagaagatggcggtgataaaaaaagattttgtttgagccttgagttgatctattggatagagtagacaaaatttgtttaaggtgttaatcaatagggctaaattttaggcgcatagacattctttttaaaaaaataccaaggctgatcattccactatctaatagctttagtgacacagacatcctttgctaacttaccagttagtataagctntgatgttttatgcgttgaatatacatctaattcacctatgcatgtacatgggagataatatgcgtcggaatttgagctaatttgttaaaactatttggatgagggtgacatataaatcgatatcatata

SEQ ID NO: 41749 - DNA, 666 bp, Oryza sativa
  unsure (1)..(666): unsure at all n locations
agatttttcttttctgtctaattcatgcaatttatttcaaacaaaaacgtatcttattccaggcaataaatagagttagggtagagtttaaagcagccaatagaaanccgaaataataaagggttaataccaaaacagactcggactcaaagaggcacttgtttttttagatcttggaaagctcaggatgaatttgaatgtgggaccaaaaatatctgaaactagatctcataagctttctaataagaagctgatattgtcaaaagggcctattcaacagctctgcgtggtggattatgtcttgtgcctaaaataaccagcatcgtaaactcatattattctttttctttaccgagatttgctcatggctttatcttgttaggctccaatagttctctcagatttcttcataactagataggtgtgagattccttttatctgtgtttcacaaactctgttctatttatcggataaccataaaatactctaaagtaaagtgctacaccaataaatctgtgttttcttggatacattttgtgagggcataagaaataccagcaataaaccaaatcacaagtaatacttgcagttttctccttttgaattgatgtcttagaagtagaatatattatgacaatagaacaaatgcagcgtatgtagattgg

SEQ ID NO: 41750 - DNA, 627 bp, Oryza sativa
cgcgaacggttgatggatctcgaccaggattactgattgaaaagatcgtgtacccgccgagataaaagttcttgacttcgatccatattctcgattacagcaagacgagagacttaggtcgtacactctatcgctttttgggagacatgagagattaagttatacataccttttcagttgccacacgaggttgactaaagaagaccaacgttatctctaaactcaccgagaacgggtacatgagcttgattacagcaactccaatgtctgcgcgcggttgagaatatgaattcattcatttgcatcaaaggcacgagctatggtcggggttatggataccacataactaatagacggttactaaatgtcggaaggatccaccacataccatgtcttattcggaaactgtcttcagatatggaaggagctctggataaggaaagacaaccagagttctacatggcaaccacaaggactactcggattatatgcatattgaattacctaggtctacttgcacaaagagacacctgcgggtattaatacaagcccccctaggacgacagggggtcacccatgatgtgaaacgatcgacacgatcaataaccgccatgggagaccacgaga

SEQ ID NO: 41751 - DNA, 601 bp, Oryza sativa
ccttgtggccattaccgggtactggctgagagacgggcttttgtctagctgaataagtctgacctgttacgccagcctgaccgtcggtccaatcgattcaaccggtactcaaagaagcgttataaactacttttttccgttttacagtagaaaactttctagcattgtctagatccataaaagatagggactatatatacatcatgtgatagattttttagcctcctatcatgcagatttcttaccctttagatgaacatctaacggatgacattaatatatacaaacaaaatacaaaacaacaaacgggccacgtggacaatctaaagctcacgtgggtataaatgggctcaagtagttttcagacttacatcgtaaatatactaaaattacatatataattttcagacttacatcgtgaatatactaaaattacatatgtaattatagtgtaaatacgatgtaattcagacaaaccctctttgcggcgcggatttcaaaatttcaacaagtaaagtgggccctacataaactctgatggacacaacatacagtgggtcccacaaagagaaaaaaaagtcccacataaccgtgaaagccc

SEQ ID NO: 41752 - DNA, 1047 bp, Oryza sativa
aagaagctctcttagttaactcactttgctctagtgctagtagagttagaattagaatagtctctttagttctcaaagtgtaacatcctaaaaattcctgacattaaaaatcactaaaattttgacttttttaaaactttttgcatcatgctggaagttatggttgttattgcttgccaaaccataaatcgacgcaatggaaaaaaatcaatctaaagatttacacccgagcaatagttacgatttacaacgatacgatatttattatcaatcccataaatatttatgcacatgaaagccaggccaaataaagtacaagtcaattattaaaccctgtggtataaatcacaaatcaaatattaaataatcaaaccatgttgatagcctgatttcatatttaacaaaaggaaacaacatagttgaatataattcacttgaatccaatctcacatgaaatataagtacacatgaaatgatgatcacatcaatggcccgatctataatagagtttctcactagaatatataattaatatttgaaacaccttatcaagctcctcatagcatgaaaatcactcatataaaataatggtcatataaataaattaggctttatacataaataagaatatgtgagtgtttaattaaacaattagattaatgttgtactaagtctcaatttatatttatagaatgagtagacccacgtaaaatgcattgttatacaaataagttcattcaatgtgctattgtaataataatggccacattaggatattttaaattaattttagaaccctcaaagcctccaaaattatctaggttaattttagatttaaaactcatttaaataatacaataggaaaatatataaaatatgggtaatattaaattttggtcaaatttcatctaaaataaaacatatattgggtaaaactctaattgtgtgaaatctagaaattatgggacaagttttaataggaaataggcctcaaaagtggataattaggaaaaagtcactgttcattatggcataggtgtttgatgt

SEQ ID NO: 41753 - DNA, 3535 bp, Oryza sativa
accaaccgggattaaagataaaggaggggtctgacaccacctgccgttttttgaaccaggactaaaaataatctttacttccggttggtgttaccattcggaacaaaaaatcaaaaagtagctctaaccttagtcccggtttttattataaccggaactattgtggaatttgctggatggaccaaagatggtttttccagtagtgtattatatactaaaagtccattaaacgtcctacaaacgctctcataccgctatatggcactctacaaatgcttctatgttgccacgtggctctctaataaatttagagaaattaaaaaaaatctaaccgtcagttatcatttaatctggtggacctatttttttaaccattggatctataataaaaatagccaattaaatttatcctgaaaaggcccacgtacatgcccccatacgtgcatgaacgtacgtacttcatgcaccgggccccacgttcctcttttttttctctttttcacgcacatgagataaaaaccgaattatttattctataatgtattatgtgttttatttattcatatattattagagatttaatatcaaatatattattttgacacgttgtcattgtcatttatctcccactttagagttcgatcaagttcagtacgtgagcttatccagtgcacacagagtggtgcaagtcattagcacataattaattgagtattaaatataaaaaatagaaataaattaattttattttaaaaaaacttttatataaacatattcgcaatacacgcaccgcgtaatatactatttagtagttcgggaaacatgctcgatataaataagggagtagccaatccgataagcactttagaacatagccttaaatgtattatttagtagtaaaacattaatatatactccctccgtcccaaactataaggcctatattttttacgcgctcttcaactacatactttgaccattaatttattccatattatattcccaataaatatgaaattaacatcatatgaaagcactttaaaatatgaatatagtgatataacatgcataataattagcatatatataattagtatgattattagtcaaaagttaccgagtttgattttccttaaaatgaggtcttcctatattttgggatggagtaatatacaatatatttgtatacttggtcaatcatagcctaaaatatcaaacttatgtcctcactgattcccatgtatataagttctacatataagccactatccactgattgctaaataatattatttacgaggtatccatgcacaatgcacctaaaaattagctgatatccaatgagcatgtgcgtcatccaacactgaagataaatggcgatactaagtacacaaccatcaacaaactatagagtaagtagacgatgcaaacaatagttgactacaagtagattacaactgtgagtaataccatccctacacttctacaaacgctcataagatatcatgtgatactctaataaattagaaagaatctacgaaaagttatataaaaaagtaagcatatatccatcaatttacacttaaaccgatgatccattattttcaaccattaaattaaattagatatatgaaagtaatccatctgtcctaaaaaaccatatgatctgtctctacatacgtacacaactcctatataattacgtacccaatagatataaaaagaaaaaaaggaatagtgtgtatgtgattcgtcccatatggtagttttctctttctttccagctctaagattttcctaaattgaggatatatatatatatatacatagcaaccactcctagcgaggtggtaaaacaagccattgcctataaaaacattgcttcactctcatcccgtcaattttttttgaaagtatttttttactagcaatgtaaaagtcaatcatatgagctcatatatatatatatatatatatatatatatatatatatatatgtgtgtgtgtgtgtgtgcaaatgcacactatgaatacacatgcatgcaccatatccctatattagaaaaatattcattcagaaaaatgaaaaaacaaacgtatgtacgagagactactattcactagaaaaaaacatacatataactatattatatctatttttatgtcaccctcatccaaatagttttaacaaattagctcaaattccaacgcatattaactcccatgtacatgcataggtgaattagatgtataatacaagaaaaaaaaatcaaaacttatactaacttgtaagttagcaaaggataactgtgtcactaaagctattagatagtcgaatgatcaaccctgctatttttttaaaaaaaatatctatactactaaaatttagtactattgattaacaccttaaacaaattttgtctactctatacaataaatcaactcaagacacaaaaaaaaactttttttatcacctccatcttcttttcactcattccataaaggatgccaagtatggatctcaactggctacattgtagtaattatataggagtatgcatttttcggttaaggtggtccgagtgagatgttaccgttgacaacaatgcttaaatggcctgctacttaccgataaaattatgttaccgttgaggagcacgactatatcaatgcgggacccatgaatcaaggcatttgaaaaaaatccttagcggctatagtcggcttcatccgatcgtcaaaggagcattcatatataattttaattgttttatcctattaattggtagaagcggtatttttaaatatttatatgtagatttggacctgtgaaatatgggcacttgggtataatgtggatattaactttttatggtattaatgatgtattggggtttttttatacagctgcaattccatcgattaaaaagacacacatacttcaaaacaatgataataagttatggtgaatggtgaatttacatataattgggataaagtgatttttagttggacatgatagccattttgatcatttactacatatcaaaatcaatggtctatttcttacagtgaatatggcgagatatggtttcttttagtattctttttataggaaataaataaattacccatacatctgcgcgggctttcttcctagttcgttttaaaatataaaagatttgaagaatataaatacatacaaatatttaatctcttatattttaaaacatatgtagtatataactctttttatcctataataaataaatgattatttctttttctcaaagattgaggatgtagctagcaaaagtacaatattgacacaaaatatgtagaagatagaataaactagtaaaaaattgatacgtacagattaaatcagtacaatccatacaaaaaaaaaggtaggtacgtgggaatttattttgggaacatttaaaatccgaaatatcttatactatataactgagtgtatggtaaaatttagcggtgtaggatcctctatagtcgacctgcaggcatgctagct

SEQ ID NO: 41754 - DNA, 948 bp, Oryza sativa
gtatttttaaatatttatatgtagattggaccctgtaaaatatgggcatttgggtataatgtggatattaactttttatggtattaatgatgtattggggtttttttatacagctgcaattccatcgattaaaaagacacacatccttcaaaacaatgataataagttatggtgaatggtgaatttacatataattgggataaagtgatttttagttggacatgatagccattttgatcatttactacatatcaaaatcaatggtctatttcttacagtgaatatggcgagatatggtttcttttagtattctttttataggaaataaataaattacccatacatctgcgcgggctttcttcctagttcgttttaaaatataaaagatttgaagaatataaatacatacaaatatttaatctcttatattttaaaacatatgtagtatataactctttttatcctataataaataaatgattatttctttttctcaaagattgaggatgtagctagcaaaagtacaatattgacacaaaatatgtagaagatagaataaactagtaaaaaattgatacgtacagattaaatcagtacaatccatacaaaaaaaaaggtaggtacgtgggaatttattttggtaaaatttaaaaaccaaaatatcttatactatgaactgaggaaatggtaaaatttagcggtgaacagtaccctccaaaaatttagccataataataactcacaaaaaggccacgtgtgatggacacgctgctgctcttccaccgaacccaaaaatggcggctacttgagcttcccctctcctcactcccccttattccttccttccctcgattcctcttctctgcagcagcttcacactcccactcccacttctctctctacaatccaaactcactctctccctctctctctcctcatcaccaatgc

SEQ ID NO: 41755 - DNA, 985 bp, Oryza sativa
acgggctagggtttgggattttttggatttttattttttggggggttttggattttattttattttgtttgctgattttatttttgcatgcggccggtataagcgaccgcatgcaaaaatcccattttcgcatgcgggtgccctggccacatgcaaagatttgcattttcgcagacgatttggtgcatgcggttggcgcaaccgcatgcgaagatcgctccggcccatttgcaaaaagggtttttgtagtagtgtgggtagctttagaacaagttttatagtggagctagatgtcgcctctaatttaaaccatatcatctactcattaattaagagataccaagtataatatatcacatctaatacacaaattaaaccccaatattagttcactctcacatcatgttgcacttttcttaaaaattgtgtagaggttgtcgaggaatggatcattctgtctctctttagcttctctcctctacctcataacctgatcctatgtggcagatttaggggcaacatgtaaaggcttatagtacttgctcatattaccacatattatgaaggtctatttggtccacctaatgtttcttctttaactctagatgaaagtcttataagtgatattccctaggtgtcttctttagaaaagtaatgcttcagttgatgaatttactgagaatgaaattaaagatgcaatctttcagatggaacataataaagctctgggtccagatggattttgatgtgccatgagttccactcgacactcaaggctaggattggcctgatctttcggtgagttgtagataactatgatttgagagaaatgttgacgatctgactataaccgtacaagacgttgcgttgcgccttagagcaggtacaatagcatgctataagctagctataaacatattttaaagagataaaggaagagagagaagagcagtgggctacagatctgtagtcagctgcagcacgg

SEQ ID NO: 41756 - DNA, 620 bp, Oryza sativa
acgcaaacgcgcgagacttaatcacttgcctctcgcaaagaacctcgccgcccgccatgggtcccgccgccggcgctaccgacgtgaagtctctcccgttcttcaagaccctcaacctcgccttcttccgttggtcgcgcccgcttgtcgtccctggcgccggtgccgcgtcactgcaccggtcgcagtcgtgcaaggcggcgccgacaacgttgccgccgccaatgaagccggcttgcccagagtccagagagaagatagagagatagaggaggaggaggaaagagagaggaagggagaggctggcctgctgacgtggcatcctgacatgtggggcccacgtgggtcccatgctgactcagctgccacgtcgaacaaaaccagggtcaaacccgccgagggacctagtttgcactggttttgtaagttgggggacatgttgtatccggttttgcggtcgggggacgattttgtaattcgatgacaatttgagggaacttgggtgtactttttccttttcttttttactaaacttgctacaaatagaatctctggggtagctcagaaagtaattagtcccactcatacaacttttatatctgggaggaatattatggagg

SEQ ID NO: 41757 - DNA, 765 bp, Oryza sativa
atgataaaaatagctcccagcaaagcctaggcattatcattatcttaatcttctgccggcctagatcaccctcatttctctctacctttttatctgcaagcgacatctttgcgtaaaggtaaagaaaaccgtagcatatatgattactgggcatgcatcgcgtacgtggatcatatctttctgcataaaagctcaggtgagtcgctcattggcttcttctcttagtatattttgctttgcattgacgcatccaaagaaccaaaaattagtcttctatgagacactttgagacacggatgggagcagggaaggaatgaagaatttgttgtggtcagattcggccatatcactgcaggccctatccgggaatcggggcagtctctctcgaggcaggctctactgaaaaagaaaagctggagattttctctgtagcttctgtaagaactttcacagtacgcttaggtgtcattcggcttgagccaaccaggtcaaagattcaactccacgtcggtctctctcgttgccccatgaagaacacggagccaagttgagcctcaggttccttgtcatgattagcatttctcgtgctaaaatagtggcatcgtggatcatgtatgcttctaagggcttgggcctagctagcaaccgacgcctagcaagtgtagtaactgcactgctatctccatgagaatcaaaaccagagtcctacgctccttactatatagctgagtgtgtttaattcacgttaaaattataagtttggtt

SEQ ID NO: 41758 - DNA, 643 bp, Oryza sativa
cggcgtgcgcacctggaagaggaagaaaaaagcgggttgcttcttgggctagttgggaaactagagagagaagggccgaaagagagaaaagaagatctcggcccataaagaattatttgtgaatttctaatggaatagaatttgtatttggagggaatttgaatagggaattttgaaaggaaattatatttgaatataatttccaaaagggatattttctagtttgagtgcaatatttttggaagtggaatatgggcaaatttatattgatgcactcaattgtggggagagggatatatgaataaaagttgaatatataattgggaatgtggaaagaaaaataggtggaggaaaaagaatagaatttgaaccctaatatatatggcatgggtttcaaggaattgcttgaggctaaaaggaaatttaggtgacaaggatataatttattttcttagcacaagagcaattattcacaatatttgtaataatattattcttgtgccgagaaggaaatcaagccacaagaattaaattagcggctagatcaaaaggaagaattttgaaaaaggggactaaggataggtttggaatcaaaggatagatttaagatcaaaggatgggtcgacaattaattccaataaaa

SEQ ID NO: 41759 - DNA, 710 bp, Oryza sativa
ctctacttctaataatccttatttttaattccaaatttcagctatttcctaattgtatttctatatgtactctatactctacttctaatattccttatttttaattccgaatttcagctatttcctaattgtatttctatatggagtctatcctctacttctaatattccttatttttaattccgaatttcagctatttcctaattatatttctatatgtactcttgtctcgtcttctaatattccttattttttaatttcgaatttcagttatttctaaattgtatttctatatggactctagtctcctcttctaatattccttattttttaattccgaatttcagctatttttaaattgtatttctatatggactctgtcttttctttttctccgattaatgtgagaatttctaggccatgagagcgaacataaaggctcctttttctattcgtttaataatataatagataaatataaggtgcttgatctacgacttagctgaatttaattactttgggccaatcaattaagctttttttttccaagaattgaattaacttcgggaaggaagaggttaggaacttctcccagcacatgtcaaacggggtgactaattatgtattaattaactaaaataaattttaaaactagattaatataattttttaaaacaactttatttgctatcgaaatgttttgaaaaaaa

SEQ ID NO: 41760 - DNA, 744 bp, Oryza sativa
tctcatttacttgttgtatttatatttgtgcaatttacatttctagagacatactagagatcatttcaccctaggattgctaaactagacttaggaagtgtgatttactttcctagtgatatacttgagccactttcaccctaggattgcaaaacataaattagttgcttagttagtcttgtccctcaccgagcctagcaacttaggttagttttgattaggtgtcatttaattttaaatcacatattcacccccctctagtcgacttctcgatcctacagtgagcatcagggagactaaatcggggatccctacctggcgcgtgcgcgcccctggtgctagtttttggtagttagactaattctatttatcttagtctcttagataattacagtttgagataatgatggtagtagttagtattttttcgtgagatttttattaactaacaaattaaaaagaaatctatatctgaagtcaaaatttcaaaaatttgaaaactttcaacttgaaatttgaatttttcaagtcaaaatttgaaaactttcaacttttcatcttaaacttgaaaaactttcaacctagatttgaaaactttcaactcaaatttgaaaacttttcaactcgagatctggaaacattcaactcaagatttgaaaactttcaacccacttttgaaaactttcaactcgagatttaaaaactttcactcagatttgataaatttcaactcgagatttgaaa

SEQ ID NO: 41761 - DNA, 714 bp, Oryza sativa
catggcctagaaattctcacattaatcggagaaaaagaaaagacagagtccatatagaaatacaatttaaaaatagctgaaattcggaattaaaaaataaggaatattagaagaggagactagagtccatatagaaatacaatttagaaataactgaaattcgaaattaaaaaataaggaatattagaagacgagacaagagtacatatagaaatataattaggaaatagctgaaattcggaattaaaaataaggaatattagaagtagaggatagactccatatagaaatacaattaggaaatagctgaaattcggaattaaaaataaggaatattagaagtagagtatagagtacatatagaaatacaattaggaaatagctgaaatttggaattaaaaataaggattattagaagtagagtatagagtccatatagaaataaaattagaaaataatagaaattcggaattaaaagtaaggaatactagaagtagctattatattattaaaagagtttaaagtcaatataggaatacaatttagaagtaactgaaattcgaaattaaaaataaataatattgaaagataagtttagagtgagccttcacgttcgctctcatggcctagaaattctcacattaatcggagaaaaagaaaatgcagagttcatatggaaatacaatttagaaataactgaaattcgaattaaat

SEQ ID NO: 41762 - DNA, 789 bp, Oryza sativa
  unsure (1)..(789): unsure at all n locations
cgtgcgcctgagaaccgcatgactatacggctcatttgagctcggcaccccagcccgccttgtcaggtttgccaccatcagccactaccttctcaccacaagctccgtataccccaccgacaacatcgacacaccgctgcgtgctcgtcggtcagctgaaggaagatgatgcccctatgtggagatagaggtggtgtgtggcttccgttttccagcgatggtggtgcggcgaggggccaggaatgataatgataaggtgaattaggcttgggtagcagcggctattcacattaattagacgactgtacggctcgggcatccaatcaatttggagaaaaatagaacgctgatgtcagcgcccaatttacgtgcaaaactattttaaactgatttttctcttaattacttatctaaatcattatccgattgtaccattaaattcgttgcaattaaatctttaaaacaagaccacacatggatatattccgacgaaattttttttagcttattattaaattattttaaatattgcacgatgttcaaccaagtatatcggaattgattcacttagtagatcgaaaatgtttcgcttgtttaaatcaggtgttgtttcaccgtatataaaaataatgtttcagcaaatagctaaagaatggtttagttcacagcaacatttgatccatacgtagtgaaacattataagtacactaggtgaaacatttttcggtggataaaaaataaaacgaattccnttaataggngttcccaaaatatataaggttttttggt

SEQ ID NO: 41763 - DNA, 704 bp, Oryza sativa
gtatatcacatataactaacccaaaagttttatcctcaggaaaaaagaacaatttctttgctgcaccaacggttcctttggaaagtaatatatcttcctttttcagtttaagactgattatttttctggaaaccctccatgtcacccctgcaagaggcagctgcaagcaacatgactcagtgattagtgtcggctctgaataatttagccaatgtaatccgtgcattgtagtagaagaattggagggtacgagaagaatgaacagagactgcactcacctgctcaagtgctgcacgtgggacccacccatcgatttgtctccctgctgagccgggccccaccgccactgcagttgcattctttggtccaaccccggatgtcattgcagatggtgtggtaataatcagttttgtgttaatcatgcgtgatctgtttgccacaggatccagcattgatcatttctctctacaagccaccaatcattctccttgtttgcattggatccaacactgatcatgcgtgcttatggctttatgtcaaccattattactagtcgttactccgaagggagagtgcttggagctgatagctacgagtatccccgtttcgagcaagtttaatagtatagccgatataacagtcaattcatgcaatagctgattactatactattaatatatggtcccacctatcatacacgcatt

SEQ ID NO: 41764 - DNA, 659 bp, Oryza sativa
cttccaacttatattttgggatggagtaatatacaatatatttgtatacttggtcaatcatagcctaaaatatcaaacttatgtcctcactgattcccatgtatataagttctacatataagccactatccactgattgctaaataatattatttacgaggtatccatgcacaatgcacctaaaaattagctgatatccaatgagcatgtgcgtcatccaacactgaagataaatggcgatactaagtacacaaccatcaacaaactatagagtaagtagacgatgcaaacaatagttgactacaagtagattacaactgtgagtaataccatccctacacttctacaaacgctcataagatatcatgtgatactctaataaattagaaagaatctacgaaaagttatataaaaaagttagcatatatccatcaatttacacttaaaccgatgatccattattttcaacccttaaattaaattagatatatgaaagtaatccatctgtcctaaaaaaccatatgatctgtctttacatacgtacacaacttctatattattaccgtccacaattgatttaaaaagaaaaaaaggaatagggtggatgtgattcgcccatatggtaagtttttctttcttttccagctctaagattttcc

SEQ ID NO: 41765 - DNA, 649 bp, Oryza sativa
ctctaacattcacatatgctaagtctaataatctaacactcacatatgctaataatctaataatcttatattaaaactctaataatcttatattaaatctctaacaatcacttatttacatcacttgcctgcgcgaattccttcgatggctagctaccacttcggcttgagggacgacgacgacgtcttttctataacattactaggaaaatgtattagtctaaacgcaaaggaacatatatcgtatttcacgttttcaactatatatataatcgtatatatatatatatatatgctaggtttaataatcgtttaattatctcgttcgtacacgtttcgctcccgttcgttctcacatttttagtacaagtgcattcacgttcgttcgtgtttcgttcacgttcattcgcgttcgttaacgtttcgttcacgttcgttaagcgttcattcacgttcgttcacgtttcgttcacgttcgttcacgttcgttcacgttacgttcatgtttcaatcacgttcgttcacgttcggcaatgtcggggcgcgcaacaatggcggcagcggagcgctggcgtggcggcgcggcggcggcgtttcgtggcggcgtcggggcgtctcggcggcgtggcgtggtccggccgcgtggggc

SEQ ID NO: 41766 - DNA, 714 bp, Oryza sativa
gaacaaattttgttttctactcatgtgcatctgatttcagtaaattctaagattgtggaaatatattatgaagtagttcaaaagcttcagcacaaactgaaaatggagttggggattctagaatgctgagaatgttctgaaattggagaaattcgagaacaaattttgtttgctacacatgtgcatctgatttcagtaaattccattgggcaatgagcagataaagttcatgtgtttactaaattttggcaatgtaaactatccctttatgtctgaaacttcgcaggtgtatagcatcggttacaggcttctgcgtttcgattaacttgtatagtagacggatttttttttagcaatttcatttcaaaaatttcccctttgttgtaaaattcttgaattggttaggacttggggtattcacatggtggtcaacctttcaggatcttcctgaaaggcagattgtgaaatactcctacattatgcatatcatcagcttcagtgcaaactaactggaactgggtgttccgagattagttaaattgaagatcaaattttgtttagtggacatgagactctgctttgagtaacttcaagtgcgtattgtattgagcagttcccattcatgttctatagagagttttggaaatgaaacccatcccttttatctctgaaacttcccaacattatagtatagtgttgaacaatttacaggct

SEQ ID NO: 41767 - DNA, 965 bp, Oryza sativa
ttaaaggtaatgtggtgtatgagttgccatctaattaattagttgatgatgtgaataatattagatgcgacaatcacctcaatcacaaaactcaaaaggtaactaataaacctttttcccatctttttaatactcccccatcccattttaagtgtagtcatggtttttcgcgtctaactttgattgtccgtcttatttgaaaaaattttgaacaaatttaaaaacataagttacgagtaaagtactatttatgttttatcatctcataacaacaaaaatagtaaggggctgttcagattgatgccatttttaaccataccatttttttggcaaatttgtcaaaaaaaaatatatgcgtttagtttgttgccaaatttgatgaatacataagaaatcttgctaaaattttagcaatattgtcatcttgccaaaattttaacattggtaaggtttattttgtctacaatctgaacaggcccggcctaattataaaaaaatttcaaataagacggaagatcaaaattaggcacggaaatttatgactacacttaaaatgggatggaggaaatactatagattaaaactataattttaaataaatagtgggagtatttactgcagacactagtacactacccgttgagactgcactgttagatccacttactgttatatctgggacatgcatgcatgctgccaatgaagcagctggccaaacgcagtcgatcgcctcgagacagccatgtacagcactacgcgtgtgagactgtggaagggagtacattataggcctggtttatttcccaaattttttttcaaaaaccatcacatcaaagctttaaacacatactgatagcattaaatatagataaaaacaaaaactaattattgcacaattttcatggaaatcgcgagacgaatcttttgagcctaattatttcatgattagccataaggctcaaaaa

SEQ ID NO: 41768 - DNA, 588 bp, Oryza sativa
actaggatttgtccaagagttgtgtggtgtttattactcttggaggttgaggactcctagacgactaggtgtcgttcttgggccaccgatctacgtgtggttggctaagaaaagtttgtgaaggccggatctcgtctccgcaaggaaagagatacccttagtggaaggaggagtgcatttgtgcaacctcacgaggatagggttgaaaaagacccggctctttgcgagcccctcaacggagactagaatccccttaaggatttgaactccgggaaatacatcggcgcgtaaacctcggtgaattcctcactctctttaccttcttgttccattactttgtgctatgctaatattgttgttggtcgagctcacctctttacttgtggattgaatctagagctcttaggttgttctcttgtttatattgttgttgtgcaggtcagatagtctaatatcagttcagactatccgatcacataggactatccgacctgatattagacaatctgaccctgttttgttatagcttccgcatttatttttaaaaccgcctattcaccccccctttaggcgacatcaaggtccttt

SEQ ID NO: 41769 - DNA, 2104 bp, Oryza sativa
atgtttacataaaagtatatttaacaataaatcaaatgatagaaaaagaattaataactacttaaattaatttttttaataagacgaacgatcaaacatttttaaaaaagtcaacggtgtcaaacattttgggatagagggagtatattataagccgtttgacttttttttttcaaactttattgagtttcatcaagtatatagaaaattttagcaacatctaaaatatcaaattagtttcattaaatctaacattgaatatattttcataatatatttgttttgtgttgggaatactactatattttttctgtaaacttgatcaactttaaataaatttgactagaaaaaaagccaaacgacttataatataaaacggagggtaccagataaagtaaatgtttggtacacaggaccaacaacactagtctattttttaaaccatgtatcattttaaaattctgtttataccattatataaaaaagtcaaatgattcgtaatataaaatgaagagagagtataaggtaggtgaacgatgtatatttgtaacttcgagagaaggaaatgtgtgatatgggatgtgggttggaaggcggctagtaggttttatattattggtgacaatgaactggacagaatgagtttatagagtgtgttggtcctgagagggagacgggagtaaatgttagtagcagcacgaagtccaagtgacctagctaggtcatcagaaaatggttgggtttctatttgccatttgtatgattgagatataattatattggacttttatatatcttattatagtaaattttagtagcagcacgaagtcgaagtgacctatgtcatgcgaaaatggtgggtttctttttgccatttgcatgattgagatataattatattggactttgagtagattgcatcaacgatacacgaacttatcagataggtgcaatctagcgcacaaacttgtaaaatacttgtaaaacacttgttttgatgtatgagcttgtctagtacgtgcaaaccaaagccaaaatggcacgagaaggctgatttttcaaagttaaacattataaattatattacatgacatgcgtgctatctataaatttggtttctactttatcttcctttgtttctatttcttgcattgttactcgattttttatctctttcttcatacaatcaatatgccttattatatgttttgctaaacagatctttatctacgtgatatttatttacatagcattcaaatcaataacaaagtcagcaagattaaccatgccgtatgattttggtcttgttcgcacgtatcaaacaagtttatgcaccaaaacgagtactacatccgtttcaggttataagatgttttgcaaactgattcaaatttgactaattttgtagaaaaaaaataacatttttaacccaagacaaatttattatcaaaatatattcaattattgatctaatgaaactaatttggtattataaatattactatatttctctataaacttagtcaaacttgaagtagtttgactttgaccaaagtcaaaacatcttataacttgaaacagagggagtattttacaagttcatacactagattgcacccaactgacaagtttgtgtaccactgatgcaatttactcttggacttttatatgtcttattatatcctattaagtgttggttagctagggtttccatgtgaatatggcccaaggtctatattgtaagagcgatgctccggtgctctctaccagcagaaatgatctaaaccgttcacaattaagggtaaattagtaatttattaatacagtgattacgggtaactttgttatttatgtatttttttttccgatctagatcgatttgtggtcatccattgcgctgctatcgtttatatcccattgaaaaagccaaaggaaaaaaagagaaaaatgtttagtgactgctaaataatgattatacccctatgtacctattgcctattggaaggtcctaagttcgaatccaactatgacgtgcaatttttaaaagtcacttgaaaaatcatgaatttctagctagtgaggtgtgaccatggttggaatgtcc

SEQ ID NO: 41770 - DNA, 4572 bp, Oryza sativa
caacttctcatgtctctagcatattcgttctagctgaaggcttatcgtctctttaggtagttccacccgaagggaacacttctctacggccacaggttatcctgatgcctaagcaagatgcaggttaacaatgagaactaccaaagagttatcacctacagagccccttacataagcactaagctaaacaaatagactgggatgtacaaaggaaattacttcatataaaacaaacaaagtttaccatttgtttacctatggttttccctttcaggaacccgcgagcttacaaatagagctgaagtattaccttcaagcccacacagaggtcgatctttttataactatattagttcaatctatgaccaaaattaagctgttcacacatgcatgcctgaaggaattaaaaacataatcaaatatacttcacttgctaatcctgctgtactgaaactacgtatatacagttctctcgcccgaagctcatggcggcagtagatggtgcagcggcggccgtggaaatccggaggtggcagcagagaggatttgagatgctccgactagtggcggcggtgacgcagaaccagaggtggctgcaaggattatttggaagtgggaggggtagctcgggcgagcggcgacacggccatgttgctggaagttggctcacggtttgctcccttgtacagtgcttgggaggtacctcagtaacaaatcaacaatccaccgttcattcatatagcatactaatttaggaataggaaataatattaacaagggtagcttagtaattgctacattcctatttgctttacataatattggcatgaccctgaaacctccctttgtgtttaatcctaaccctataccccgagtgaaagaacgaggttggagcaggcacagagcgtgcggcggcggtgacaggcgggagcgatgggcgcatgcggcggctacgaccgcggcgcgcgtgaagggcgcgtgcagcggcggcgccaattagccaagtcagccaagctaacttaatttgattctgggaatggtaatcttgttgaactcatgcatgattaattcttaaaaagtaagtgaattccatattggaccagggtttgctaaactttgtatttcacaccatctaacttgtcaaaaggttgcagtttggactaaggaaatgtttcggctgccagcttgccgctattgttcttcgtcccacctacatgagtgtgagtactcgcacgacagcggcaaatgaagtgctcgacgggtcttgctgtgcagacaatcacgcgagatgctacagtgattctactctgatcctcccaggtcccgtggtatcgtgtaattgtattcccacaaaaaatccattatggtgaactcacgtcgacgcagagcgggaggcacactcgaaatcagcgacggcgacggcgacggcaacggtcggtgacggccgcggtcgtcgatggcacactacgaaggaaggggagcccgtgcgcctccaccacagccaccaccacctccaattccaccttcgcctggaatgggtcggggaggcacgcttgacagtggcagcgaccgccacggccgccgtgagcttgctgtcctgaacgaatcggagaatatagatacaaatattgaaaagatgacgcatttgccattaactgcacaaatcaactatgaaagtcaattaccattttaaccttccacctctcatagttggtccacccttttaatacctttttcctggtacacgttggattattgatgatcaacggttgtaattaattccaagcaccgaataagatctacttgttcagggaggcagtgagggtatcacacacaaggataccgtcccctaacatctctgttaaattaaataaaattatttttaaaattacacggtataatgcagacactcacaacgcacgtatactcacccatatgaacgcacgtacacaaaccctacccctatgagcatcttcaaagattaggccggcaaatccttgatattgacgaagtcaccacagacgcctcgctgtcaacgggtacgtcgtctaccactgaaattacaatgccgttaaatcctgaaaatttcactgctaaggggagtcgaaccaaagaacaaaggtgctactgaggctcttgtaaacattaggttacatgtcctttcacaaattaaataataattggttgcaccatataaatctatatggccaccaagcagatgcccttgagtaggaaacacatggtgggaaacaaatttaattgctcaatccagtcataatgtttaggataaacttttaaaattctaaccatcttgaaaaaaccaatttacccataattagaaaactcaatgatcaggacatcacttcttcagatacacatgctactcctcaagttgttttgcaaggtccaatcactagagctcacattcgataattaaattttcaagtgagcttgtttctaagtacttctttacatggttttgaggatagattattacctaataatttaattatgattagaaactatggagagtaccatggagtgcatggagagagaggctaggagatagacaaggtcattatggatgttcaagttaagatggaggtcctactcatatcaagttcgagttgacctcgggctccaagagtagtccacactaaattcgtcgctcaagttgcatttggactccgatttcaatgttcatcatatgtatggaaagttaatgagaccacctttcccatgtatctagtcccacgtcaaaattccttccaagttaatgggaatcatcgaaacaaggagtttagaatctatcatggtgctgtgttatcgtctttgggttcattgggccgtgtatcgtctctagtccaataggtacgcatccaggggtccagtaaccgtcattgagttagggttgggttttacttagataatttctaccatcacggttttgctgctagatcggtttttcgaacaccccaacttcgaattcttgattaatcattatctgcaattgagttgttatctttcttgttcttacttgtatttttcgatttacacacagggattagccttctcggcgaggtcaactgggtttcagtgggttgataactagagttgacgtgatgttgcgattgtagggtttggattgtgttgattagaaaccggatcgtgtgtgtatacttttcgccaaattgatagttatcttcacctaacggaagatcgggcatcccgttgccatcattcaagatggttcaaaaatccacatccttgatttaagaaggaaacattagcaacataagaaacattcgtgaaactttgacgtataagagcaatcataattctagcatttcagttgctaaataatcatttttttctcccatatattactgaaagataaatatttttggtgtggtttgaaaaaaaataattatgtcggtacaatattacaatgataaaggattgattaattaatggaaaattttagaaaaatattatcgcaaagatacgtgatttgtaaaatacaatcgtaagtgagaataatatatggggctagaccttcatgttagcatgtactatatctgtcctaaaatataagaaactaaaactggataagaaatatcttagcttctctaaattcgtagcagtaggatatatctcatccaatcataagtttttatgttttgtgacagcaggagtaaactatacataagatgttcttttctaacaccttgatttttgcgattgtactaggcaaataggcccaactaattaactgcatagatgtaagtgtacctgcaaattagaactgttttctatcaacatttttatcatttaatatttgaaaaaaaataaaactgacatcaaacaatgtttaattgggtgtacacgtgcatgggttaacactcatcttctctttttactgggaggaggctagtggctgccatgcagcaagagacagggagtccgggctcctagctatgaaatgtgcagcctatgtcctggtcctgctgccttacatgggccgggctggctacggccattttggtaaacaaaggaataagtttactttagaaccctcaatttgtcaccgagtcagaaattcatccctacactaaactaccaggtacctgacttacagtaccgtgtcaactttgatccattggcagcatagagcctgtttgatagggctccaaactccaactccgatgggagctagctctagtgggagctagaaggtgggagctagaagtcaattgaaaagtgattggccagctacagaacttcggggctaggcacaggtgacggcatcggtggccagggcatggacggcggcgtcgactgccaggcacggcgacggcggcagtagccatccgcgggcggcggtggctcgcctcgtcgtcttccagctcgccatccagctcgtcgtccagctcgccgtccaccgtcccagccaggtgttgcagggccccgctcacccaccgggtccactgcggggacggaggcgggtggcgttttccacccgaccacctccgcggggccggggtcgggggagaagtcggggggtgggggcgg

SEQ ID NO: 41771 - DNA, 798 bp, Oryza sativa
atatattatgaaaatatattcaatgttagatttaatgaaactaatttgatattttagatgttgctaaaattttctatatacttgatgaaactcaataaagtttgaaaaaaaaaagtcaaacggcttataatatactccctctatcccaaaatgtttgacaccgttgacttttttaaaaatgtttgatcgttcgtcttattaaaaaaattaatttaagtagttattaattctttttctatcatttgatttattgttaaatatacttttatgtaaacatatatttgatttattaaatatacttttatgtaaacatatagttttacacatttcacaaaagtttttaaataagacgaacggtcaaacatgattaaaaaagtcaacggcgtacattcagagaaaagagggagtaaaatggagagagtactggcctttgtattatctgacacataaaagatcgagctagcgatatttctggataatccaatctaggatgataaattttttggatcggtcgacgctgactaagtctaaatagtcctccctccgtccctaaatatttaaccttgttaatatttttaaacatatttgaccatttccaaaactttggtgaatattattaaaaacttgagtagtagtactttatttaacaatgaatcaaatgagtagaaaaaaattaataattactttatttttttaataagacgaacggtcaaacatatttaaaaaagtcaacggcgtaaatatttagggacagagagagtacatatatacgcgcgcactaattacagtttgcctata

SEQ ID NO: 41772 - DNA, 1980 bp, Oryza sativa
tttttttgacaaatttgccaaaaaaatggtatggttaaaaatggcatcaatctgaacagccccttactatttttgttgttatgagatgataaaacataaatagtactttactcgtaacttatgtttttaaatttgttcaaaattttttcaaataagacggacaatcaaagttagacgcgaaaaaccatgactacacttaaaatgggatgggggagtattaaaaagatgggaaaaaggtttattagttaccttttgagttttgtgattgaggtgattgtcgcatctaatattattcacatcatcaactaattaattagatggcaactcatacaccacattacctttaatatactactctcgatacaatacaaatatttattttattcactctcatccaatcaatgtcactcttttctccttcccccttaaagtttgtgaagaggttgcctcttgcatgagagcaagtttaatagtacagccaactactagctccaattcatctataaccaatctgatagctcatttatacaatagttacatactacactataaatacatggtcccacttatcatacacacactgtatcttggagttcgtgctacagctggctacaaatctgtagcccgttgctcttctctctcctcatttatctacttaaaatatgtttgtagctggcttatagcctactattgtacttgctctgagggatgactcattctctctcatctcctctttcctccacatcatcatttaagcttagatggcacctaagagatttgtgcttaaatacctatagtacttgccctgagataggtgagtgccctgagataggtgagggatagatccggactagttgacaactataataaaatcaagggtagtacaactaatatagtaatttaatggtaaaactcatcttttattagctagtaataaatcgttatatctaggataaaaattaaattatagagcactactacaaaatcatttttataatatctagcttttaattttccagatggattaaaaaattccacttgtaaaattaatagaagttcctatagatctagccccggttgtaaaaattattaacctgaaaggggaccgtttataaaaatacccttattttcataagcggggcctaaagagacccgcctgtaaataagactacctattaatcttttgacaaatttatagtttcgaatcttgccgaatttcaaccaatggatatagcccgttttagataaaataacaaaaaaaaaataaacatgtaaaataatcttaaatctagagaaaacattattgtaaaaaaataatctaatttcggtacattgtaattgagtgcaagtgctatgtaactgagtgtaagcgcactgttaactgagtttaagcgcactgttaactgagtttaagtgttatgtacttagtgtaactgtaaattaaatatgcaagaacacgaatcctatgcaagattctacgtacgaaaagtgaaagataggaatccaaaagtccgtcgcaaatgaaatagcgaatccgccgttaaaagcaaccattattaaaatcgacagagccaccatgtattcacgctaagtactctctccctggaccctccctctcgctcagctccctcgatcccctcttcctcaccctcaaaggagcaaagcccagggccaccataggggctcctctactcccctgccatctcctagatctggctctcctccttccagatttggccaaaaggggaggagactagcggttgacagtcgttacagacaaattttgaccgccaatattactaaaatatataatggagaactagctatgcttataatgcatatttgttttcaaataatatagttccacttatacttggagaataacatgttgcaggaatttatcaaataaaataaagaaaaagtgaagagacccctcattcctaagcaagcaaatggattaagataggctcacaagtcagg

SEQ ID NO: 41773 - DNA, 2076 bp, Oryza sativa
  unsure (1)..(2076): unsure at all n locations
taaaatanaattacttgagatcatggggttttgaattgatgagaaactattgtgtcgaacaatggaggtggttcctatgataaaatttagggtattttaaatcgccaaaaggatagcttacaacctcaaaacaaattcaataatatcattttttttgtttgattgtattttaatatatatatatatatatatatatatatatataatatattcattctaaccgtccttgtaaaatgtttgaatttttctatcaagtattggttttaaatccaacaaaatttgttcaattttcaatttatttcatgcccatttttattttttttcttttggatagttttattctatgaatcatccttgaaatgatttgatctttgcaatttgggacaaaaatatcagaacacataacctagtatggggtaaaggtatacgttctaaattttctctcctgaaatataaaagtaatggtcataatgtatttagcgaatcatcactaaagtgtattgtcttataacaaatacatgtttctagattgttctacgtcaagactttacaatgtactgtagcaagcttaataaaaataaataaaaaaaggacatggtcattaattcctatatggaactgacttgatttattgctaaagccactgcaaggttgttccacggttaaaatccttaggtacaacccacatgcttatcgatatgatgttcaaccaaccacaccttcattttcaccctattgtctatattgctagatgaatacctgctatgattagtgacttcgtagatcatatgtgtaattcggacgctatgatcatctttcttaaaaatatttatctatgtactaaaaacattattttgaaagtatcaaggtcaatttgtataggcatgttaagagaaattaattaagttggcagaaagtctttagatgcctaacatgatataagtaataaatggaggtccatttgtgtttttttcccatatagataattttaattttaattgtcaaggagataaaaaatagagagaaaagaatggcgcacgctgtacatgggcagggagggagggagggaggtttgggatgtttttctaaatgattaatctaacagactaaaataatgtgtcagatgtttatgtcgaaaccgatggtcggatgttttgttttcttgtcagaattttattaggattttatttgatttaagagaataacataatatcttaagagcatttataagatgtgtaatcgacttttaacaccgtatgccgcaaaggagggagggaagaaggtttagggtgttcttttttttttaaaaaaaaagatctaatgacctaatataatgtgtcaattaatccattgaaaaaatgtgtccatcgatttatgtcatatctaatggttgggttttttttttccaaaatttctaagatttttctctaatttaagaatgccatataatagcttagaggcattaataatatatttaatggattttaacaccgtacggggatggggagggagggaggaagagaggtttgggttttttcttattaaaaaactaacaaatcgatagccaaatgttttgttgtttttttaatattttctagtattttatttaatttaatagcaccacgtggcagtttagaggcatttgtaggatatttagagttacagagcgagagtgctagacctaataggtggaggtctctttgtgatttttttaatgtaaaaataattttgattataatttctcatgaacatagctcgttggtacgtacgtgacgggaggttcggaatgcgtgcttttttttaagaaaaaaatctaaccttctaatataaaaataatagatcaccgatttaaataaaaatcgatggttggattagagtgccacttggcgacctaggagcgttcgtaaggtaccacttggcgaattaaaagtatttttaagatatttaatgaacttttatatataattatctttttcttgaaaattctaagaagtatgtgatatagtagcttagaggtgttcataaagtgtttaatggattttaacaccgcataggggtggggagggagggagagag

SEQ ID NO: 41774 - DNA, 1570 bp, Oryza sativa
tagctcgttggtacgtacgtgacgggaggtttggaatgcgtgctttttttaaaaaaatctaaccttctaatataaaaataatggatcaccgatttaaataaaaatcgatgattggattagagtgcacttgacgacctaggagtgtttgtaaggtaccacttgacgaattaaaagtatttgtaagatgtttaatgaacttttattatataattgtctttttttgaaatttaagattttatttaatttaagtatgtgatatagtagcttagaggtgtttacaaaatgtttaatagattttaacactgcacaggggtggagagggagggacagaggtttgggattttttaattaaaaaatctaacaacttaaatccatcaatttaagtagaaatcgatggtccatcgttttgtattttttaagattttttaatactttctctaataatttaatagtaccacgtagcgatttagaaatagggagagctgctagtcctagtagttggtctatttgtgtttttttacctgtaaaagtatttttgtttttattttctcattaaacagaaaataacacatgaatgaaaatatggaaagacaaaagggaagtacgtacagtacatacgcacgtacgttcggcgttacgtacgttggtttcttttttctttataaataaaatagatctaactaaatccaaccatccaaaacaatgggtctaccaacataagtaaaaatagatggtcagatttttcttatttattatggtgccacttggcgatttgagagtgtttatagggtgtcacttggcggtttgagagcgtttataggaaatttaatggactttttagtatataatagatagatagataaagtggaactcttaggttatatggtttcctagtgttcataatagcaaagacattagctatttggtaaatccatagaatactgataataacttattagtaccaattacaatgacttcagatcagacttttaagtcctgttatagctatttatatatgcagctactccctccagttttataattcttaacgtttttgacagtggcacgaacttcaaattatatctttgacattgtttttctactataatatatacaataaataaatgtatgttttacttttattgtagaactttgaaagacaaattcatatatgtttttcttgttgttttaaactaaatactttttaaagttattgatagtcaaagttacaaaagttaaaccttgtccaaaatgtcaagaactgtagaaccaagggagtacaatttaagcagctattttcagagaattccttatgcttacatgtatgatgttgatcgattcccataaaaatattctgattacatgaaatcctaaggcgctggttaaatctcaccccaaaatttttcaccctatcacatcaaacatttaaacacctgtatgaagtattaaatataggctaaaaaataactaattgcacagattacgactaatttgcgaggcgaatcttttaagcttaattctacatgatttgacaatatggtgctacagtaaatatttgctaatgatggat

SEQ ID NO: 41775 - DNA, 592 bp, Oryza sativa
cttttcttttcatggaaaatttcatttctgatcctagtagtagaatatatctagattagctttctgctcttgttagactcctaagcaagataaagttaattttagtatagatatagcttggattagtgatgggcgtgaagctagctagcagtagtagtagtgaactagtgattgattgctgctgttttcatgtttgggttactggggtgcagtgtgttccacttccaccaacacactagtggcctgaaacttgtgcaatctgaggctaattggcttgattgtttgcgtggtttgattaattagtacacatgtgtaggtgcagacatgactttgtctgtaatcttatcttagggagagcgttatatttcatgtaacacgtgctactcccttcattccacttaatcaccctatagtttttttagttattctcaaataatcatcatattaatattattttccaagtctattcattatatgtacataggagtaaaaggatattgatatatccatgcacataaccctttataaaccaaaatacaatgttttgatttgtggtttgctagaaaatagtatggatgcatgtatacatcaa

SEQ ID NO: 41776 - DNA, 530 bp, Oryza sativa
ctatagggcgaattcgagctcgggtacccttaacctttaaattatcgtaaatctatagatttaaaatgatgtatcaaactatagatttatcaataaatttatcataaaactatatgtttaagactaagtatcacaaacttacagattatgtagattaagatttggtccggttcttttctccaacaagagttggatgaagattaagatttttgtagtacgcttttcaaactgttaaacggtatgtttcgtgtgaaaactttctatatgaaagttgctctaaaatatcatattgatctatttttgaagtttgtaataattaaaactcaatcaatcatacgttaatacaacatcgttttacgtaaaaaacttaatcttcatcttcatcttcaagagaaaagaacattagtataataaaattatcacaaaactacatattctggggtctaaatcctcagcattaatgaatatgttgttttgtggtaactttgttactaaatctgaagttttatgatattccacattaaatctat

SEQ ID NO: 41777 - DNA, 1465 bp, Oryza sativa
tcctcattttttttattttaattccaaatatgcgccatgtcaatcccacgtgggacaaagactaggtcaattgtgccacgtaggcgccacgtcagtaaaaaccaccttcaaaaccgtttagggagtcattttgcactggttttaatagttgggggagtcgttttacctggttttgtggttgaggggtatgttttagatttaacctatagttgaggggagtcaaaggatattttttccattttttatgatcgcttttgctcatcgtcttcgtcttctcaaatttcatgtttcttttctcaaaaaaaaaatttcttgcatcttcttccttttttttaaaatgcatttcatgcttctttttcttactaactgtttcttaaattggtcgggcttgttttaacatcaatacaaaatagcccaatgtagcacatatatagattaaatcgactggtcacgaagcctcaatcgtatcgatcggtcgatcgatcatataccagcatctatgtactctatttattaaccactaaattttgatttttgaccaaggttagatggactttaaccgttgccatgtgaaatatgacgcgccatatgaaaaagattggggggagtagtaaagtatcttgaattgaaattttggatctttttttttggaccatgggtttctcaaaacaaataaacatgaaaaatgcatgattagaataccatcacaccttaaatcttataagaaataaaaatacacagaaaatcatttagatgagcatagaaaaaacacaaaattttgagtatgaaaagaggtagatgcaaaggaaaatctcaagaggttaaattagagatcatgataggaattcttcaaagatccatgagatttgtcaacttgatacacatgatctggctctcgatcaatacgatccaaattcctagtattacctgtctagattcgtagtagtagaatgtgtcacatccaacgctaggtttttatattctggtactatgaatctaaaaagagagttgtccagattcgtagttattctttcgttccaaaatataagcactttaagattagcacaaatattaagaaagtattgtgagaatgattagaaaaagtgtatgattagttaagaagagagagtagatgaaggaaaatggtttgtaattggttgagaggagcaggtaggtggagaaataacttcattttgagacaatgtattgtgctagaaatagctacattttagaacagagatagtattaagttgtgtcacatcttatttaattttagatttgtttttcatgaaacatgcaaagtattttaatttataaatactttgtgttcgattttagtgcatgcaagacaaaaactcattaactcatgattaattaagtattaataattataaacttgaaaaatatatttatttaaaatttttaaataatttttatacaaaaaattttcataaaatgtatatcg

SEQ ID NO: 41778 - DNA, 851 bp, Oryza sativa
ttgagtaatattgtcatttcttttattccactttttgtctttttattgattgtattcatgctgcagcataaacttatctttatcttttagttacatgcccatgcatggttgtttgtcctgtcttgaagtgatgccaaattatggtagcatatgtatatacgtcatcttctgaattttttgccctggtattggggtacaccgacacgcacacacaaattcttcaaagtatatatgtatattattggtgaattatatgctatgaaattagctgctattagcagaaagaaattaatttatattcacacaaataaccaggattggtatttttaaattatttattattttattttattttgtacatgatcttggcgggtggcgaaacctaaaagatcagtaggtctgctctaatcaatggtacgtaaaaatcctactcggtactcgccatatgaataacttattcgtgttctacaaacaacttctcatgtctctagcatattcgttctagctgaaggcttatcgtctctttaggtagttccacccgaagggaacacttctctacggccacaggttattctgatgcctaagcaagatgcaggttaacaatgagaactaccaaagagttatcacctacagagtcccttacataagcactaagctaaacaaatagactgggatgtacaaaggaaattacttcatataaaacaaacaaagtttaccatttgtttacctatggttttccctttcaggaacccgcgagcttacaaatagagctgaagtattaccttcaagcccacacagaggtcgatctttttataactatattagttcaatctatgaccaaaattaagctg

SEQ ID NO: 41779 - DNA, 547 bp, Oryza sativa
taaaatggtaattgactttcatagttgatttgtgcagttaatggcaaatgcgtcatcttttcaatatttgtatctatattctccgattcgttcaggacagcaagctcacggcggccgtggcggtcctgccactgtcaagcgtgcctccccgacccattccaggcgaaggtggaattggaggtggtggtggctgtggtggaggcgcacgggctccccttccttcgtagtgtgccatcgacgaccgcggccgtcaccgaccgttgccgtcgccgtcgccgtcgctgatttcgagtgtgcctcccgctctgcgtcgacgtgagttcaccataatggattttttgtgggaatacaattacacgataccacgggacctgggaggatcagagtagaatcactgtagcatatcgcgtgattgtctgcacaccaagacccgtcgagcacttcatttgccgctgtcgtgcgagtactcacactcattgtaggtgggaccaagaacaatagcggcaagctggcaacccaaacatttccttaatccaaactgcaacct

SEQ ID NO: 41780 - DNA, 941 bp, Oryza sativa
caccgccccccctcacccgcctccattcctgtttctctgtatgaagttgcaacggtgttatttttattttattttttcggatgttttttcacactcaggatcacgatacaaccaaccaaaaaaaaaataaactcgaactaccacttagctaagtctgaaaatagctagcataccacttagttgcaccttcactaaaattagaccataactcctttagtaaaaccctttgatcagcatgttaaacataatgcactctaccactatatgaaattacttaatctaattcaaaatataaccacatgaaatgacatatataagttaaacagtacagagagatgcaatttttttatttttattttatttttttaatatttttttcacacttaggagaacataggaaccaaccgtataaaacataaactcaaacggacaaaatatgtgacttgtagaattttccaaaactctaccgaaacggataaaatatgtcatctattaaaataggcgtaactttctcatacggactcggaatcaggcaaataatatatgcacggacatttacagaaaaagttacatccgagttcagcaatattaaaacctccaaattccgcttgcaagattgtgtttttgaggagagaagtttttcggtatagctttagaaaattccacatgccacatatttcgtccgtttgagtttattttttatatggttgattcctgtgagttcctaagtgtgaaaaaatatcaaaaaaataaaataaaattaaaaaattgcacatctctctcctctgcactagttcggagagaggagaggagaggaaaaattctataggtcacatattaggtccatttgagttcaatttttctatggctggctcttgtgtatccctaagtgtgaaaaaaatagcaaacaaataaaacaaaaataaaaaatttcggggtgg

SEQ ID NO: 41781 - DNA, 943 bp, Oryza sativa
ggcgccagctactctggcgccccaaaaaggaccatttctgggataagtttttctaggggtctatttgcgaaataagtttttcaaaaggaccaaaatgtgaaaaatccagaaggcggaaactggcgctccgggggccttgcgccggattcgatagtcaaaaagtatgaattactaccgaactattacggtaataagatttacccttctaaatacaataccggacatttgatatcacaaactcttaaaatcggattatcactctaattcgattcgaagcggttttcagcctacgtcgcacacacgtgatgatacagtcagcaaaaacaaataaaaaccggtggagcccacttgtcagcgcttttttctctctcctccttctctgcctctctctcggggaaaagaggagaaagcaccggcaggcagggaccagggccaatccaatagtgagggcaccgaggacagcggcgagtagaggtagaagcagctgtgggcggcaggcgaggagccgaggatggcggcgggcaggggaggaggcaactgctcacggcgagcgaggtgtcgaggaaggcgaccggaggggcggaggtagctgcgggtgacacagggggagccgaggagggctggaggtggcagaggtagctacaggtgacagatggggagcggaggcagctggtcgcccgacgaggatgcagcgtacgtactacacgccggggcagccctcgcccggctctgatggcggccacggccgcggcgagggcgacgagacgtggagcgaggcggcgggatcctccttccccaccgtcgtggctacgcggagctcggacatgtcggggttgaagaaattggacacggcgatgctgctacagctgtccccttgcccttccctgcgcaaagcccgctgaccggttccccctcctcttctcgcgccgccgccaaccacccg

SEQ ID NO: 41782 - DNA, 1527 bp, Oryza sativa
gtcgccgaggtcggtcatcaccggacccgagccggatccgctgcgcccgagcttgccgccgccacccgccgccgtcgtcatggccgaggttgtcgtcgccgcggggaggtcgtcgtcgccgcacctgagccggatccgccgccccccgagctcgtcgtcgccgaggggagctcgtcatcgccgtgggggagggcgccggcgccggatccgcgtgggaggagggcggccgacccctgatctgctcgggggagggccgccgccgtcgccccccgcgtgccgcctctcgagcccgccgccgccactgccgccgccggcctctgtgcgtggagaggagaggatttgagagagagggagagatgaagagatgaggactgagagagagagagaagtagtagataaggccggttgaagtagtagttgaaatatttttgaacggttgagagggaaataggaggcccgcatataaaaatggagcacttatttttacatgcggaccacttaagcgtccgcatgcaaaaatcatgtgttttttaaactttaaattgatttttatgacattaaatcaactcatgtcaaaaagttgtcaaaaacaaagttgtagaactcattgagatctaccaattttattttggtcatttctccatccgagtttgattggactatacaaaatttgaattttaaaatataagaaattcaaataatttttcgggtagtaaatgattttaaatgaaaaagtcatcaataataaagttgtataactcatcaagatttacaacttttgtttttgtcattttttatatttgacattgtttcaacagtttgaatttgaatttcaaaatatgacaacttcaaacaacattttcaaatactaaatgatttcaactgaaaaagtcatcaataacaaagttgtataaatcaacaagatctataacttttattttgatcatttattcatccgataaagtgatttgtaagattgttcacgaaatgtgcatatcatatagtttataaaaaatatatagtttataaaaatatcagagagatgtacattttgtgaacaatcttataaataactttatcggataaagaaataactaaaatagaagttatatatcttgatgagttatacaactttgttgttgatgactttttcagttgaaatcaattactgcttcaaaatattatttgaagttttcaaattcaaaattttaattgataaaataaagtcacaagaaaaaaaaaagccaaataatagcagtaagaacacaataaggatgattttagaaacatttagaaaaaaaatcatctaatttggagttcatatgagtgagatacaccagttttaaatttttcaaattttatttttgcatacgtcttcttaagtggcccgtgtggaaaaatcgatttttccatgcgggcacttaagtgagccgcatgcaaaaatgagctcatttttgcatgcggcccacttaagagcccgcatggaaaaaacgaatttttccacgggccacataagaagacgtgtgc

SEQ ID NO: 41783 - DNA, 1079 bp, Oryza sativa
tttttccatacggaccacttaaggggccgcatgcaaaaatgaccatcgatttttgcagacgccactagttgtggtccgtttgtaaaaatcaagaggtctcgtatagaaaaatcactttttttaagtagtgtgggccgtcgtacggcacgcccggagcatcatgcacctgtcttaccgggtaacgatcgagctgttttctttcttctgtcgttgttgaaagattttttttttgaaacaatgtcgtcgttattttcttagatttggaatatatgactcttaccctttcttttcgtatgcagatgccatccgctgctcaggagcagggttcactttatcggtttgtgcttttatatcggggtcaccgaaattccgaaattttagaaatttcggaaatttcggtccgaaattttgagcaaaatttagttgaatttgaacaaatattacccaaatttatgaaaaaactgaaaaattgaaaaattacagccgaaataatatcgtatcggaggggactgaaatagagatggcaacggggaattcaccgtcggggtcacatccacgtccccgtccccacagtgttaaaatttcaccgtccccgtccccgcgaatcaccacagggctacatttcacccacccccgtcaccacgcggtgaattaatccccgtggttaccccgtagagagaatcagagaagggacggcggacggcgaatggctggaggcggctggcggagagaccacgactggaggtggcgggcggcgcgacgaggctggaggcgatggcggcgggccgcgcaacgagggctggaggcggccggtgtcgcgacgaggactggatgaggcggtgtgctcggcgggacatcgcgcccgcgaggggacgcggcggcgcgttcttctggagcggcagcgacggctgtgtgggcggcgtggagttttggaggggagagggagatggttgactagggttggaatatatatacatgtggttattgggcttcaatttgttgcgccaaaacgactataaagtctaaaacaggtcctagctgctgtgaaatcgggtcaccgcggtggacggggacgggga

SEQ ID NO: 41784 - DNA, 542 bp, Oryza sativa
caatcacacattgaccaaaagtttgaagtttgatccatatccattggtgcccagtagtatataacatcctcattattttcgccagccatagtttcctctaaggtttcttcggctttttcagacaaggatacctgatgacataagaatgtttaaaacttatttccatgtcattatcaattgaaaacggcctcattcaagtgttcaagcaatctcagcacatggaaagcatagaacaacaaaaggaaaacataggcatggcaagccaaaaaaaaaaaggcattttcatggagatgaaaccaaatagaacacatggaaagcatagttccaatactttttaacatctgaagcaacaattgtattgcaaaattgcatttagctggtgcagcatagaattgcctacatgataagcatcatgagttcatggctagagggaactgttgctactgcttaaaaaatcctctatgaaaaggtcgaggaacctattttattatattgtatgtccaggcaaactggaaaactgagatagtttgggagatttggaa

SEQ ID NO: 41785 - DNA, 719 bp, Oryza sativa
aagtaattattaatttttttctatcatttgattaattggtatatatacttttatgtttacttttagttttacatatttcacaaaagtttttgaataagacgaatggtcaaacatatttaaaaaagttaatgacgtcaaacatttaagagaaagaaggaagtatatagcaattggtcacaacatatgcccatcgtcttctgcccaccaaaatataaccagagaaggaccacacttgtgatcagtcacaattgccaagccaccttgaaccatcctcgaccgatcttctcgatcgcaacgaatgtcatcccccgtgtgactaccttcgaatgattgtcattagcttatagtaggattggagttgagtcatccatctagagaggcaccatcccttcactaacctgtcacaaattggatatatgcatgaggcatgtcgttaataactactcatccctttcatattataagtctgtcagagttatgaataccacatatcaaatagtagttgactaaatttcggcaggacccaccacatatcatatcttatatgaaaacaaccttcggatatagaaggagttccacataaggaaagataaatagagttctacatggaaacgacaaggattactcagattgtatccatattggtttccctagttctacttggaaaagggaacacaatgggtataaatacaagaccctctaggaggagagggggacgg

SEQ ID NO: 41786 - DNA, 843 bp, Oryza sativa
aatttatttggtgttgaaaatactactatatttttctactagtttgatcgaacttaaatacctttaacttgaaaaagaatataaaaaccgacttatatataaaatggatgagataattagttctcccaaaaaagcccctacttcgataaaaagtcaaaaagcttgaaactcccaagaacatagttggaattaaatttgcaaatatactgttgatttgttttttcccataaatattcggaatgcaattttttttatagaaatatactgtcggttttacacaaacattacgtgaaaataacgtgggcacgatgtcacaggcggtttcgcacgcgcgacctcgcgcgaagaaatagcgagaccgaatggctggggtctggggcagttcaagttgtttaattatcgattaattaattatttagtaagctaatcaggataattaattactaattattattgcttaattgctaattgggtaattaattagtcactaattaagcggctgctcactaggcaagccgttcgctctagctcttttattttagcgagaccgtttggtcttgctgtctcacgcgcggtctcatgctatcttgtgagaccaactgcggcgtcaagtcacgtcattctcgcgtaaccgttgtgcgagaccgacggtattttttgtcaaaaacaaattaacagtatatttataaatttaattcaagctggttgaacgattgaagctgaacagtggacgtgctcttccgagcagagatgatccagcatcctgttcagcagcataggctcacaccatcacttttgcaattttgtgcagcaattaggtatttatggacttggactagttta

SEQ ID NO: 41787 - DNA, 1052 bp, Oryza sativa
tttaggtgccctaaaatccttcgatcacgagcaaataaaaaggtcaaattaactagcgagcacaacagtacacaacatgcagatcggaatgaacccattgcaaacgcagtaccaggtaacaaatcaacttcacctctccggaaagacttctctctttatgggaagtaaggcagcgttcgagagggtgagagagtgagtttgtttgtttcgttttccgcgcgcacatttcccaaactactgtgtttttttacaaaaattttctatagaaaagttgctttaaaaaatcatattaatccatttttgaaatttaaaatagttaatactcaattaatcatgagctaatagctcacctcattttgcgtatcttcctaatctcctcaatccccttctcctcaaacacaccctaaacacaccctaagacatgtactaataatgagtgtgactgattagtcgcacgtgcaacaagaaatataattattatatgattaattaataaaaatgaaaaataaatttatttgattttttaaaccaacttctacataaaattttttatactaaattaacaattggagaaacatgctaatagaaatcgaaatcgaagaagtaaccaatccgttcactttagaacagagtaacagactccctaaggaaaggagatcaagaattcaacagagatgggccgacccaaaaatatagggtatgttcactttaatatcatttttaaccttaccaaatttgagtattaccaattttagcatagttaccaaaattttggcaggatttcttatatagttatcaaaatttgacagcaaactaaatgtaaccacttttttgacaattttactaaaatttggtaaggttgaaaatggcatcaaagtgaacatgcccatattagcctacaaaatttcaggtactgtgtcctagtggattccagatccgacaaagaaacaaaagctcatattcgtgcacaaatcttgaagagaaatggacggccacaaaattcaactaaaatttgtcagttcccagtcacctgaacactagcaaataccaaa

SEQ ID NO: 41788 - DNA, 695 bp, Oryza sativa
ataagaataagtaataactgctattagcaacaccaaacacggcgataagcaagaaaacaaagtgaagtgcaggatgaaaaactcacgaatttctcgggacccctcgaaaccaccgtgccctcctccgctaaatcgggggcacacacagcccctcgaaaccgtggcgctggcgcggatcaacgccgcttctcggagcgagcgatggggccgattcgatccaaaagaaaaagaaaaaaagaaaaaaaaacagaatccagagagatacctgtatacaccggccgccggcggctgtacggctagctgcaggtggccggggctccgtcgcgcgcccaacaccggccggctgccgccggagcccaagaactcgatcggcgccgcggttgctggggaattggatggacaccggaagtggctgacgagtgacatgagtgagcgagcgagatggagtataaaactagagagcactagagcaggggacgccggacttcacgacttcaggggacaaagtcttcgtttttaattcagtaataattgcgtcccataatgattgcacattcaaaatttggtccaaaaaaatcatatatactcgccctaaatataagcattttaagcatagtgacaagtcaaacattttaaaccttaagtattaatagcaaaaatataaaaaagataaatcatgtaaaattgatatttct

SEQ ID NO: 41789 - DNA, 607 bp, Oryza sativa
agtgtgttcccttaacacaagctcatcaaatattcaatataaagcttcgaaagcacctcacatatacattttcactgtgctaagtaggtaaatacagaattaaatgtgctttacagcagtaaaattaaaattttctttcttcaatgtacttcagtaataaaaactaagaagacaagcaagagctgtcttcaaaaataaacaaatatgagatacatctgtatcatggaaagcttgatgtatcctatgatatggagagtaactgagcctcagtgtgacgttataagcagaatggcaggataaacaaggagacaataaggtttcaccattgtagggtcagtcgaagctcagtaaaacaaagaaccatgatgtaaaaagctatacatgcatacttcacgaaaatataagatagccgtgtgcttaccgagttgaacaacctgacgactgaatcaccagcagcaagacaatcggtgtaaaaaaaatcaacaggagaggcatccaattagctaacaaataatatgtagtttgtgatatgcaaaataacagagtagaaaacagaagattacccccttgggttgcgattttgatgagctccttctctttactatct

SEQ ID NO: 41790 - DNA, 1027 bp, Oryza sativa
ttattaagcctaattaatctgtcattagcaaatgtttacggtagcattacattgtcaaatcatggcgtaattaggctcaaaagattcgtctcgcaatttacatgcaaactgtgcaattggtttttttatccacatttaatgctctattcatgtgtctaaatatttgatgtgacagaatttttggaagtttgaagagaaacactacctaggtatagatttaaatttcttcaagagtaaattacacaagactatagttattctgactaaactatcacaaaactcaaagatttaatactaaatttgttaaaaatatataaatttaaggacaagtaacataaaactacatatttaatattgaagttatcacatcactacaaattttagagtttaaatccctagaaccatcgatacgttggaactatatattatagttttgtgactaaatttgttctaaatctgtaattttgagataattttcttactaaatgtgctgttttttgacactccatgttaaatatgtagttttgtgatactatctatagttttgtgaaatttactctttctgaaatttgatattatctaagcaggatggtaaataatagaaacccattttatatcattttggaccctcgaacttcacaccgaaattggagccctgtcaaataggtcataaactaccaaaaattttttaccatcaactttcaaaactagataattaacaccctgcaatatatttttttgttttttaaataaaggtggttttcctggttcatatatttattatccatgttcttctatgtaaatgtcacttaattaggtacagagccatgaaagcctattgaagttcatattattgaaaaccactttcacatagtagttcaaaccatcatgaaacttggtttataatgttatttgctcggttttgaaatgttgagggtttgaagttcacattgctgagaaaccaccatcatatccatcaaaccatcacgaaacatggaatacgggtaccgagctcgaattcgcccta

SEQ ID NO: 41791 - DNA, 550 bp, Oryza sativa
ccatggatcgatagataaggaagaacatacataccttaaaaagaaagtaattatcagcgggggaagtctagaaggcaaatacactgcttacccagccagtatatgtgagcaaaataagatgggcagggtgtcctaccattatcatctgatatcaggtgccgcccttgcacagtgctcctgcacatgatgggtgctgcaagaccaatgtccttcttgcacaatattcaaaatcaagccgcatcattagatatactgaaataaatactccaacatccatcctatattcaggatggaaagaaagcatgaatggcgtaacagtttgggcacgctaataagcttgacacacatgggtcatgggttcaaaggccacatgatgccatatacaatgaactctgtcccaggctactcccagttccagaattcagttgaaagcacaattagataagacaacccgttaactcgtagtctcgtaccacagtatttaactgaacacctgcacttctataactctattctgcactttgtagaggtcatgtattagtcagcaaga

SEQ ID NO: 41792 - DNA, 587 bp, Oryza sativa
  unsure (1)..(587): unsure at all n locations
aacttagccatgaataatacctcatacaataaaatcataaatataatagtcttatatgacaaaattatacacttcaaacaatatagctagtctacaatttccagatttccttcatgtgtaagggcaaaatggtcagtttcatagaaattaaacattcaactaactaaataggcatgaaagggatcaaaaccaaaattcaggggcataaagggggtgggcaaaactcaggggcatagaaatgattggttaaactttcaggggtgtagaagaaattttctcaaccacaaaaccagacatattaaacctcgaactattgtaaccggacaaattacccccccccccctcgactcaatccagagtggttttgatcgtacgtggcgccgatgtggaaatccaatcagcaaaaataaaataaaaaatatagggcccacaggtcatactaagcccttctatctgtgtgttgttggcgttggaggcggcagcgagcagcagtgggcgcggctctggtcggcggcgggcgcggcagggagggggaaccggtcggtggcgacggacgcggctaggcgagtggcggcgggctangcaag

SEQ ID NO: 41793 - DNA, 714 bp, Oryza sativa
cattccagtaagccgcgagacgaatttattaagcctaattaatctgtcattagcaaatgtttactgtaacaccacattgtcgaatcatgtcgtaattaggctcaaaagattcgtctcgcaatttacatgcaaactgtgcaattggtttttttatccacatttaatgctctattcatgtgtctaaatatttgatgtgacagaatttttggaagtttgaagagaaacactacctaagtatagatttaaatttcttcaagagttaattacacaagactatagttattctgactaaactatcacaaaactcaaagatttaatactaaatttgtaaaaatatattaatttaaggacaagtaacataaaactacatatttaatattgaagttatcacatcactacaaattttagagtttaaatccctagaaccatcgatacgttggaactatatattataagtttgtgactaaaattggtctaaatctgtaattttgagataatttcttactaaatgtgctggtttttgacacttcatgtaaatatgtagttttgtggtactatctataggttttgtgaaaattactctttctggaatttgatattttctaagcaggatggtaattaaaagaaacccattttatattcattttggaacctctaacttcacacccgaaattgagccccgtcaaaataggtcataactaacaaaaaattttt

SEQ ID NO: 41794 - DNA, 588 bp, Oryza sativa
tgacgaggagttcttccaggagcaagtcggctacgatgagttttagggtttcggcctagttcccaagtcgcgcctgtgatgattggtccaagtcctggcttccgctttccttttgtaatgcagttgtgagctcgggatctgtccgcagcccaacatgactgtacttctactctataataaagagacctctgttgctgtgatactctgtctccctgtgataccagcactgtttcctgggactggtatcgattaacaggttaatttggagcgtcacgggctagttccggtcgggactagttcggggcgtgacagtcaccgacccaataaaattgcttgaagattatatcaagccaatgggagaagatttggcatatcgtactattcggcccacacaaggtatctctcaaccattagtgcagcaacacattaggtcatatgtcttggatgaattagacaaattactcaaagattctggatatagcctaggtcacttcaacttgccagagccagaacaccatgattacaatgttttgaacaacaggttggtagtggatgagcaaacttatgaccttgatgctactttagtag

SEQ ID NO: 41795 - DNA, 681 bp, Oryza sativa
tttgccacagtcaccgcttagacttccacggcgacaatatctgcaacgtcgtggagctccctctcagccatgatcacatcttccttgcgtacggccacgacggtgtcgacctcgctcccgaccacatcaacaatagcgtcctggagcttgctctccatcaacccatggagctcgagctcggtcacggccaccgcttggacgtccacggcaacttgggtatcaggaaattctgtatcaccggcaaaggagtcctccacgacatgaacctcgtcgaaatcatacaaaatcacctcggcaccatggtgttcgcttagagagttcacttcctcgcaagtcatggcattggaaacgtattgctgtggttattaggatggagcgaagcggagaagagtttgtcttgtagaagaataggaaggagcaattgatctactcgatgatctgttgctgcgcacgcggagcaatggtgcaatgcattggccgggcaacggcgcgtagtactcccgagacacatgtgcagtgatggattaactccatgagcaaactgaaatggcgagcacggagtactattttaaatttgcattctcgaatacctttgaaatttcaatcgagatctacttccgtcctgcgttaaaacctcaaaatttcgtggttagctatatgcggtataactaatgaggaatt

SEQ ID NO: 41796 - DNA, 812 bp, Oryza sativa
atgtatgcctttgttagtataaccctttcacaagtgaagaactaattacattagtcctctgatactgtagtcctaatgctctttttaggtgaggatagttgtactctaactcttgtatattactgattttatttttgtggttgtatgctaagttatttatttgctcaagcatgcagtttgtttttttttttgacagaaacatgccgttcaattttgtatatgcggccggcaaccctgtgaaagaatatcatgaactgactgaaactgaaatagaacatggctgaatgctaaaacaaggattaccattacaaaatccctgaaatgttgattatgcattcatgaatcatgtagttggcatatgacctcgatcagtatcctatttttgtatgtagcatcttcgtagctttattgatctttacaaatatagcttcaatgatcttagctcgtacaaaagaacaacattttcatggtcatgtaaatctcttgtgattttagttgggtgaatagttccatatttcattaaatcaagaaatgaaacaagttaaagagtgaattgcttgcaacgatttcttaaccttgctacttttggttctgtagatgttctgatctaatgatgattacagttagcgtgtagctggacggtgtggtttcctgtgaaaatacaacagggactcggaccttgatttatacatgtatttgcttcataaaatttatacgcccacagacaaatattaaactttcatatggatgaaattatatacttcgaatcctactgaaacatcaatttttctagccgtcgtcgacggaactaa

SEQ ID NO: 41797 - DNA, 1108 bp, Oryza sativa
cctactccactcacttaatttattccaattgtttcactaattgcaaaatttaactattttcttctatgatatatcgtgaagtgtcacaagcaacctagaggcactgtcctttgcgggtattacgcgtgcgaattcctcagtgttaatgggaggtacagagttaacacaaaggatgtaagtctctagactatggactagacagcttcacatatttatgatactaacatattgtttatcttccatgcatgcagttgccaagaatagaacttcgaacaagctttgacgatacaggcatcacaaatgttcagcgcgatctatgccacttcatccaccgtgagtgctgtcatatgcgaggagaattcttcgacccaaagggtgccctaactacaagtgacgaattcaagcaacttcgggagtggaacaatgctatgccataatgtaactagatggtgtatttgaagtgacaatgtaaaaaaatattgtaatatatatattttgataacacttttcacttatgcaatatatgtagttttctcagtactaaatgcttgataattactaataatcttcctgcatcaatttctattaaataactaaaaagtaatatttgggcaaattattattgtatcaaatttcaaaattttctacctatcttcgcaggcggatgtttttattttttgcaggcagccacttcctatttccgcaggtggacctgactagctttttatccacctgcgaaaattgtcttcacaggcggacggctgccccgcctgcgaagatcggtgatcttcatagtcgtttgcttacaggcaaatggctgccccgcctgcgaagaccggtttccatcaccgatgataatgctttttctagtagtgaagataagtattgttatcacggagtggttaggtggacttgcttgtcgtgataaacacacggggtatcatatcttgcatgatatatatatcctagcgagtggtcatcactgtacacaatgagaaaatactgcagcaacatttgaagaacctaacatatatagtctagaatatttcagtaggaaatggaggcactaggtagtaattcacatcagaatcaaatatatttcggcttg

SEQ ID NO: 41798 - DNA, 671 bp, Oryza sativa
cttgaattcgtcacttgtagttaaggcaccctctgggtcgaagaattctcttcgcatatgacagcactcacggtggatgaagtggcatagatcgcgctgaacatttgtgatgcctgtatcgtcaaagcttgttcgaagttctattcttggcaactgcatgcatggaagataaacaatatgttagtatcataaatatgtgaagctgtctagtccatagtctagagacttacatcctttgtgttaactctgtacctcccattaacactgaggaattcgcacgcgtaatacccgcaaaggacagtgcctctaggttgcttgtgacacttcacgatatatcatagaagaaaatagttaaattttgcaattagtgaaacaattggaataaattaagtgagtggagtattactggccaatatgtatgtgctagtagcttctcccttgttcgggtctgttctccacccttgaacttgtagtagttgtatgcactgtatggatgtcgtatcgttttgcattaaggaggatatttaattataatacattcatattaaaaaaatgcaagagtcagaataacttactactataagattgttagaaattctttgtatgactggtgactgaaatcgagagggtccaagactaccacggttccgtccttcgggtggatgattaaa

SEQ ID NO: 41799 - DNA, 819 bp, Oryza sativa
gggcgaattcgagctcggtaccccaattttacatgatttatcttttttatatttttgctattaatacttaaaggttaaaatggttgacttgtcactatgctaaaaatgcttatatttagggcgagtatatatgattttttttggacaaattttgaatgtgcaatcattatgggacgcaattattactgaattaaaaacgaagactttgtcccctgaagtcgtgaagtccggcgtcccctgctctagtgctctctagttttatactccatctcgctcgctcactcatgtcactcgtcagccacttccggtgtccatccaattccccagcaaccgcggcgccgatcgagttcttgggctccggcggcagccggccggtgttgggcgcgcgacggagccccggccacctgcagctagccgtacagccgccggcggccggtgtatacaggtatctctctggattctgtttttttttctttttttctttttcttttggatcgaatcggccccatcgctcgctccgagaaggcggcgttgatccgcgccagcgccacggtttcgaggggctgtgtgtgcccccgatttagcggaggagggcacggtggtttcgaggggtcccgagaaattcgtgagtttttcatcctgcacttcactttgttttcttgcttatcgccgtgtttggtgttgctaatagcagttattacttattcttattactattactattattattattactcactcccgtttataatgtatgtggttagaattattagtatctaaaataatgtaggcaatgttagaaagtcttacattgtgaaa

SEQ ID NO: 41800 - DNA, 1032 bp, Oryza sativa
aggtattaaacttaactttattgttcatattgcaagataataataaaatattgaaaaaaaactgcaatttttaaaagtatcaggtgttaacattctgtaaaaaagtccaagtcaagacaaacagagagagatattaaatgtgaactatacacaatacacatatgtgtatacatcccttacatggtagaagagtccttaaaatcttcatttgtgccttaatctttggacatgtctgagacatattagatctgtctggtctatgtaatttcaccttatcaatacttaattttccttcttttttaaatgacctattggattagtgttaaccatgccattttgtagtttcgtatttttatactcttgtttcttctttcgatctttaaatttttttttccgtagattcaactggattgtagtttttatttataagcaagtgacattgtgacatggggatactgtgaaatagctattgacaataaatcaaatattaaagtccctacaagagatgataacaggaaattaggagtgaactttgaacagtttttgaaaatgacttggttttgcgccttatctaaagcaatatgaaatatggttttcaacggaaacgtacacagctagttgtcatgtgccatggaatattaggtacagagcttatttgtattccagttaagtataggccctatacttttagagtaaggcgtctagtgaaaacgatggcatctgcggagtcatgtgaaggagattgacttgagtttttagcaattacattgttaagttcactatgacagcccggccaaaaaagttcactatgaccattgtatttgttttaaagcttcatggaagccccaattgatgcaaaagacaaggcattgtgttcagttagctgtttgggagggcaatgtgtgctttattttgtgtagaaggactgctatatttttttggggtggctgcatacttgctattcccattttcaaacagatgcatcaataacatttttgcgtcttaagtcacctttaaagaatttggtcaggg

SEQ ID NO: 41801 - DNA, 744 bp, Oryza sativa
cagcatttagaaaaaagttcgcttaacactttgtggtaagtcaatgtggaaaatgacgtggtgggtggtgttgcttgcatgacacacacaccaaagcatgtttcacccaagtttgcccaagcaatcactttctttagtcagcaagcccagaaaccacctcaagtgctatttgtacttcttctccaagctattctgctagttaaaaaatatttaactgaatccatcaccatgtcactgttctcgtcatcgtccacatggggaaaacacttacaatacaactccaggggggagggggggtttcaaatagttgttcatgcgttggggagtagaatatcaggttttgtacttcagggggttaagtagaggttttggctttttgccattatttataaatcatatggtcctaattatcatttgttccatgcttaattgaacgctagaaacatgtaatagtgaaacagaacttcaaaatgaagcaaatcggctacttacatcattatgaacagcaacatcttcaatcatcaggtaaaactttattgcatactcatattgtcctaaattttcgagagtgctagcaacctccttgatcacatcggtgttatcttttgaacgctccagatgcacattctgaagaaacacctgcacaagtaataccaattcaataactaagaaactcaaaactatacgttgaagtagtcttggatacagtatatacacaagcacaatctaatcttgcagagtaca

SEQ ID NO: 41802 - DNA, 644 bp, Oryza sativa
caaattctctaaggtgacttaagacgcaaaattgttattgatgcatctgtttgaaattgggaataagcagtatgcagacaacacaaaaaaatatagcagtccttctacacaaaataaagcacacattgccctcccaaacagctaactgaacacaatgccttgtcttttgcatcaattggggcttccatggagctttaaaacaaatacaatggtcatagtgaactttttttggccgggctgtcatagtgaacttaacaatgtaattgctaaaaactcaagtcaatctccttcacatgactccgcagatgccatcgttttcactagacgccttactctaaaagtatagggcctatacttaactggaatacaaataagctctgtacctaatattccatggcacatgacaactagctgtgtacgtttccgttgaaaaccatatttcatattgctttagataaggcgcaaaaccaagtcattttcaaaaactgttcaaaggtcactcctaatttcctgttatcatctcttgtagggactttaatatttgatttattggcaatagctatttcacagtatccccatgtcacaatgtcacttgcttataaataaaaactacaatccagttgaatctacggaaaaaaaaattt

SEQ ID NO: 41803 - DNA, 691 bp, Oryza sativa
tgtgattagagccatagtttctagtcggattcgtggctatgggcaaccccgttatgggtataaatagaagaggggttgaggctagaagatattgactctttggagagaaaagttaaagtttgctcaaggttccaaccctaatttaaatgcactttgtaaaacacatattgatacaataaattttatctactttcaagaattttatcgatacatgtttttcttggtcttgacggtcaaatcggcatatgacgagcggtccaaccggtggcagggaggcggtctaaccggcagcaaggctggcggtcagaccgatggtgtgcaagccgccagaccggtgggagtactgtggtcagaccggtggtgatgtactagtgtgaccggtatagcttcgtcaagtttgcgggtaacttctattttcgctaaaagttatttgttttttttccttccattcgctcctctctagtaggcttggttctgtattcgattctacaaattaatccttgatttctttctcaaatcattcaaccctgtcacatactcagaatccattcctgtagaacattatttatgcttgcttaattgtccctagttaagcatgaagagatacttgatgttgcagggaaattggaaaaaggaaaacactacaaataagcggacggaaagttttaagtacccaagcaacatacctcga

SEQ ID NO: 41804 - DNA, 693 bp, Oryza sativa
ggcgtcgtcggcggggcccgtgtaggctcagacggcggcgacggcgttcaagctccggctgtcggagtacgcggcgcccgccggtggggaagatgcgaggctggggctccccgcgcaccgggacacgagcttcctcgccgtggtgacgcagaacggcgtggacggcgtcgaggtggagtgcggccgcggcgacggcggctgggctcgcccaacgctctcgccgagctccttcctcgtcttctccggcgacacgctcaaggtatctgtgcatgtgcacgcatgtcacatctctctatctctttcttctttttttttaaaaaaaaaatggattaaaagaaacctggcgatcgatctagctacatccaaatgcatgttgctggaatagaaaatactaaatagtacacaaacttccttaactttcacatttcaaattaagtcaaagtctataccataatttaactagccgaatacaatgtgcgttacaacggttttagataaaatattgtcagttgtaaacttgaaaatattgtgaatatatatgtatcatgaataacaatgttattatacaatcaatttccaacaaaagattcccgccaccaactcaattaggtggtggtagctagttttgcataagactcctccctgctattaccgttggtcaattacattatttttgggcggaacgtgacgaaa

SEQ ID NO: 41805 - DNA, 756 bp, Oryza sativa
taattttgaaaaaaataatgtgtaagtaaatatgtattttttttcttttgtagttcgttagatgtaatctaaaggtagaaaaaatctgggtgatttttgttagaaatcacacgacaaatggatagacagataatgggtcgaccaatttattatattgtcaagtggcgacttaggagcgtctgtaggagttccatgtgatgatttgagagcgtttgtaggaagatagcctacgcatatgcacgggtaccttgtttaatattgctttaatttttattataaatgttaggatgacattgttgaaattttttttactccattttaaacatgttttggctaataattggtttggacattagttatgattttcttttgattacccttacaatgtataaagtctatactaaaattattggcaaccgtacaaccttaaatttatgaaaaaaattgtgtcacaataatggagttggttcatatttgtttgtactatgtgtgatttttttagaatatttagcgtatcagtttccaaaatttgactaacatttttcttgtgtgctatagatgactttattgatttattatatattaatgaaattatttttcattaaaatgtagcagactactttatctaactaaagatagacttatattgcttatactccctccgtcgcataaatccgaggagtcaaattttatgtcaaaattagaggaatttatatgtaaccaggacaaagtcattttttgaaatatcatcaagat

SEQ ID NO: 41806 - DNA, 2083 bp, Oryza sativa
gagctgcagctcagccaaacagtttcagctccaccaaaattgggagtggagctgggtggagctctctcacaaaatgaactagagttgtggagctaggtttaggcagcttcacagctccactccagacctaactcctggagctaaatttaggagttggagctgtaccaaacaggcccatagttatggtaggaaacaaacacatcatactacaagtggcaaagtgtgaagttcaaccaaacaaatatatactttctctgtcccctaaaacatgtcattttaaggtttctcacctagattaatgtctactaaaactgaccaatttaccctcattaatttgattcatcactactgtgcacgcactttagaagaacccaagaataatagagattgtagttaaatagtaaatgaaccacaccttgactgccatgtgggatttgcataagcacattggagccatggccataaaaattacacatgagaaaacaatcagtaccatagtttaaacatttaaattagcctatggaggatgtgcttcggcgcctaggagtgcctgtccatttctgaaagtgggccacttctttgattacggctatgatgatattttttctaggatattagttggacgggagaacgtctaatttttttaggacggaggtagtatatgcaccaagccaaaaaccactgtgctaagatagttccttcatgtcttaggaccaagagccgcactgtcagggatcctttgcgtcgaaccaagacacactggcacactgcagatgatcatgtgtggtccgtctcaatagagtagagtctactttctccatccaagaaaaaaaatcaatttctagagataaatcttaacatgcatttatctacattcatcttcaaaaactattatttttagatagaggtagtacatcgcatcaccataagctggacccatgtgcccttcaatccatagcaaccttgatccatatcattattgcaagtgccaacaggatgcagctgcttgatctagttcggcttcttctgtgaaccgctccatgtaccacacgtctcgtcgctcactctaggtcagcccgaccactattgctgagttgggccaagttgcgcaagtctctaaaccaaacttttaggacgccatctttgaataggttgcaccgagtcaggtcggtcaatggaggccggatagcccttgtttgcatggcccacctcatctctctccctcttttcttttttcctcacatgccattcaaatgtgatgatctcccccataggatatccattcataatagttttcagaacatatttcgcaaacctcatattagttaacacacatgtttatccgcaattctccaattttctataaaaaaataaaccaaaataccacttgggttcacagatgtttagtctatggaagtctaatgtggttcattcttttgcttggatgatggatttggttccttctagaatgatgatggtgaaaccttcctttctctatctttcttcttctggattatcaaacaaatagtttatcagataatttgtatatattatgctttaggatagacaaaattcgtcataggatattcaaatattatagtctttgctaatagacatcatcataacgcgacttggcttgagaacacaaaatatatggtaatttaattattttattattttcaacctgttgtgatgagggatgttaggtcccgatcttccgataggtattgataaacaatcgatttgggcggagtcgcgacacaactcgatccggcttctgaacgaacacgctattgagccccgcaatcacagcaccacgtctcctctggttatcaaccatgccgaaacccggttgacctcgccgagaaggctaatccctgcatgcgaatcgaagaacacaagtaagaacaaaatagattgcaaccaaattgcatatgaataattaagcactcaaatttggggttccacaaaccgatctagcggtgaaactgttcttgacagaataatctaagcaaaacccgactctaaacgatgacggctactgaataaatgtgattagggacgtcctagggttgccgtagag

SEQ ID NO: 41807 - DNA, 1187 bp, Oryza sativa
aagtgatcttgtcccaagccgaaaaaatgaaaacgggccgagggtgaaaaaggcgacaaagactacattccctctaaaaaaggggtaagtacacttaatatctaaactgtttgagtgataactgttagcccaagctaattataaactttgatacatactcatagaaaacggcgccatggcgatcaaaacagcagccgaagaaaaaagataagtcaaaagacgacgaggtcccagctaagaccaccggctcaaagaaaagcgaaccgtcatcaaaggcgaagaaaagaaggggcgagagaagcgtgaataaaaaggacgaagggttttatgttgttaccaatgttgggcctaaaggagagtcgctcgcccctcaaactgcacgtgccaaatttagttcacagtgtggcataatcgtaagggaaaagatccccatcacggtcaaggactgggatcatgtgtcgaatggggataaggaagtcctatggaaagagctgaagaaaagattccagttcccggattgagcagaggcagttgtgaggaattgtgcactgcaaacactggacaagccctggcgtggttggaaaaacacattgaacaacaaatttgtgaagacgggtcgtccaccttttgcgacatttgccaacataaccccgaagtagtgggacgactgtgacgttgaagaactccctggaagaaattgaagggagcaaaaagtatgcagagttggccaagaagaacagatttcctcatcacttaggctccggggggtacgcaccaaaggtggagcggtggtcaaaagaggaggaggaaatgaggaaggcggggcttccagtaccaatggaggaatggaaccagagatctaggaactgggtaaaagctagaactcctaagatcacagaagaaggcaaagtatcgtttgaaaatctggagctacagggggttgccgataaaatagagactttatccagtgcatagaagataggatcttttaagcctaagagggagaaagatgtgctaagtacggtgctgggtactcctgatcacgggggtacggttcgaggtgtgtcattcaatctgagttggaaggaagggttcaaacatgacccccacaagaaacgtgaaacctacaaggataaactaagggacgaaggggctcaggattttgaaaggaaaatgatggatttctg

SEQ ID NO: 41808 - DNA, 685 bp, Oryza sativa
aattttgcccatatgcaggttgatatcgttcctgacattgaagattttcgatatggcaaggcatcgccatctttaggtaagaactaagaacagttataccatatagttaccaaattataatattcttaacactttgttccatgtcttgcaaaaaagcttacttttgctttcttcagttaggttggagaaaaaggtgagagtttcatctgctataaaaggtactcagaagactacctgatgagagaagctatgcatttcttgtttaacatctttgtaattttcttgttatgtgttagtttctttctctgccagctgatatcaagttaaatctgtacaaacaatattgacaatactttactgaagttttcagttatatattttatatattgctaaaatgtttatgctgctctggattgcaaaaataaacaatcactagattatgacttgcatcatcttaaccagaaggcaatatagtactacatattggttcatacatgatggctattcattcctcaatttcccacacacatcattcatggaatatctaaatctgttgttaagttcaaaattttcattgcatgttcacctactattaacaaaaataacaatcctagctgccaaaaagctgccaggttggtagcagaatgttcaacatcagattcagtgtattcttgtgacacatatt

SEQ ID NO: 41809 - DNA, 999 bp, Oryza sativa
tttagtagagtagacaaggtaaaggttactgtcatcctaatcaaacaacataatagaaattgataaagttagattgtaaaaatttctaaaaattctatagtgttgaaatcacatattttatggtcataactgcacagaaccctatctttcatgcctaatgttactaaaccccaggtttcttggtcataaggttctggaacaaatgagtctgtaacaactagattagtcaaactggcagtgatactatttacactgctggtttttctgatgaaccggactttccttacatcaacaattagtttcacctagcaacccccattgctaccacaataaattgtagtttggttaaaggtgggatttcacaaaggattatgagtcttaacaagctaaggctgtgtatttgacaacctgccctttcattgatctgttggttgtagctgaaggttttgaaatttctgaaataccctcaatcaaatggatggctgtcttgtttgatgattaaggattaacattacctggatttttttttaatcttcatttacttgaaattattggtatatgtaaattgactgcaaagataatggttgaatgcggaatctcatgaatttaacattttctgtcttgttccaagaacagtatatctgagctgtgttttatccaagaaaccaacaggaaatcaataagaaaacttatagtatgtgttataaagcaattcttgcaacacaggaaactcatctccagtaagaatctgaccaaatggagcaaaactcttaattgttctaatcatcagcgagcaattgcatctattcttataaacaaaggaaacttctaactcaaatggatataataaaccaagcctattttttggtgttccacaaatctgtttcttcagaagtggttcatcagatgctcataagaactccagaatcagaaatccgctctgtatttcagcgacttccaatatctaaacttgaatagtcaagaaatagcaagacgaaa

SEQ ID NO: 41810 - DNA, 517 bp, Oryza sativa
tgcctgcaggtcgactctaaaggatcccctgtcatcattgcccacggcctggacttctatgctcttgcacacagcttcaaaatcattctggtttgatgcatcgcactctttccaagaagaactgtcatagttaagcagaaccatcgaaatattaaattaatctattcagtcattgcagcaaaaaggaaaaccatgcccagccacgcctcatcagaagttggtaacaggatgaaggcattggcattagtagcgaatagcacaaggttggcatacctcatagcatcaggtaaaatggagctctgatgagaccctgatggagtttggcaagcctcaaccttcagcccttccatgaattgtaagtcatcagaaatggcaggaagacatgtcaaatgtgtttgactttggtcagtattttctggcccttttatgatttcatttgtagtttccaccaatgcatcacggtgtatgagcaaacggacctgttgacaccggtgaaagtcagtctgtctaccaaaat

SEQ ID NO: 41811 - DNA, 645 bp, Oryza sativa
ggtcgaaagtattacttatttttatataaacttgatcaaacttaaagcagtttgactttgatcaaagttaaaacatattataacctaaaatggagggagtagtatgttttaaatgagtttatgtaagaaaaaagcctaaatttggatggcgattccaacccaaatgctaccaaacagtattacattcggataggatgatatctcagagatttcgtttgatacctactcactccgtcccaaaatataataacttttagccctcaagatttgtcccaaaatataacaacttctccaccaacattttcttcccaaccaatcccaactcttcaccattcaccttttccacctacctccactactcaaccaattacaaccctccaccattcatttctacctactttcttaataaacgtgtccaactctaaaaatgcttatattctgggacggagggagtagtacatatcggctgatactttgttcagacaggatgatacctcttagatatcgcttgctatccggtaactaatgtatcattcagtccgaacggaatacctttttgcagcattgtccaaaaacttctcgatagttttcctggaaactatatttctttaaaataaatccccatccatttacttatcttttcct

SEQ ID NO: 41812 - DNA, 616 bp, Oryza sativa
ggcgaattcgagctcggtaccctagatctaaaaaaaattatcgtaggaatagacccttttcgcgatgccagtaaccatgcatcaagattcaatatctaggcgccagcgccgatatccttgtcccccagcagctgagatgtggagggtcggtgccaaacatattggcactaaagatctatttgtaaaatatatttttttaaaaaagggttaaaatgtaaaaagtttttcttacaaataggttcatatcaccaaagagactgagtgtctatttgtaagaaaaaaatatttacattttgacccttttaaaacttttatttgcaaatagatccttgataccgatctcttttgcactaatcccttcacatcagcgacttagctaccaaggatggtgaggacatcaccatcagtgccattgacactgagacattaaacctgagcatcaataactctggcgtcgagaagcctcaccccttctaattatttaatattaggtccttctctaatattcgcgttttttatatcctcgaattttggtatggatcattttcataccctttttgttagttgaccatttaattcctatgaaaaggtctattttgtccataggtacagaaaa

SEQ ID NO: 41813 - DNA, 506 bp, Oryza sativa
tacagatgcaaatggtcattaattcctcatgatcagtgttggtagactgatacttaagatcgctcatgtacgactgtacgagctgtttggtgtaacgaagaataacaacacggtgaatatacaaaccacccattgctaattgcatactaactattcccctgtccatagaaaatcaagccaatctggacatcagcattatcttcgaaatgcaattttgactgcaataatttctattgcaacaatgtctgtgtaaaatcaaatgaactagtacaatactacacaaaacaagactgcactttgtagaaatcaaatctacacatctatgtaactcgcatgtgtccaatttttaaatgttttagaaatagctatgcataaattttaaatgtgcccacatttgatttgacaatatatacctagctggtgcgcttcttcttgggaggcctggaggacgttcttggcggcgggggtgaacttgatctccatggggaccatgccggggcccctcc

SEQ ID NO: 41814 - DNA, 595 bp, Oryza sativa
agtatacgactactataggcgaattccagctcggtacccaaaaaaattcaaatgtggcccggagaatttttgttaaattctccttggtctaaaaagagccctcaaattttagtggaattttcagagcacaaataataattattaagaaataaacaaagttaaaaaggtttataaaaagaaaaaccctaaaagaagtcttctttcccccccttcctctcttgggccggctcggcccacctcgctctttccctctctctcctccccgcggcccactcggcccctcccccgcgcgcgcgccgctgacaggcgggcccgcccgccaccctcgctgacgggtggggcccacctgtcatcgccttcctcgcgccgctcccgccgcccgcccgtgccctagcgccgccgccgccgcggattccgccgcatcccgccgtccccgcgcgcattaaagagggggaaatcactccccgtgattccctctccgtttccccccgcttttccctctgtctctccctcggattcgctcggaatctttcccctaaacctcggcggcatcaatggcgcccgagatcgccgcggccgtttccttcccctccgg

SEQ ID NO: 41815 - DNA, 623 bp, Oryza sativa
cttgttcctatacgcatgtgtcgagttattaactcttgtgatctgtcgaaatgtaaatgcatcttcgtttttgtcaagcaatgcatacacagaaaatgtgcagacactgactttttctcagaggaaagcactatgtgtccatcgcaacaagtctcttttcatgagatgcatctaatgttccttacaagttctaagtattttattttctgattatatcaagattgatttctaaggagctcctacagctgcttgaagggaagaagagaatcatcgagaagaaaaggagagcccctcatgcataaacaattcaatgttttatgcgcaagagcaaaatcgttcacctgtgtttcgcatttcttttaaatgtttgaatgactaactcttcgtttcacgagacaaatgcaaaaagttttatgtttcagacggtcaaataaaacattttgatcacccaatccctagtattatccagaatacatcagactagggatcagtttgcagaaggcagtgacaagtccattgtaagacaagaacattatccggcacaatccctgtaactacctacccctgtaactacctaccctccaaaaccgcacagtctagcctatccgacggatggactcatt

SEQ ID NO: 41816 - DNA, 696 bp, Oryza sativa
  unsure (1)..(696): unsure at all n locations
ctggtgattagaacaattaagaggtttgctccatttggtcagatccttactggagatgagggtcctgggttgcaagaagtgcttcataacacatgctataagcattcttattggtttcgctggggattcttggataaaacacagctgacatatactgttcttggcacaagacactaaatgttaaattcatgagattccgcattcaaccattatctctgcagtctatttacatataccaataatttcaagtgaatgaagattaaaaaaaaatccaggtaatgttgatccttaatcatcaaacaagacagccatccatttgattgagggtatttcagaaatttcaaaaccttcagctacaaccaacagatcaatgaaagggcaggttgtcaaatacacagccttagcttgttaagactcataatcctttgtgaaatcccacctttaaccaaactacaatttattgtggtagcaatgggggttgctaggtgaaactaattgttgatgtaaggaaaggtccgttcatcagaaaaaccagcagtgtaaatagtatcactgccaggttgactaatctagttgntacagactcatttgttccagaaccttatgacaaagaaacctggggttagtaacattaggcatgaaagataggttctgtgcagttatgaccataaaatatgtgatttaacactatagaat

SEQ ID NO: 41817 - DNA, 695 bp, Oryza sativa
atgcgtgctccgtatgatgcccaggttcaagatgctctcccaatgtggaaatagcacgtcttaacatgatgcgaaactgtaaaactgaaaaaaaaataaaggggaaatatgtagtagaaatatggaaactactattggatccaatatgggacgcctgagagtaaaatttttactcttgataaaaagaaatcttacacgttcatttatagattcaccggtaatttacaggttttgcactacatatgtagtttgcactatatatttccccaaaacaagaaactctgcaaaaaaaaaagagacaacttggtacaaaacactaaaagatcgtggtctttgttggacacccaaaaatgtgtatctattcatggaaaccgtaaaaacattatgttctatggacggccaatgtattttattatattatgttcaaatggagagggaaaatttcataaaagataagttgcccatggggcctccttcttctcacctccgctgccgccaacagtgccaccgtcctttgcccccaccaccctccctactaacaaccactgccaccaccttcttctcgccactgcagcgagcactgccataacccggcttgctgctcaacgcactccacctacagggctgcgccaccactatcgttggaccactcgtgccctctctatcaatactcctattgtgccctccaccattgc

SEQ ID NO: 41818 - DNA, 573 bp, Oryza sativa
ccctttgtcaccggtggcgacggctttggtagaggctcttggaagcgccattctagagatggtaattgccaagcgagcgtcagcaccaaggtttggctgcggataggtgtcgacgacggtggagcatctccaacaagctcatagcagttagggcatgagcatatcgtgctggacggctccgtgatgctctaaaaacggaggggagttcgatagtttctgaaagatggtggtgatgtggtagatgggctttgcgaagcactagtggcattcagaatacggcgtcggcgtaaggtgttatggacagtgatggtggacaacgaacgaagcagttgatagtatgtgggggttgtgatccgtacaggtgaaaatggtacgactacgagcgtgacggactagttccgactcttccctgaccgaacttttattgtgtggcaaaaagaataagtcgccgatggagtttgaaagtttgaagctaaacttttatcttttttttttgggttggacctgcgctttcttggtactctgggtaagtctggaaatttgaaaacctgcgtattattttggatgcgtatg

SEQ ID NO: 41819 - DNA, 519 bp, Oryza sativa
tacaacggttttagataaaatattgtcagttgtaaacttgaaaatattgtgaatatatatgtatcatggaataacaatgttattatacaatcaatttccaacaaaagattcccgccaccaactcaattaggtggtggtagctagttttgcataagactcctccctgctattaccgttggtcaattacattattttcgtgcggaacgtgacgaaacatagacataagatattaatcgaaaaccagttaatcgaaaaccagagtaccacaatatatagcaaaagtattgattttggaaaactaataagtgatgcgcgcattcacagttatatattcgaacctgagttttaaatcaacatttaacgatcagccttcttaaacagctaaatagcagggtaaatgggaaatagattttattctttgagggaataggttcactcgttattgcatgtcctccaaatagtaaaaaaaatttaaaaaattaaaattaattaatacgtgatgcatgacccgtgatgaac

SEQ ID NO: 41820 - DNA, 692 bp, Oryza sativa
  unsure (1)..(692): unsure at all n locations
ataatcatattcgaatatcttgctggtactgtgttcagttttaggtgctaaccactaatgtttgcctctttgtatttctaaatcccctctcgtacttgatttgaagctgtgattctgagcttttgaggtattgcactgaaggaattggagatgtaattattcccggcttgtgattaattttgtacatgcatgagctgctcacattggtagtctttgcaaggttatgtcaactacaaacattagttgacttggaaattgatatgcctacaactatggggttctaagtgctactgtaatgcaaatttagggacccaccacacctaaattcgagtacaaggacctagatgtcacatccatgcaagtttgtggacctcagtaaatcgtgtcttagttcaccattataggcctattgtgattgccccatcaaagacatactgcttacatcacanacactaagttgtgtgtacattttagtgctcatagcttaatgtgcaatggtaaaataagattctacataatagcaggcatgntttatatgtacccctgtattttggccaactgtttgattggttccatgatgtctgttctacattgacatagctcacttcttgatgctgcttttctgatcatactctggctattaacttcgccttggttttgtagctttgccaaacattagctttgcttcaccg

SEQ ID NO: 41821 - DNA, 542 bp, Oryza sativa
  unsure (1)..(542): unsure at all n locations
tcattaattgtccaaatcaaatagtgggggcttgcatgcactttcgattatcttagtaagaaaaagcattgttattttggcattgcattagtgatatagacctaaccaactatttcatcacatcctttaattgagaacttgtagctagttgtgttgtggtcatccactcaacttcgcagcttcaaatgtctttgtgttgactttgtgtttggttgagttagctttcctcccttgggagatgctctattttaagcccctaaggacctgtttgggggagttttagattctgagaagcagctgtttggcagccagcttctgagaatctggaaaagctctgaaacctagcttctccagcttctggcttcttagttcaattttcaaaatctaaactgtggactgttgaggcagtttctagcagaagcagctgggacaagctcccctaaacagggcctaagactatctncaacaggctaggctaggcatagcagtacccaaacccaaaatacgtgctccaggggctactgtagcaggaaaaaacatgg

SEQ ID NO: 41822 - DNA, 684 bp, Oryza sativa
  unsure (1)..(684): unsure at all n locations
taaaaggttagtgatccaaatactagtggaatattattattctaacatgtatatgcattacaagtataactagttctcctctattgataatattgacggtcgaaactgatcgctaacgaccgtcaacggcggagcagaaacccagtgaagaggtgagcaaacaccggctaaaaaaccagtgacgctcaccacaccaccaggacgaggagcgtcggagccgacagccaccttgagcaccaaaagataagggacacactagtacaacgagaagacaagaaaataagactactacttacactactaaacaagaggagatggccgccctccccccacatgccccacttccatccttcgtcggcgtcagcggtaagccgccgaagaggaggaagaggggtcggagaaggcgagtctactgtagcggtgagtcacgagagctcgagagagagactggttgagtgtggacgagttccacgagcgtcgagtgtcaagttatccgttctcgtttttgattcttttccgattccttctctcttctgtctcaccatctttgtcttctctccctcatctcctctcacatggcggcggcggtgacagctgcngaggacgaggagaagctgctgcngctggagtagtangcggagcactgtggcaccagcggtggcggcttgtgagactatctcttgc

SEQ ID NO: 41823 - DNA, 643 bp, Oryza sativa
  unsure (1)..(643): unsure at all n locations
atgagcatttctgtaagtcgacagcatgtgactacttactggaagatcggtaagtgttgtgtaaggtgtgtggggggggaagggggcattatatcttaactcttcaaaaaagaatcccaaaacagaacaagaatgagccacattatccggcgaataatagccgttagatcaaccagcagacaaaacaggtagaataaatctcaaccattggataaaaaagtgtgttctaaaactttacggtgtctctccttcatatgtgagaaagagatattgaacatagaagacacatcttaaacatagaataaaaaggaatgtttgtatgatatagagaaatgatgaaaacattctttaaaaaaaactaatatatattttatatatatttcacaacaaatttttccattacataatattactaatggattattcttaaacacctatagaataagataatgatagttacgcacatgcgcgacttcatgcactaaaatatggngaacttttcctgtgatgcctacatattgccttccgaaaagctagaaaccacatcattcatattatgaggtattacttggacactagcaccggataagtcatcttgaaccggccacaaacctcgcatatctaaaatatcttgatagcaaag

SEQ ID NO: 41824 - DNA, 686 bp, Oryza sativa
tagctacatccaaatgcatgttgctggaatagaaaatactaaatagtacacaaacttccttaactttcacatttcaaattaagtcaaagtctataccataatttaactagccgaatacaatgtgcgttacaacggttttagataaaatattgtcagttgtaaacttgaaaatattgtgaatatatatgtatcatggaataacaatgttattatacaatcaatttccaacaaaagattcccgccaccaactcaattaggtggtggtagctagttttgcataagactcctccctgctattaccgttggtcaattacattattttcgtgcggaacgtgacgaaacatagacataagatattaatcgaaaaccagttaatcgaaaaccagagtaccacaatatatagcaaaagtattgattttggaaaactaataagtgatgcgcgcattcacagttatatattcgaacctgagttttaaatcaacatttaacgatcagccttcttaaacagctaaatagcagggtaaatgggaaatagaatttaattctttgagggaataggttcactcggtattgcatgtgctccaaatagtaaaaaaaattaaaagaatgaaattaaattatacgtgatgcatgacccgggatgaccggcagtctgaccagctttggatgggcggtctgaccatgca

SEQ ID NO: 41825 - DNA, 679 bp, Oryza sativa
aaaaagaatgaacatacgagagactaccattcgaaaaaaacttatgtacatatgtacaatcaaaaatgtcatatggaatcatattttatcctttttaattatgtcattctcatataaattgtgttaacaattagtaaaaataattttgataatatagagtatttccttgtacattacccatgaacatgcataggtgaattagatgtataataaaagaaaaaacatcaaaactcatattatgtttgcaaaggatgatgatggtaagtttacatataaccaaaacaaagtgatttttgtttgaatatgatagacactatcatttactatatcaaattatatggtctatttcacaatataaatattcccttctttttatggtaaggttacgaggtaatctattgttcctatagttaatatgatgatataagacttttttcagtagttttttatataaacaaaaataaattgcctgcgcatctgcgcgggcttccttcctagttttaagaaaatgtggtggtttgcctttggccatacttcatattgctagtttgttggcaaccaaatctaacacaaaggaagagtgggagttggtgctaaattctattggctcagcactggaaaatagccatactctacaaggtctgaaaaagataccactccctccgttttaaaatatttg

SEQ ID NO: 41826 - DNA, 610 bp, Oryza sativa
cctacaatatttgttagggtagcaaccaaacactctatcaaagcattatttatgccacaaatttagctttgcccatgaacttgtgtcttatcggcatattttggctttaatccaaatgaacatttttaactctaccctaccaaagttttggtagtgccaaaatttacccaagatttggcactaccaaaattttgatagcacatcaatcggaaacatgaccttagactaccatatcatcttcctagtcactaaactcgagaagtttctccacctcctgctaatttgcaagaaaattactagtgaagaatgaccgaagatgtgctatgccaaatgaatgccaccccatgcttgcaggtagacacaagaccgtttgtgctacagtttagtacaaaatgatgtttagcatcctgtcaaagagaaaatgaaggggattcagcaatgttgttttttaatacacaagtgaccatctaacatcttttgtttgattgccatgttacacgttttgtttggttgtcttctttgccttcaatatccccctcttcacaatgcaaaagatatttttggtagctggctaatgggagtgcctaggcccacaaaagaaatgatttta

SEQ ID NO: 41827 - DNA, 621 bp, Oryza sativa
agaaaattggaaatgaaagggagagtgagagggtccatgctgcatagactattggttagaatgttcttaggatattctaattagagaaaatcccttgtatattgttaaattagtcaatgtcgttgagttttactcattcttttatatactctcgaattttaattttacttttgatcttttctatatcctttttgttagttaaccgtttaacaagtaaaaaagagagaatctattctataccactgagtttgtccgagtttaaaaatttaccattgactttgtctcttcctataatatattggctactttacaaattattctacaatacgccattgaaccgggttttcttttcaaaaatacccaaaaatatctgtatggacatataacattaacaattggtttatctcattagaagtttcaaaaaaaatatgaaaattttcatgtagccttcttacacaacatggaattttgtatttaagtttcaagttttttgcatttctatttttttaaatatcacttatctgttatatgctatataaaatattttttgtcggtgtatttaatataaataatctttcatatggtacataagatatttttgtgctattatattttgggtaa

SEQ ID NO: 41828 - DNA, 594 bp, Oryza sativa
tctttaggccacgagacatttggattatcatagatgacttgtatgaaaagtaatctatgtctattataaaacttgatatcaatatatatacatttgtggattttattatacattattttttctctctcacaccaagttcaaactatactttagttttacactgttgccctaagccaaaatatagtgttatatagttcaccccaacccaatgtcactctactttaacctaaagatcacagagttagtatgaaaagatcaatttatatatgcatattgccattgtacaacttaaaatgtactgtgatattttcagttgcaagataggtgcaatttaattccttagtttttataaattatcctaatgtatcattaattttattaggcactctatgtgtaaatctagcatgtgtcactcaagttgtttacactaaatgggacaactatgttgcatttatatgacacaggccaacttcatatagtttctatttcttctgatgcctaaggatataagtaaaattatgcatagggttgtaatagatctggcagatattagtaagcttatgtcatctaatgcataatttcagacaaaacaca

SEQ ID NO: 41829 - DNA, 638 bp, Oryza sativa
tggaggcatctggaattcacatcagagccgagaaattccgcctcgtgaattttccttcgaagagcctatagttatctttagcaatttattttggatagaaaaaggatacaccatggttcaagttctgtcttgctgtaaaaatttcgagccctgtgcacagggtcagcaagatcaagccggtgacggccaacaatacagcagtctaagcgatcggcaatacaacgtcactggcatgtgatactttgagaattgctcttgctgcaaggaatgcagcggcaacgttagcaggtgattttttttctagagagggatgtatgttaatattgggagtacagcaaaatctaattagaactgcatgtatcatattgctaactactcccctcggtttttttatatgacgctggttagtttaaactttaactagccagcatcatacaaacaaaaatggaggtagtgttagaataattaggctaggcccgatttatcctattaaaatctcaaaggcccataataagtgttaaggataataataccaccttaggatttaagcgaggagtatttcaacctaaatagggagttattagaggcttccttgtgaccggttgaggtgggagtcggaaagccacacccgcgcgcgc

SEQ ID NO: 41830 - DNA, 1322 bp, Oryza sativa
ttaaatcaagagatgaaacaagttaaaatgtgaatttgtaacgatttctcaacctatactatctctgtttttaaaatagatgatgctattgacttttttgtttgattattcgttttattaaaaaaaattagtgtaaatttgctgaagtgtaagtcattcttgaagttttttttaatgataaaacatatcacaacaaaataaatgccatttatataaatttttttaatagtaggaggattggtcaaacatcgtgttaaaagtcaacggtgcagcattatgtattaaaaaaacaggggagtattatttttagttctgtagatgttcttgtctaatgatgattttcagcgagtgcctagctggttggtatggcttctcgtgaaatacagcagtcactcagagtctcagacccttcatgattcatgtatttgcttcatcaatgatgcgtccatagaaaatatttagctttcagaattttcgcatagggatacaaagtatatggaaattctatactttgaatcctgctgaaacatcaagttgctgaacgtcagaggttaagttagttaccccagtgcttatattaggcagaattttcttagggagtgttaggatttagggactaaactttagtccatctcacatcagatgtttggacactaatttagagtattaaacatatactacttataaaactaattatataaatgagagctaatctgcgagacaatttttttaagcctaattaattcataattagagaatgtttactgtagcatcacatagtctaatcatggattaattaattaggctcaataaattcgtcttgcgaattagtccagggttatggaatgagttttgtcattagtttacgtttaatacttctaattagtgctcaaacatccgatatgacagagactaaaattttttagtcccatccaaactcccccttagtctgatgtacgaagttatctatttttgaaaggcaattgttgttcgtcctgtttgaaaagtttacagtgaaaatcgacttcactatgtataaaaaagaaagagagaggtgcaattaacctttaggccctctttgaaacgcaggatagaaaagtagtggatctcaaatagtaaaaggaaaataatttgcaagaagttagacaacttgcttattttccaatcaaattaagccatagactgatagacatacaatcttatgggaaatttcctgtccttttctaatgaatccgaaaaatacatcaaaaggctgaattatccataatttatatggtaatcttaaatttcaaaggagtcagtaatagttgaaaacttagata

SEQ ID NO: 41831 - DNA, 1040 bp, Oryza sativa
tacatgtaatcatgcaaaatcattattaaaatattatttacttcaaaaactcaagacaatcaaaatggagctagctacttcgactagtcagttaaacttcagttattctggcaggattagccattttaaggacaataaaaaaaactacaattttctactgtgacacataatttgaagatatatcatgaacaaaagaaaagagacaagtaaacttacatctcacatttgttcagaacagaaagcctgcttggaacacatgattgtccttttgctctgcacacagaactacaagattcgcccctcctgaaatcaacattgatatcatagagcaattgtgagggtgttccattcactcttcctatatagtatctcttaaattggaaaaggccttaccttcctatgctgatgttaatgccatccagccttggtccagaaccagaatcagctgatcctgcaaaataattttttataatcatttcccccctacgtaattaaagaaaattgcaattgtactagtagtgaataaatggtagcagcttttgtgctgcctgggcaagctcagctcagattaagctcgaaacttaaaacaacatgaatacaatgaatcttagttcatcgtaagtaattaacatactcagaggaccagggatgaggcactagattggggatagggagaggtgatcatggagaggtagaccaattcacctttcttgcttacatcataactaatagcccaccaccttatctctaatataacaagagatagagatcttaaaaagatcatatattcaaccggactcatcttatctcaataaaccttactaatgctatctaaactaatgagcatacatcgaactagattactgtctaattcgctggtgaatttcccagacctgcatcctgttatggcccaatggactgcaagtgttttaccagactattggcctgccataacatgcaagcgacatgttctgatatcttggttccttcattctgtgaagttaaaatactgttgtctcggttcttatttagtgttgtaa

SEQ ID NO: 41832 - DNA, 685 bp, Oryza sativa
aagaagaaaaagaaacgggtgttgcaaatatttggccatatgcattgttaattaaccatatcattgcagtggaagattcgaacctatagctatgaaaaaggtgagtttggtggaggagcaggacacggcaaaagaggaagaaggttgactgttgacaagtatactccggtcttaaacttgaaggcacatagatgataagatgatagccgataggcactaacattaggcttaaatttctttcccctgaagtttatcggagatgggcaacctcctcgatccttgcatccagaggtgaagggctctttgaattgaaggtttgagaaaatgtaggaataggaaaaacgtagaatttcgataggaatataagtataaaacggaggattgcaaaacgtaggaaaaatacaggaattaccgtttgattgaaccgcaggaaaaacgcaggaattggatgagagagatagtcttaaagaaaaattaccaagaggttgaagctcttgctaaattttctctaaaatttctataggattgtccattccatatgaatttccaaggattggatatgattcaatcctttggttcaaaggctttatagaaaatttttctataggattgaaatcaccaaaattctatgaatttctttgaatcaaagggcccgaaatgtagcagaagttctaacctactgaca

SEQ ID NO: 41833 - DNA, 671 bp, Oryza sativa
  unsure (1)..(671): unsure at all n locations
ctttgcatgactatcagaaagctggagagatatacgagcagatagtcagaatttatccttcaaacattgttgctcgtaaagcagcagcacaggtttatttgcttataacaattcttgcgttattttgtggtgcatataaattacaaattgattttagcttttatgggctagtagcgttggtgaatgaggttcttcctggtagccagcggcagggaaccattgtagtcagggacaagagggagatacagatataatgatctttcatgcctctatttgagtcaatgaatacaaacatataggtccctagacatgcatgtaaacaagaccaattagcaccatccaaacaggacacttatctctatttagcttaaggcacaagcaagtatgagggctcttaacttctatagactcttggactnctggatgccaactgctaagacttgactctagacacctggatgcacatgacacaactaagaactcatatatctgaactgctatctaatcactgaagccaggacataacaatatggactgctgaggtaagtctagactttcacttatttgctttgtgacttttttgtccagatgtacagggactgtggtccaaatgataaagctataaattattggaagatatgtgaatgctaaactacaaacatcgacttgaa

SEQ ID NO: 41834 - DNA, 686 bp, Oryza sativa
  unsure (1)..(686): unsure at all n locations
acgcgattgtgatgttgcggtcacagatcggcggcggcggagaggagaaggggatgatgtggacctcaagatggcaaaattgcgattacggcggcggccggcgattgggttagggtggggtttgtgttgtgtgcttgggtgggtgggtgggcgtggaagcnatataagtgtgcatttattgtgagtgtctacgtttatactttttttaaaaaaaatgttatactaattaaaccatgtggaaacaataactgacatacacaaaaaacaaaatagtgaaatatgcgaaatggaatgattttgatgttgtaccaactgcttttggcgtattttttatagaaattatcggttttacaataatataattaaccgtatttctaaataccatataaataatatatatgatccatatatctattttagcggccgattagaaatccataaatccttaatttgggtaatgtcaatgatatacttataaacatgtgctaaataaatactaaataaatcccctcacttaaaagtaagaaatagttcatcgggtgattaaaatggttggatttgatcctaactagccccttaaagtctattagaccaagggcaacttagactatctccaacatacttgcctttacaagagacccattggaccgtatgcgtcccgctgccgcaaaaggttctgcccctat

SEQ ID NO: 41835 - DNA, 663 bp, Oryza sativa
agcaatattgaaaatgcattttgttgggaggagatacaagaaagaagtccatttgttcacacgtctcaccggatcatcgaaccaaaccggcccaataaccccaaaatcctaccataaaccctagaatcccctccaccccaaggcccagccgccgcctcctcccttcctctcttctttcctcgccgacgacgcgattccccaccggcgtacggcggcggcggcggcgagggatttcgccggccagctagccccatcctcaacaaaatcgaggggtcggttgctctcccggtggaagagccccatggccttcgccaccgccccgcagcctgtgtcctctccattcgccgcagccggcgccgcgtcgaacaacccccacaagcgcaagaagccggcggcgagggggaaggggaagggcaagggaaagggccgtctcgccaagacgcccaggcgctccgatgaccccggcgaccttccccgccgccgcagcaagcccagcgacaggttcctcaagctgctccgcaagcgcgcccgcgactacaactccgacgacttcgacgaccaggagcgcctctcggatgaggacgaggaggaggagggggcttccgcttcggtgacgacgaagcccgcggcgcggtgaccaggttcgagcaggggtgccgcgcg

SEQ ID NO: 41836 - DNA, 624 bp, Oryza sativa
ttgttgtaattgcaattgtaaagtctacgtaaaaaacataccggattattcttccgttgccttgtatctgtcattgctggattggagtgtttcgatttgtccatcgtgtgtaatattcagatatataactaatatatttaaatttcacatgaaacaatcaagctgaatggaaaccaaatacctacagcaagaaacatctatggaacgcgatgcacaagcgccggcggtggccggacctcgcgatctgcttttctttttctttccctgcgctctcctttttgatggagagcgactctgctcttcgatggagagggatcgagcgacgcttgaccataggacgcacaaatgagaaaaaaattaagtgtcagatttacccctattcggttttagcactttactaatttaccctttaaaataaacggtcgagattaattctacttggagtagaatactgcaagtagagggcaccggagcgtctctccggaataaaacgctggcaggcgagggtcaatggattcacagccggtacccatggacacagatacatcaagcttatacctttttctacgatcgttcacctcgagaacttggttcttgaggttttcaatctcttgagaaatagta

SEQ ID NO: 41837 - DNA, 666 bp, Oryza sativa
aaactctatccccaaacaaaaagagccccttacatagaggggtttcacacagattgaactagattatgatgtgtccacaataccatcggcacgatcatggttgttaaggcgtcgctgtagcagtaaggcggttgcggaggtcaaggcgtccactccgccttatgtttcctccaccttagaggcaaaacgagtagagaaagggaaagaacaggaaaaaccagtagagaaaggaaaggaagaagaggtaagctcatcatggaacctagttggcttgtagagaaagagaaagaagaagcggccagagacattgatggcggctggtgcctcttctcgtcatggcggctggtgcctggtggtgtacgatgtctcttagggcataaaacacgtgggtatgaagactaatgttggtctttggtgggctggttgcctggcttagtgggccttttaccaatttcctttttttttcttcctaatttctctaccatatcctccactaatcacgcctcaatcatctcataaggcgtcgcaatgttacgcctcagcgctatggcgctaaggcagtggtgggtcgccttaaaccgccttaacaacactgggcacgattcaagtgcacaacaaaatttggggtgactttgctagacgatttcaaatctcatgttaaatcgc

SEQ ID NO: 41838 - DNA, 838 bp, Oryza sativa
attaatacatgactacatatgtttctatatgcatgtgtacacattttctataatgtaaatatattttgttcatatatatatctatatacatatgcatttgcataacatatatatgtataaatacatatatatatatgtatgcatatatatgtattgaaacatatatatgcatggtttatatatatatatatatatatatatatatatatatatatatatatatatataaaccatgcagcaacaggggcatgcaaaaaaaaaaggtcagctctatctttagtcccggttggtaaacccgggactagagatagcgatctttagtcccggattggtactcccggtttggaaaccgggactaaaggggggttacgaactgggactgcaaagggtttctccaccagtgacacatgattggaatccaggacatgcctcaactaactcaaaaatgaccatcacatggaaccaaattagaaagtgtgatcagcacttttcaaatatatgcattgtatatttttgtcatacacactctctccaagcagtttcaatatttagatactttcaattgctagcaaggcttgttttctttagtttgagagaaacatctgccatcatatttttcattattattttttatatttttggtaatacgtgatgagcagagcatcctaatatacataataaaagatgtttttagttttaaagcgcgcgcatagagtgagtgtgcatctaaatatacactatcaaaacctgatgattttgaagtgtgcgcagatagcgagtatttatatgtttatgtgcaactaaatatacacgtcaaaaaatgaccgcacagaccatg

SEQ ID NO: 41839 - DNA, 744 bp, Oryza sativa
atatggagttggtatagttgatggctccgattgctttggtgtttgaccaaatctcttccaacgagatgatcttggtatttttgaatcactagtttgattatcaaatcgttgaccggctaatcctttcttgtacttagccataagcatctcaaaatcgtgttggcaactttttgtgacaagttgacaagcacggtcacagcacctaaacgccttgcggtgatcctagtcgccaaccacctcgatctagccaaagggccgaatcaagatgggttttgtagaaaaatagctaaaccggctagcggagtcaccaaaaatcgtgttggcaacttttttgacaagtcgacaagcacaatcgcaacacctaaacgacttgcgatgatatggagtcgccaaccgcctcgatctagccagacggccaaatcaagatgggttttgtagaaaaacagctaaaccggctagcaaagccgatttagagatcaaaatcagcctctaggccgatttagatcgatttgaggataactacccgtctcgtgggcaaaacggaaggtttttaggacaaacctacaaagagttgtcgcactctcgcagcggcggcggacggcgtgatgcgtagattaatttcggccgcttggtagaaactattaattcaacgaaacgactaggttaaagcaaattcggccgtaatatgtccgaatagatcgattccccagtggagtcgccaaaaatcgtgttggcaactttttg

SEQ ID NO: 41840 - DNA, 1382 bp, Oryza sativa
aataaatgctagttggtgatgatgtgaatatttacatatttggatatacacaaacataaatacttgctgtgtacacgcacatcataattgtcaggtcttgatagtgcatatttggatgcacacaacgacacaaacattcgcactcactctacgcacgcttaaaactcaaaacattttttgatcgtctatatttggatgctatgctcatcgtacattgattaccaaaaatattagaaaataataaaaaaatataatagtacatgtttctctcaaacaaaacaaaacataccttgctagtaactgaaaggtgtctaaatattgaaactgtaaggagaaaaggtgtgtaagacaaatatcacaatgctgtcaatgcacatacttgaaaagtgtggatcacactttctataatttgcttccatgtgaatgtaagatggccatttttgagttagttgaggtatgtttcatggattccaatcatgtgtaagtttctctttgctggttgatttgtttaattttgatgaatcatcaaacaataaaaggctagctagtgctaaataaaaagtcaccatatgcatcaagaatatcaatataacgttgtgcaaggcaaatgatcacttgcaacaccggagccccatacccgaaatgccaagtgagcatatacggaaaataagttataagcaaatgccaactgcttgttcaaagttctacaccctgataaattaagtcttggtttcactgatcaccagcataactttcaaaaaaagttctagacatctctttattttttttctcgaattcacatgatagatgtttattattgtattaataaaataaaaggaggacacaaaatcactatttttatttaatctttggattagcgccaaccgtttcttgcatggtctatgcggtcattttttgaccgtgtatatatattgggatgtacacaaacataaacattctctttctacacacgcttaaaaattgtcagtttttatagtatatatttggatgcacacaagcaaagacgctctctacgcatgcctaaaacttaaaagcatttttattgtgtatatttggatgctctgctcatcgtgcattaccaaaaatatcagaaaataatgacaaatatgatggcaaatgctccaaaatcatgcgaaaatgcgaaatttgccccatctgttgttgtactgctagctatttccccttttgcttaggtctgtattcggtattcctagacacattattgttgatggaatttgcgtcttgagccgtaaactgccctaaatttgtaactgaccttaccaactcctttccaccttcattgcttctagggcaagtagatgatgaaatttgcccatgacatattgtcgacatttgatgtc

SEQ ID NO: 41841 - DNA, 716 bp, Oryza sativa
tcctactacctccctccaatatctcatcctagtgctaaatatcctgctaaataaacatcaaacaaaatgattgtccatataattcgcgttgtatgcggccattgctttgcctactttgcctctctccaatatttcatatctcctacctccctccaatatctcatctagtgctaaatatccggctaaataaaggcttgttggtaccctcctttctctctaatgagagagatgtatgtttacctatcaagaaatcacatcatagcagtaaatatatagtcatcatgagtttttcaagcaataaaccgatatatagtcattatgagtttttgaatgtgcaacgaactgatcatggatacatgcatatataacaagaacgaggcttgtatatattgtgtgagggaacaaggatgtcatatgatttaaggaatgaaaaagcatgcggctagctcaactccttatttatcgagtaacagatctagatgattctgtttcggcgaaaaaaatttagaggactctacctgttgtcaacaacaatttcattaggattgaagcgtcacgagaaatgttttattcgtttatacctacctcccggtttcttattttctttggatctcgaattggattgatatttgaaatgtgtgttcgtgctaacaaaatatgacagcaacactgatttaattactactcccttagagcgaccatagggggttgcattt

SEQ ID NO: 41842 - DNA, 4466 bp, Oryza sativa
tggatgggttggggtcacatgggcagttacagtttagcagttacagacagcccctgcctcctctggaataggtctcaccacctccttgtttcaggaaacaaaagccatcatgggtctcagtgagtgagagagagcaaaggagaaggcatcttcttctcctttggacatgcaatgcctctgcatttttcactgcattttgcattgcattttggccttttttttttttggggggggggggggtctcaacttgtgcattcctctgcatttttgcattgcattgaagaagaagaggagtggtttgtgtgtggtggttgcgtgttgtggtaatgaaatgtggagaagagattcctgtggcgacatgggcatgtgcaggggatatcaaagtggtaggcgagtacacggcaagagaagaaagaaaagcaaagcaaaccaaggcttctctgtaatgctaatggctatacatgctcttctcctccaatcatgagctgcaactgacatcctgcaatttactaattactagtactattatactgccattggtgattaattaaccttttttttaatttcgtggtaaacttggttgaatcttgcggctgtcactgatcagggattcattcatggttaagattcggtttaactacatgtacaatttgtgtgattataagatggcaacttggcaccaaagagttggtgagcagaacatgagaaaaaacctgtaaaagaaagcgatagaaccaagaaattaaaacggcaggtcgccgtataacaaaacagagctgctttgctgctaataatgaattagcaactgtgtgtctgcaggtggatttggttgtgccaccactaaccctaattaaaaccggcgatgaatgtcagagacggtgaacaagtcaatgggggcaagtagattatcatctctgaatctcatctcaccttcttatctgccactacaactacaacatcatcagtatatacaatgtacaaacctaggattcctgggaatgagataatgcgctgcgttgacattttctgaacctttgcacgaatgaaccgttgcaacagcagtaaaagaaaaaaaaatattgtcctaaccatcttagctctgcacccagcgtgcggggtaattaagagcagcagtagtatgtactacctggtgaagcagtaaatatactcctaattaaggggggagatttctactacccctgcaagcctagcttgatgtactacaacattctctctgacagacgcagccacacaccattatcctccacttgtttaccgtaagctgatcaaatctgttcagagatcagatcatttaaactgtctgctagctgcgctgattaatcaggctgtgttcagtggtcattggcatgtactagtagtagtaatagatctaacaatttcgatcaaccaaagtacaacacatcttctgattaccaatgtgttttcaccatctctggttgcatcattgcagacatgtacattgcagataaagataagatgattaactaaccaattctttctgtgtgttttttttaaagggtgatgtaagcaggatttggatctgagactgagactagtgccatctttcactttaagcttactactactatactactgctgccttttgcatccaatgcaagcattaaccacctcctcccatatgattctccctcaataagttaattaaaaaattgttgttgggttaagacagcttgtgtagatccaaaatgtggccactttacccaactactccatccatccatccttgtagtaccctctaccttccaaccagcttcccttccatggtagatagccactatttggccaaggtatctttgcatgtttatgcatcactacttgtacgtatccacaaagcaaaaaaccctgtgatatgctacaagatccttgtacatgcagcacggctcattttgatgcatggaatcccatggcatttcccttttaattggatggaagtatgtttgagggagagagttttacagaggattgcattgcacggatcttaaagcaaatatctgatcttcgtttttttaaaaaatgtaagaaatgttgttagtattcgaacatgtcgttgaaattcagacgggaatcgtgggtccaaagatgtcttccatttatttttgtttgtatatcttttttttgcaaaataaataaataagtgtaatactatatgaaatttcatttaaatttttatttgatctgcatattaatctgttttatatttgttgatccattcttgccaagtggcaacagagatgcaaatgggggttgtagtgaagtgacatgagtagaggagatccactatcacagcaggagtgagttgcctgcatatggatggatgatcgaagtatggcagatctagaagggagcatacaacaaacatcagctgatctgtgtgtgagactgacagagttggctcctgcagttagtcattgatcactgggacccacatgcacataaaaaaaacttgaagcacacacaagctgcatcgctgtgtgttgcagggcttgcagcactgtagtacttttgagcctctcccaggacagattgggtggaaagtgaagtgaagcgaagcaatcagatctcagtagaaccaaaagcaaaatgcacaccatttatactagtagtacaaagctcaaacaaaacacattataataagataaaaaaaagtaattaaaagtacaattagttccatatttttttctcttaaaacatactccaaatattttaccagttgtgccaatgcagctagctacctgtgatgtgtactttcagcaaggtataatagcagggtactactagctaacactatcacctttttcctccttccatcttaaaactgaagcaacactcatgagggttgatccccggcctgagtgagtggcacaattccatatcttgatactcaagcaatgccatgttcccctggcctcctctctttgagacttttttttagccttttgaccactcacataataatgccttttgggcagtatacagtacagctgcaagcacacacaagaaagagaccaaaggatagatgcataggatgccatggcaaccaacaaggtggtgtcactcactcacattctcactcctatctaggatgatcctctcctctgctgctgatgactgcatgttaggagagtactagtaaaactaaaccaaaagcctgcagctggaaaggctgtcaactgatgcttctcttctcttcttcctcccccaccatcctatgttgccttctttctttctttttcctcctccaaagttggataggatagatccatctctctctctctctacatcatgatgtggagcaaaatagataaatcgaacatgcatctctatgtgctgggaaagatacctctacaatgcacaaggggccgccttggaattcgggcaaagtatatgcattatgtgccttttgttggtttagaggttgttttagctgctgtgtatggttggtaatacagtttaacacaacatgttgcatctccataagttgtatggattgttaaataatcctccctctgtatttaaaggtactattgaatttatttgatcaaacttttaaaactctgaccatcgatagtccttaaaatatctcaaagtatttagtttgaaaataaaaaggatcatatttagattttctttacaaacagttttacaatattacaattttgttagatattattgttatagaaaacaatggttaaagttgcacataaaaccaaattaataaaattaacagtgccatatatttaaatagggactaactttccctgaaaaaattcccttaagaaaaggggctaactatatttatggtgccaaactttttaacaataatcattttttatattataaaatatatatagttacactctaattacagtataaatttaaatacttatacattgtaaatgttaatatttacattgtaatttttctaatactcactgtatatactatatgacatttagggctaggaatgattatttactaatgtaaaagagaaaaaaaaacaaagagataaaaggggagggaaccatgcgcaccgagataagcgtatcggacggccacaccttcgactaaaatcggacgcaaaaacatgacgacagatttttagtaatgtgatttaaatatataccgagatagtaataaataggtaaaagtacttacaagctgctattgtaaattacggctgtaagatggacactgccgaattgtgaaattgtgaatgtacatgtagcacacaactattcaaaactcagcaaaaaatttctagagatcatcgtattttgtttgccttttttttttgaaaaatctagaattaatatactgtccttcgttttgttttgcattccgaaaatgctaatcctatgacatgggcgtacaatatatgtatgcatctacgacgggggatatatacgtacatatgagccgtacat

SEQ ID NO: 41843 - DNA, 1556 bp, Oryza sativa
cgttgctattcttcttcacgctcacaataaagggggattttgctgtttctagaagagcaactttcaacatcatttacagtaacatgtctcacggtctcacctgacagtttgtcaagtgagttggtgtagaaaatgacacagcaccgcaacacagaaaaaaaagggaggcttgatgcagcaaaatgctgctgcctctgaattatgatgcaaccaaatggtgatgaacaatatattggacattgataaaaacgattagagttgccctgcttatctatacattaatcgattctgctttcttctagctgctattatctcgcaaatgctttctgcaaaaattgtaagagcctagaagaacaaaatttatcagcagcctgctgaaaagattgtgtatgcttgctaaccttctcgagtgacattgctgcagataagaagatgaatggctagctcttggtgtttctgcacaacaaatggttgtttccatgaacacctctgatgctgcgtcttccatggattcctagaccttcagtcaccaagaacctaccaccaatcaagagcaagaaagtattgcaatcctattcagttctccataactagctgaagagaaggagaagaataatccaattaccgaaactaatgaacttaccaggctgatatatcatgagctgttgctatgcagtgtagctagcaatgagcagaacagaagaagaaggccatgattcagcttggtctggatgatgagaaatcttcactctctctcccaactccaatcccccagcttctacagaactcagcaaagggtctgaagaacagaaggaaatgcaaattctccttggtactagagtagagacaagaataatgaagaacagcagaaatgatgggcaggagatgtcctggactcctggttgccagtactacttctccaacctatgctgatagataataatggccaggaagctgatatttaagactggatgagaagagtaggattaatagcaagaagaggtggtgacccacaaggccaaagaagcaaaggaaagcaaatgaaacctgcatgaagatatggtcaggaaaaggatgaccaaagaaagcagagtttaaaaggaagcaaagcaaaaaagaaaagaaaaatcgatcaatggcatcaagtgtgtcgtccctctgtccctcccagctgcttgcctattttcctccattaaaagaacaaagaaagccgagctgctatcaataatggcgtggtggcgataatgatggcttagtgctgatgaaatcgcagcgctgctctacagaaaaaatcaaaaaggatatgagaacaagtactttctcctccgtttcacaatgtaagtcattctagtatttcccatatttatattgatgttaatgaatctagacataatgtggaaaatgctaaaatgacttacattatgaaacggagggagtagtagagattactagtaggtggctgcacgagcagatgagaattaggttgcccgttgctaccatcttggcctccttcttggtccatttgagcaaataaagccacaaccaccacaacaact

SEQ ID NO: 41844 - DNA, 2075 bp, Oryza sativa
aagacatgatcttttcatgatgctactgatgtaatttactgtcaattttatttagatgatgatgacacattcgttcttggcttgttacttttgtccaggagctatagctcaagtaaccaactttggctgggctttttgttgaggattagttgtccaatccctttcaaaggtgcagctattacaaaccttgtgcctgtgtgattataatggtatgattactccattcggttggtagctctccagcgaggccgtgggtttctttcatagaatcgggcatgagaagcaatttctgcgtcacaattatggattttgcaaggctgtacagtatgctattagattcggtagtgggctttgggatgttgtgcgtgcagggcagggtatcacaggatgtcgacctgtttcaggttctgaattgtgtccttggggagaggcatatgcagcatttctgtcatgtctaaaaatcaccatttaacaagtgaatgttgatttggacaaatttggatgcttcgtcttttcaatgagcaactgtgctcattttggtgttatgatcgaaaaaagaattgtccgtgcatatctgtatttagaaaagaaaaggtgagggagggaaaagacagacctgtcactcatgccaaagtgtacggcagtatagatctgtctgcctgttttgttctttttatatctctgaaccactgtagtagtttgtccatgaaacttgaaaattaataaaacggaatcttgatcattctggttggtgctggctgctccctttgtttatctcctacagcaacaatcatcaatggtaaatactggtggagttggtagtagcagttgataattactcaaccagatacaactcatagttgatcaagcattcataagaaggcccctagcctaaaaagagaaaaggccctagtaaatcacaacagttggaatgtgtccctctatccagaacggatgagttacctaggacattctgccctctagtcagtgatatgtggacctgttgattatggggctcacatgtcactcacttaaaattaaagaatagtacgttacaggatcaggttcacccagaacatatatctcatccccgtgcaaaatgcaacagcagataaagaaagaagtaactaaccacatgcctgtgaaaccaagatctgctggcttgacgtggacactgagcacagtggaggtcaataaccaataataatgcggcggtgtggctccagtggcaactcatgtcgactcggcgcttaactgccgaagcacaacacatggggcactcttttattgcacttcaaaccggcaagctgtgaagtgaagggacccggttaactgatgtaccagtaggaatccatgtgagatgtgacaagcatcacgagctgatcaatgtactaggcttgattatgatctcatcctgcagttgttctatcaaacaagaagatattagggcttgtggaaacaaggatgtaagtcagaagaagacacaaaatgaaacgtacaggtgcaatagtgcatagatctatatttgataagtcctatatgtgcatatatggtgtgtcccatactctcattctatatctccccgtcccagcacaaacaaactaactgatggtcccatgaatgaacaaaataaacgattcttcaagtagacagatcaatctccagacatactaccagttaggactccttagtccttaccaatctgatgaatcgactgtttccaagcttgagtttcccgcaaatcacagtactgttgagacatcacagcgaaggcagcgactactgagggttttagatgtaatgctactcacctaactatctgtactgatgatggttgagtggactgtccagtgaaccatgaaaccatgatatctgcagaacacctgaaactgagcaaattagcaaagccagatgaatgttgaaaacgacaaataattacttagcctttattgcattttctttgaaagtacaccatgcaactcaatatgtctacaaattcttttttcaaaataaacctggatgcattttcccggaatgtgtttgttcagcaagactcaccttcaggcttcaacagt

SEQ ID NO: 41845 - DNA, 985 bp, Oryza sativa
acgtgtaaaacaaaagattccaaaacatagaaaaaaaaagaatgattgtttgattgaaccgcagaaattggacgagagagatagattcaaatgaatttttctaagaggttagagcttttcctaatgtttttctaatatatatatatatatatatatatatatatatatatatatatgcaatgagccattgcatagaaatttcatagaatttaaaaagctccaattctttgtaccaaaaaccaaataaaagaattcctgtaggattggaatcatatgaatttcctacttgaatcttttgattgaagggtccctaaaatttatcaacaatctaaatttccgtttaattcttttaaaagaattggtggggttacggatatttaacgttactgtacaaacataattgctacacgtgctaaatttttcttactaacaattatctcaaccgtttgatttaggtaaataaaagttatgtcttttcctaaaatatatagaagcaatatacacaggttatcaattatactagtactacattactactatctactagatactacgtactccctccgtctcaaaatataagtatttttagatctcgatatagtctccgagatactactttgaccaacaatatctataaaagtaaaatgttttacataaaaatagttgcatattatgatagttcgtttaatgataaatgtagtaatatcaaatttacatgattaatctttcttaatttatcgctattaatagttagaattttaaaagtttgacttggcactattttaaaaataattatattttagaacggagggagtagttcagttccattcaaagaaagatgtctctgcctatgattaacttatcactgtgtacatatatttttatatggcgtcacatctcacgtggaacacgcagacagtagtacaggggaggacaacacatggccgtgaccttttatttgtcctgtggactggttgggaaaata

SEQ ID NO: 41846 - DNA, 502 bp, Oryza sativa
gaaatttagcatgagtttcaacctctcggtaacttctcctttgagtctatctctctcatccaattcctgtgtttttcctgcggttcaatcaaacggttattcctgtgtttttcatgtgttttgcaatcctctgttttacacttacatttctattaaaattttacgttttttctatttctatgtttttctattcctacgttttcttaatcctgcgattcaaagggagccgtagtatccgtgaatgcctctcttgggttgaatgcctctcttgggtcttgggctcttggccacatcaaggtctgcctctgcatccactggttccaagcgcccaggccatatagacccagcaatggcaactgcgtggtgtccaccaatacccgatctgcatgcaaaattttccggtgactgcattgcaggtagtactaggcacggaacaatttcaactggaatcgtgtacgtgcaagtagtatgtgaacaatccaaggtattgcctgcgcgaccc

SEQ ID NO: 41847 - DNA, 533 bp, Oryza sativa
tatggattaaggcaggcctgatgattatggagtaaagtgtaaagaagtggctaaattggtgtttctaagagcactaaactattagatggtaaataattaattggcatctgttaagtggtaaactattaaagtcatcaatatgtcgtggcaattaataaattaccctacatattatgttatactgaatgtgacgtcatttaaatcattaataattaaccagattgataatgttgttttgagtgattaagcacaacctacaaaattatttgttctttcctagtttaactaatgttttgctcaattaatttgaaaggaggagcatacaagtgttttgaaacaagaaggatcagtataaaaatcttatttcaaaaacttaaaattttaatgcggaaaaagtaataataagttatggttgataccttgctgtattcattatcactattatttcacaacgggaaagccaaacgaatttcttcacaggacctgggttgtttaagttgacaattgcgcttacagcttatgttgcatggttg

SEQ ID NO: 41848 - DNA, 1130 bp, Oryza sativa
tcctgccccccacaacaagttcactatcctgttgacattcgaccttaacattctcaaattccaaaaatcctgcaaatgaaggaaatcaagcagcacatgtgttttcagtctaagaggatgacacaacagctcaaattctatcaggtgaattgtactgggttcttcatggatcaatggaccgctggtttgcaaattagaattatgcttttgcaaaccaaattcggacctaaagatccctttctatattctaagaccttaattctcatatttatgaaacataatatagagaaatgtcaaattataacaacaggaatggttttttaaagagtgctaaaataactcaacttggtgtatctggcatacaccaagtagtacattttcacgaaacgtttccttgtgtggttagatggctattggcctattagtggcaataacagaactaactctataaaatgtcgtctactgtgtattggacttgtggttaagtatgccatattaaaataacaaaacaggtcatggtttgttttcaaaaacatgaaaaaaaaacaaatctagctttgttttcaaaaaacatagaaataaagcttagatcgaacattgagaagatttttttttgtggggtgtgggtgtgggtgtgtagggagggggggggggggttggatccatcaagacagaataacctttcaatagtgtggccaggatgctcggaatcactctttccttgataatgtccaattgagacgtggagttggattccacctgggctaccatagtgacgcaacagctcctattcttgacacactcgttgcctacagaacatttgctgcagggcatagaataccaaatggcaaacgatttgtcatgggaattacaaagagataataggatagctactagcataagtaacatgaaacatgtatatgcattctataatcagctgcgatgcccagtcctaaaacaaatacagttgtttgagagcttaacagacaggttacatttactgacatgatatattagatgaaagattgatgcgcaaacattacttgggcagggcatgaaatttctgatggcaaacacataatgcaattcaaaaatagacaactgtagaaatttcagtaagtaaagattaa

SEQ ID NO: 41849 - DNA, 1032 bp, Oryza sativa
ccaatttggattcccactcgcgtccgcgcggccttggtattgcggtaccgattttcctatatatttgtcgacaaatttttcctcaaaaatttgacagatgtaattacagtataatcgtagtgtaattacactgtaacttgcatgtaattacactgtaaatatagtgtaacttgtatgtaattttaaaaaatctctccgtaacatgttatttcggtaaaatggaggtcgtgggaacaaattatttcacatatgtgtgtgctatgatttgttttcttcctcaccaaaacaaatctggtaatagatctaacgattaaaaattatgtgaaacttatatataagttacactgtaattatatgtaagttacagtgtaattacatataagttacagtgtaattacactataattgtactgtaattatatctgtcaaatttttgaggaaaagtttgtcgacaaatgtataggtagtcccgaatgaatcctaaacgaacgttgattacacattaaaatactcgtatattaccgatatacgcaacacatcgccccaggcatatgtacagatagtactcgtatattagttgctggagtattatcatactaatgttaaaagaaaagtattattatactactccctccgtttctaaatatttaacaccgttgactttttagcacatgtttgaccgctcgtcttattaaaaacttttgtgaaatatgtaaatctatatgtatacataaaagtatatttaacaatgaatcaaatgatcggaaaagagttaataattacttaattttttttgaataagacgaacggtcaaacatatttaaaaaagtcaacggcgtcaaatatttagaatggaggaagtataagtttattagaatatacttgctccatccttaaatataagacaaatgaacaaaccaacatcatataaataaaataacagagtaaaaacatgttcttcaattttgcaataacttaatgagataatccaagaaatgccattgacaagcgtccaagtcccagaaatgccat

SEQ ID NO: 41850 - DNA, 4740 bp, Oryza sativa
cctttatgcaaatagccacaaaccgtccttgtgttcccccttgcacgtctgcatcgttggtgtggcttgctgagtacggtggttgtactcagccttgctattattcccccttttcagaagtgtagtgcttctgagctgaagatggagttagaggaccaaggctcagaccccagttgagttttgcctgtggagtggagctgaagccccgctaggatcgcctttttccgctgctgctgcttttgtttcggtgtgaggactaagtgcctcttctgtaagtattttacgctttatttacgtttggaactgtttattacttgtcgttttgtgtaccctggctggtcctggacagggatttaatacacaaaatagtctggaaatttgggctaaatttctgggcgtgacatgtactcagcaagctattatatcaaataatgaatgcatgaaatagtatttaagtagatctaggtttactggcagaaagctaagaataaagatgaagaaagcctggtatgtctttatgcaacagtatttagtaaaatcttgagttaagtttctaaccaaataccatatgagtcctgatactcaattccgtgagcacggctattcgaatagtttcatgaatactctactgcagtaaatgtacgctttacccgcagtccacgacttgccaatattcattagcttagtcatgcccagtattaggttactaacaatagtggcacctgttccatgaactctagtccccatgcgctctgaacgtaacgttatcagcagcgagaggagttctggcgttcccggggtttttagagagaactggatgagagaccccacgtcatctcaaccaggtttccataaaatcacacacacagctcatgagcgaaaatcagtatatttacctgcgccttggtaaatatcataagatgccctactcagcataagattgcctcctgcgcgaggacttacaaaaggaaccactgtacagaggtaccacattgttaattaacctaataactaggtctgtccccattctagaagctgcggtcgtactcgttcgtttgacataagtatttggtggcaattatatcgatcgagacagtactagtcacccggaaatcaaccaaatcttacgtactgtcccaatctaagttcattgaattttatgcatattctaactaagcatggctaagcaaaagctagcatataactggttcgctatatgttcagattatgcattcaaaatcatgtatggctagtgcatagaatagaatatagaatataggacatttatgctcaaagggaaggaataataacttgccttgctccaatgcaaataaatccgagataggcaacctgattatccgatgctcgaaataccacaggttgccatccagaataaaatagactctatttaagaagaggaagaaccaaattcaataaaagccataaaatagcaagaaaacgatgaaaagcgagaaaggctaggtttggggtataactatctccttaatgggttattgagatagtattttatgcgtaggttctaatgggttggagactaggttggagaggggatcaagattaggctttggtggaatagtggctagggtttagttgttctcgagtcgatgctgaaatagcatagcatatcggctcgtatttcatgtttaaactatgggtagttggagggtaaatggctgatatggagtttggatggcaggctggctttggtttcatttgattaagccgatatcgaggtaggatgactatcggctgggatttgggtgtttgctagtcgtcattagaattgggtagtatgacgactaggtttggtgtctagccgatgtcaacagacaatataacggctagagggataggaagtttgtgtaggtttagcggggtggaagtgttactccgacaaccgtgagtggcggtggagcggctaggatcacacagagcttaaaagctaactgtgcggagtgcagatgaggtcgagggaatagtgaagctctgcacgttatacgcattgaggcgtaaggtgtcagaagcaacacttcgaccttaggtttgagttttgtcggactttacaaccaacggttcgacatcaggtcagaagaccgtgcgaacgtccccatggaaggcgtaaagttccaaacggtggttgtttagtggcgaagggtatttttgggtaaaaaggaaatatttgaaaggcaaatatagattcaaatggcattaaggaatttcaaatggtgaaatagcaaatttgatatcaaaatatagcttttgaatttagatgaatttaagtccaagtttcatcggaatcggatctacggtttaggagatatggacttctaaagattgggatttgaattaaataagaaaaatatgaaaggctactgttgatgggcccacctgtcagggagattcttttcttttctttttctcttcttcttcctcccgtatcctctctccttctgcttcttcttccagccgaacacagaggagagggagaggaggggcgccggtgctccggtggtcgagaggctgcgacgtcggcggaaaaatatgttcccgagcgacgcgcatccagggaaccagtcggccagcgaaggaaacaagcgaggaggccggaacggcgacggcaagagcttggctcggccaatttgggaggtggcggtggcggtttatctcaaggtagagggagaggggaaaggggaaaaaatggaatcacctcatcgaggccgagctaatggcgcaaggttttgggatgtagggctgtggaagaggagatcggccggtggcaatggtggtggccggtcatggtggagagagaagaaagagagagagataactcggatggatggaagaggagggggttttctctggctatttataggcaaggagaggcggtggagagaggcggttctggagacggtcgacggcttggccacggcgatgctggcgtgaaggaagaaaagacggcgcagattacttcgtgacgacggagggcgttggcggtggcgtgcgcgtgaggaccgaatatccatggcagaacccgcacggcatgcgcgcttgcgggaggaggaggggcggctcagctatgggccgacttgggccgcgcgagagagaagaagaattcggcccaaagttaaaaaggaggaagtctaattttcctagagattcaaataatagatttagaggaatttggatggctagattttgaaaaaggatttgaataatttgaatttgaagtaaaattgactgagagagagtttataaggaaattatattcgaatataatttccaaaagaaatatttctctagttggtttgagtgcaatattttggagagggagtttatttaatgcactcaaatagaaattcaaaatattcaacaccataaataatatggctctagatttgaatatttttgaggatgtggagggaatatggagggagtagagtaaataaaattttagcccaaaatatgtggtatgaaatttagagaattagatatgggctaaatgaggttttggatttgggacggagggataaagtctattctcttagcacaatagcaattactcacaatatttgtaataataatatttcttgtgccgaagagggaatgaaaccacatggattaaattggtggctagatcaaaaggaggaacttgaatatttggatcgagaatcaaaggatgggtttaagatcaaaggatgggctaacaattaattccaataaaattggaattgctttggtttaggttctagcacaatataggatggtttcttggaccataattcataatagtaaaaagggtttttcaaactaaatttaaataaaggaaattttaggcgaaagaaggttttagattaaaaccaaatcaaggaatatttcaagataaaattttaaatgaaaatcacaaaggcttttgaatatcaaagagggattttatgcaggttagcttcaggaggtctcgctaattatattgtcctaagtttaaagaggttattaagaacataagacccggcatgatgcaagattagaaaatagctaattttcggtatgttacaccatcggccgccgctcggaggcctagagagatggggaagagagaggacagggcggagatagaggaggaagatgagttgggcactgatttatgtagggcccacgtgtggatcccacactgacatagcctggttgaacacaatcaatttgccaccttagataaaaccgaacattatactgccctaaaaccggttttaggtatacctattatgtaattaaggggcgtgttgtatctagtatttgtggttcaagtatgagattcgaactggacatcaagatgagggacctagagtaattattccaaatcaatggcagtgaacccgatacagcccaccaaaatttcgtggtagcgatccagtgcagcccactgaatcaattaagcccgccaaatttcagcgatcaaattcggcccacccacccaactgaccagccaaaatttggaccgttacaatggtagcgacccaactcagcccatcaaatcttcgttcgctaccgttgcaagagaccaaattcggcccgtcacagtttgatttgccatgtcacaactctgaagagcgtcagagatttgccgagaaaatcgtactgttgatggcttgacgccaagaggtaaactcataagtcataacccatttttatcatgccatcttacattaacgaaagaaagaaaga

SEQ ID NO: 41851 - DNA, 1218 bp, Oryza sativa
agtatactttgctgttgtttcagtagtgtgcatctctctagttattgctagctagtactccaaagagtgagatgaaattagtggatgaattataagtgagatgatgatgatggtgctagtgtgaatgagtgaagctgccagcatgatctagctctgattaatcggcactgttggcgtacagtcgattgactaatcgtcagatctgtgtgtgtaaatcactgttagatcatgcatgacagcctcatttcttcacactgttgggcatgtgttaaacttgattagctgtgcacagtactgcaagagggtacagacaggataaggtgatgcatctatgatttatctctgcatgtttgatgttttgattactttgtacaagcttgattagttgtacaatactgcagaaagagtacaaggtacagggtaagttgttgcaaactttgcatctacctctacgagctgctgttattttttttctatctagtataagtacgtagctagtgaagtagtatcaatcaatgtatatggttataatagttaattagtttatgctggatttctcagtgtatgtaattaagggtacctattgtttttattagttcaaaagccctagtcttaggattagttgatgatttaaaattataaatgtgtcagctccattcaattagcttcaaacttcttgagtacaacaaaaattaaagcaattgggctagactaatatatcagttaaaagcctatatattgagcactagtacttcactaacttgaaacagctatacaggcccatttatttagttactccactaagcaatgtgtagtagtactaagctagctaggtaattattagtttttggcaactactacatgttgacatgttgtgagtgctttcatataaatctgaagcaaaaataggattcatgtttgctggctaatgtagttttttttctttttgatgcagcaaacacactataattatgtatatggatgatttactttttatatcattaatgtagttaaaaatatattctacgtactaattaaactaacaagacaaccacttcatgcatatcctaattaagacataaggcccccatactttcaccaacatcataggttaatgcattcaacaatataagaattgataaattaatgtagggatcacttaatttgtgtccacttgtcacttacacaaaattagtcaattgtgtagaaaagcaacat

SEQ ID NO: 41852 - DNA, 1826 bp, Oryza sativa
tgaagatctgatggttcaaatagagaatcatcttatataaggcggtttaagaagcttaagattacagagaaaacaaaagtaaccctacattaatagtactagtactagtagttatgctagctaggagtggagcaacaacaattgttaattgtaatgactatattaattagtgtgacagttaatttgcttgaccccagatgagagtctctagctagctgtagttaaccccagatgtgtaattaacttattaaaggccatgcaaccatcacatccaaagcatgagaagacctacacagcacataatagcaacatggttacacagatttgtctcatctccttggtgccatctctcacacaggtatctgatcaacaaggccactgggccaggacatgcctgctgctaactgaattgtattattaattagtacaagtactcagcaataggagaggcagagttgctggatcatgctatagatagatgctctctgcatttcttctcttttcagcagcatgcatgctatgcataaactgataaaaggagagatgtagggtttagctagcaggtcagaaagggttgaggaggcattggaagcataaactaagttatgatcagaggagaaagctactgctacgcatgcatgcatgcacagtactatactatgatcgataaagaaaaaaaaagaaaagaaaagaaatatacaagtatatatattattatactagtagtaggagtattactccctccgtgtttttaatatatgacgccgttgactttttaacaaatattttgaccattcatcttattaaaaaaatataattatcatttattttattttatcttgatttatcatcacatattgtttaagcatgacaaatatttttattataaattttttttaaatgagacgaatagctaaatattgataaaaataattaacggtgtcattcattagaatactgaaagagtatgtactactgtgcaggcagatctcatgcctgtagaaagttttctgtttactcgctgctgtaggctacgcttgatggtacgtgtgctggtaccagcatgtctctagtgcctgtcgttttggtataatataatgtccgatctctacatgtttaaatttacatgaattttcagcaaacacaaaaaaaaacactttataaatcaatacatgtcaatttagcgtccaaagctctctaattaatcaattgcttattattgccacatatgcaaacaacgggtactatgtgcaatgaaatcgatcttctttttaattagcagatgttataatgaaaaccatcagagaatcaaacactttcttacttaaatagctacctgtttaattcagtatcgaagttaaattaattggtggaccaagatgaacatggatgcaaatatgcaatggagaggatgagaaggattttatcagtcctcagctgaagttttgactacaattcctttgtccaaaagacagtttaattttagggtaaagtccattttagccattaatttttttttctcaaagtctattttttccaccctaaactacaaacatgttatttttttattctcaacttttaaatacacctagcaagcttaaaacacatttcaagttttctcactataacacaagcttcatttaggtatgtttatagctgtagaccaacttagtggcatctgtacattagcaaaaattgtgcaataagagtataaactaataaaatcaccgtcattttaaacaaaacaactaaagaaaacatgtcccatggtgttttcatttttagtttcaaaagttaagggtgaaaaataaccgactttgtaattc

SEQ ID NO: 41853 - DNA, 875 bp, Oryza sativa
ctagatatgtcttggaaattattgtcataatattttcaaaaacattatatcttatgaaatcattttaatataaaactgaaggttaaaactagattgaatcaatcttatctccaacatcaaatacttctattatgtataaattgaactaaccaatgttatacataaaagaacagagtgtattatttttgacggaagagaataagctaagtatgtttttacagagaatttctttttgcaaaatacaaagaatttaaagaatttggtgatgaacagtaaaaattctcatgagtatatgaagttagtgaattttctcactactagcatgaattatattaatttaaatgctacttaaatggttaattagttgcgttagagatcgagaacttttcgtgcaggcagtcgatggacgtctacctcaatatatcgatttgtgtagacagtgacagcctgatgatattaattaattaattaatcgactaaagtctctccatgtctcttgaattatttttttctgtctatcaaaagattgatagagatggcacggaggatacggtatggacccgtatctataccaaatctgaaacagtagccgtatatacgtatcgtcttctttccagtctctttcattttttctggaccgattgatgatggatatgaatacgtctgtcaaatattatacaatgcatgtgtactatgtatgaatgtacataaatctaggtcaaatgttgctacaagcttatcacgaaatattaaaatttagaatgaccagtattaatcccagaatgcagtacatctcaattaattaagagttcaccaagaccacctcacagtgattaatcaaggaccttgcagtatagatttagttcattattcat

SEQ ID NO: 41854 - DNA, 1792 bp, Oryza sativa
ataatgctaaattatcatagtacaaaatagaatctactccaatttcacttttacaatgagaccatgggtatctgatatgtacatgaattatcctaccatgacttttcctggacttatcttgtattcttcagaaaacaagcagtttatgcattacgcttgtccttttgcagctctgccttttgacagaagacgtggtaggattgtagatcctggatcctactatatccaggttacatttttctctactttatttatagctatatatctggcctttattatttgtgtgcttttgctcaagaaagtagtaatattcaaaccgaaagtaagagaatcatatatgcttcttaatgcggttcaaaatgattactggccataggttttcagtcacagtttaactccagctaaaaaatcagaaccacagaacacaaaaacatagctgcaacttccctgatacatcactgtactacggcttggttttgttcttacagttggaaatttgtgtagtaattgtaacgctttcctttaagcatttctaatctgctcaatgcatttgactcgaacagtgtgagcatgtaccatgtcacatcagagggaaacaaatgattttgagtatgaaactttcctccctcccattttaactcttccactgaagaatagacacatcatgagaaattccgtagagtttcggttctccctccatcccattgtttatgatggaagtgcaacttttcatcagtcattctaggtctccagccctccaccaacctgtgatcgtcacttgtctgtacgaagcgtctatattattcatctttctctatggccttgtccctactctctagtgtttgacacggaagatgtcagcatagagtaaacaaatggtttgctcctcttgttgctcattttagtccacacagagctcttgacatgctttacctcttattatcctctgttagaataagcagaacgcatgcttatctaccgtgctgtactgctgtgtttcattatccttttgaaaaggctggaaaggccactatggatgcgcttgagacactttctatgcaacatttaagctgatatgcaacgtagcatcatttgttgccagaaataaaattttgaaagcaaaatctccttccaaaaggggtcataagtttgataagctgctaagcaaatacctaatgaaaaacagggtggtgtgattgtccctttcataatgctgttgttggtactctgtttcaggttataagactttctagtattgtccacatttatatagatgttaatgaatctagatacatatatatgtttagattcattaacatatatatgaacgtggacaaagctagaaagtcttataatatgaaacggatgaagtacctttttacatactctgttatcaggattacatatccacaaacctagtgaatactgaatacagatcaggctgcgttcggcagatgctgattgagagaagatttctcttattctccgcccgcatgttttctgaactaaacgttatttttttttgcaaaaaaagaggaaagttcttttaaaaaatcatattaatctatttttgaaaattgaaatagttaatatttagttaattatgtacggatggtttatcttgtttttgtgtatattctctttttctcccctctcgtacacagccaataagagtgctcccgagtccctactcccctcggacagtccaacctcttgattcaatctggtaggataaaaccatgtttggtccttagtacttactacctccgtattttagtgtatgatgccgttg

SEQ ID NO: 41855 - DNA, 2551 bp, Oryza sativa
gagagagagagagattataaacataggagttggaatggatttcattctctggaagctggatcagttatttggaaggggtcaatggaaggtagagagaggttaaagattgttgagattgatttcatttttggggagttggatcaatcaagggaagtttcttggaagaggtttaggaagaggatttgaatacaaagacgaggttatttttggacagggattttgagtagacgatgatgacaatggatcttgaggcaagggagggatttttgattgagatctatggcacaacttagactcagcactcaaagaacaaaattttcgcaattagggttttttgtaaattagctttttaacgcaatgcgagaatcgcggcgttacatttagcaaatatgatagttacttctgatatttgtaaatatataatcagaattagttaattctgaattgaattggttctttgccctgagtactgattttagttcctcaaaaaaagtatctgaatttattctatttggtaagcctaaatttgcatgaattttgcccacattctatttgataatacattatgatttgaaccaagtaggagcactattaaagttttgtgaatttgtttctctaaacctaagaaagaatccctaccctatgcactgactgttgtttcagtttcttaagaaaagatttatgatacttgcagtggatacttatatgtcctataactttaattaatttgagcagttagggaggagacagatgattggtatatagatgtcctgacatagcgaaactaatgttgtgattgtgaatataaatttgaaactccttgcaatccaaatgagtattctgtgttcagtacttttagcaattgatgctaatgtcacatttaattgctcaagtagcagaactattcatttatatctcgattcttccatctatatttttttatacaatttaatattatgtgtgcatatagctaaatctaaaggagtttttgttgtttctgatatttgcaggtttttgaaattgtatactacactatattcctgtttgatttttcatgcctttcaagcaataaaacagagctccacattgttggtttatgagcttgatacgatttcaagtatttcttacttgagtacatattttgccaatcaattttttttcatgttcaaacaatacaatctaattgttcatacttcaatgcacatttcatgttttctaatgtgcccgcggcaacgcgcggggctttatctagttttcttaataattatgtccacctctaaaatatattatgagacggagatagcacgtcagatcgaactcccggccggccgggtagcttcaattatcacattgcaacgatgctcgggtattacaatcagggattcagggtgtggctgtccattgtccacgattagcaaggtagcgcctgcagcttccatgagagaaagtgttaattaatcactcatccaacatgcttaattgccaccaaaccagtatatatagtgtgtattaattaccatggtcaaccataacgagaactgctatacacacacgatgttttgcttacgatagttttacgatcaaacgtctctgttaatggctgcatgttcctgtccgataaaaaaacatattccactcctagctgaatggcacggcgctagatcttacaaatatcgtaatcaattatcggatgcatagtattttcccaaggatatctatctatctattatattattaaaacagctttgaaaggaggcaccacattcgctgtgggggctagaaattcccatattaatcggagaaaaagaaaaagagagtccaagtagaaatacaatttaaaaataactaaaattcggaattaaaattaagcaatattgaaagaagagtccatataataacccaatgtgagattaattaatattcgaaataaaaaaataaaatccgaaatctctatcccttctctactacttaaaaaatagaaatatttccttcatccgtttaaatgaaaaaagtgaaaaaaaagaaagtctgattccccttggaaaaaaaaagatctgatcacttaaaaaggaaaaccaaaaaagtgagattaattaatattcgaaataaaaaaataaaatccgaaatctctatctcttccctactacttaaaaaatagaaacatttccttcatccgtttaaataaaaaaagcgaaaaaaagaaggtccgattccccttggaaaaaaatatcctatcacttaaaaaggaaaaccaaaaaagtccgagaaaaaataccgttaaaataaaaaacgaaaaaaaataaaaataaaagtccgattcccctggcaaaaaaatccgatcacttaaaaaggaaaaaaaacaaaaagtctgagaaaaaatagcgaaaaaaacaactaaaaaaatgtccgattcaaaagtggcgaaaaaacagaaaataaaccgtagatcagtttcccctaaaaagggtacggttcctgtataaggctgataaaatgtggcggacaaattaaaaatttgcgaaaaacacctaaatatggccgtccgattcaa

SEQ ID NO: 41856 - DNA, 1507 bp, Oryza sativa
ttggttggtgttcttcgtctggtggtggtggtggtggtggatcggccatgttcgtcaggaagcttgtggagaaggcctccaagaaggtaactgaatctctcactctcctctccgagtcctctctgctttggcactccctcgatcggtttccaatttgcctcttgatttctggttaaagatgaactcttgcagttcttgtttgatgccgtgcagtagcagtatcaactacaatctgacaaaaaaatttcagagcatgtagttctgattaagtttgtattgtcactttctgctgtttagaacatattttcttgtaggagcaagaaaagaatgttgtctcttagacgccgtgccgtatggtttgctcgacagagatgggttgcctctgttttgatttgaatttctttcaaatttcaaacgcacacacgcgcacaattgccattggagatttggggtagtaataattaaggcagcgcgcagaaggccatgtgatctcattgaagtcgaagcaaatttactgttattgaatgcatatatagtttattcgatgcatacgcgaagcctacgatctttgttaatggcgatcgagatggataagaatttaggttgacgtcgtttcatactttcatgcatatggattacttctagtttgtacttttagcaaaaaaaaaatcacaattaaaagttttatgataaaaatatcttggccggtccatcgagatcaccgagattcgattattcttatgctcggttgcaatcagcgtaagtatcgccacgccggcttttgggttggtcgcgcgtttcagccatttggatttcaccgtcagtttagcatctttgctttggcctctaatgacaccgacccgtctgcatcatttctagctctgcaaatgcttaagttcattaccacaaattactcttgtgctaagcattgatagggggggtggggggggatgatcggtgaagaggtcaacgaatgataaagaaacagtcatactgtagtaagtagtaacttcgcagtggagcaactgatcatgaagtgaagtagttacagaacggaaaaaaggcaggtaaaaattcgtcataagttgaatgcgacagatatggctcatggctggcatagatatctgcaaagaaaattgtcgatgttaagttgggatatagtgtacggtcaacatagttttgtggttagtacgaagtatattattattctttttagtagagaaaataacacgatgagtgtgcagttgtcggttagcaaacatgattctcagtgcgtgttagtagatcatgatgacatctggatgtgttttttttcttttttttttatcgtctgacggtgactggggcatgtgcgtggccggttgagctaatgctggagtgctggaccaggacatccaatgcaaaacctttgcgtgctcgcgacacgtactcagtactacatgatctgaatatctgatcatactactttgtactatgatcttaaatattttcctcatttaatcttggg

SEQ ID NO: 41857 - DNA, 1158 bp, Oryza sativa
ctgttacactatgtggtagtgttgcaaaagcatgttagcgttcagatgcactgaacatgaaaacatagaatcagtatcatcttaattgcttgaattatttcactgatattcttggtaggcacacatgatgaattgcactaatcaagttggttgcaataagctaaagtcataactggtctacaagttcaagaactaaaaaaacatgtgacatttacaaaaacggctaagactgaaaagtcaaaacggcatggcagtccaaacttgtgggggggataacataaaatgcactaatttagtgtttcacctgaaataggtatgcatgatcactgaatccattaacatacaaacgccctgcctttccgtcactattgacccatcgcaaagagactatagacaccctgtctagcttgtatccaaggttaagcctctgaagaggtaggttttgattgcccatcgatgagagattttgtgcatttaaaatatcaggaatagaccaaagatatatatcaccactatcaaatccaatagcaattttgcttcccttggcacaagcccagcatgccgatgttacagctttagcctcctgatgtgactgttgttgcatagatttgccggataaagataccactttgctcgtcttaatatcccacaaagacataatcccatctctgaagataatgagcactctgaagagtgtaccttaattagacatttcactacgtctatacatagaatggatgaaaagatcacctgagtactatctggcataaaatacttaactgcttgtgccaaactagtttggaagagatgtacagaatattcagaagagacaccaacctgttattttcagccaaaggctgtggcgatacaaatgcaacttcaacctcattaccaacatttgctccagaaccttcagcaagaatcaattagattccaaagttggtgctatttttatctttcatgtaaagtatgataattcaaccaatacatattggagtaaacctaccataagattcagagaaaggaatccaatatggcatgtcaactagacatgtctgacccaagtcaagcttcaacagggacacattcccaaaactatcacccacatagctgcatagacaagatcttctaatcagagcacttaactccacaggactc

SEQ ID NO: 41858 - DNA, 1613 bp, Oryza sativa
tgcgcgggccagcctagaaattctcacattaatcagagaaaagaaaagcagagtccatatataaatacaatttagaaatagttgaaattcggaattaaaaaaataaggaatatcagaagaggagactagagtccatatagaaatacaatttagaaatagttgaaattcggaattaaaaaaaaggaatatcggaataggagactagagtccatatagaaatacaattaggaaataactgaaattcggaattaaaaataaggaatattagacgtagagtataaagtccatatagaaatacaattaggaaataactgaaattcggaattaaaaatgaggagtgttagaagtagagtatagagtccatatagaaatacaattaggaaataacttaaattcggaattaaaaataaggaatattagaagtagagtatagagtccatatagaaatacaattaggaaataacttaaattcggaattaaaataaggaatattagaagtagagtatagagtccatatatataaaaatacaattaggaaataatagaaggaatattagaagtagagtatagagtccatataggaatttaaaactaactaaaatttggaataaacataataaaactaaaagtagagtttagagtccgtataaaaatatattttacaaataactaaaattcgaaattaagaaaaatatgggaagaagagtttaaagtcaacataggaatacaatttagaagtatctgaaattcgaaattaaaaattaaagaatattgaaagatgagtttagagtccacatttaaatacaattagaaataacaaaaattcagaaataaaaataaataatattagaagaagagcatagagttatatagaaatacaatttacagaaaattcggaattaaaaaaagaaatattaaaagacgagtctagagtccatatagtaatatatataatttacaaataactaaaatttgatattaaaaataattaacaactaacacgtatataaaatgtaatatgaatattacacattagtagttttgtaaagttattgtaaaatttaaaattatgttgtcgttttaatatatttgaataatataattagtttagtagaaaatagatctttgatcacctcgtatggaaatttgggtgtgacaacatatacactttgtagataaatttttctatacgtgtaaatatggtataattatagtgtaattatgttataatttacatgtagttttaaatttacttttaagaatctcacaataatatttattatttcaatgagcgaaggtcgtgtgattgaattccctcacctatacgcatgctgtgatttttggttgcacgaatagtgaaacaaatataacggttttaaattacatgaaagttcatacaagtaaaatataattagactagcattatgtgacaaatttttagaaaaaaaaaattatggataaatatatatagcaaaactgaatttgagatgatatgtaaccgttagatgggagaaatgcagttggcccaaaattccacttggcccattctgggatgatagatttcccggcccaataaccctcaccccaagtgagatctctccactgggcccacc

SEQ ID NO: 41859 - DNA, 1294 bp, Oryza sativa
gacgtcgagttggagattaccggattagcttagcatcaaaatgaacctgctactactacggctaataaccttaatataaaacgacaaagtcacaaaaactaattacaagaacaagggctttggtgcgtccggcggcaactggcaatggtgttttcttctaccggttgtgtacgtagccgcttcatgtgaaaaactgtcgatggtggttgtttcatggtgttttctcctctttgacaggataatcccagctagggtatggagtttcattttttttaaaaaaatataatggaaagaatttcattaaataaaattacacccggcctctgcatcaaccaggatgtgcacacagcctaaccaggatgtgcacacagcctaaaaagaataaggaaaagactaaggcaaacatgaacatatcatgttgccttctagcaactcacccacacataaccaagacaaacgcatagagtattattcgcctactccctccgtctaaaaaaaaaagacaaatcttgggtttccgtgtctaacgtttgaccgtccgtcttatttggaaaaaatatgaaaaaaattaaaaagacaagtcacgcataaagtattaatcatgttttatcatctaacaacaatgaaaatactaattacaaaaaaatttcatataagacggacagtcaaacattagacacgaaaatctagtctttttttgggatggaggaacggaggaagtagtccacaacaatgcctttaaggacccaacccatatttgccattctcacccaaaaataggggtagattttcatctagaaccttgatatgacaccttcaataaggaggtgacacacagctcaatccaaatgtctagatcagagctttcaccctagagtcattgatgcttgtactttatgtctccgtgtggctaaagcgagcacataggagcaacaaatgcccccccatcttttaaatgacgggtgcccaccaaaaaagatacgctcacgagtagtcatagccgctgagtcgattttagttgtcacctactaatctttccaattaagacagcggtcacaaccagggttttcaatttgatttcggccattttggttcttccaaaatttccaaaatttcggtatttttggaaattttgaaccaaaattttctgaaattttgacataatttaactgaatttgactaaattttgatcaaattcgtaaaaaattgagaaaaaaactgaagattttggctgagataatcacttgttggggggtccaaaatttcaaaccaaaactgcaatcactggtcacta

SEQ ID NO: 41860 - DNA, 678 bp, Oryza sativa
gaatttgctcatattttattcaaatttattcaaaaatcagtcaaaatttcaaaaaaattcgcacgaaaaaaatccaaaatttcgattctttcacccacctgcggcagaaatcttagtttcaaaatttcaaaccttgggtacagtacctcgagatacttttggctggaccggagcaaatctcttgtttatttgttcctctcctcccccacctctttaatctctgatttgttcataatgtttcgtcccttgcatttgcatttgcattttgttgtataattactgtctgaaatagttgtatgaatccgattgtgtataacccctcaaaatgtacatatatgtgtattagcaacaaggatggaaatttcggaagaattttgcccctctcctgcaagcaaatattttgagcaaactttttggatttttttcaaatttgtgaatttggtcataatttattcaaattcaataaaatttattaaaatttcaaaaaaaatcattcgaaatatctaaaaaaatttcccgaaatttcagaattggtgcccaccgaaattttttgcctttccaagaggaaaacccagtttagaaatggattgtcatgcgtctctgaaaatgtttgcatctcttgaattatatctgtaataattgctatgtaattatatagtcgtagatgtcaatctcatg

SEQ ID NO: 41861 - DNA, 1600 bp, Oryza sativa
tcactgagtctcgaacccgggccggctagcccaccaacttttagtgcaagtgagacatggacgggctcatcttgtacctactacggaataccaatgcttgaaaccagcaaggtatgcattatctaaaaccaaagaaatatgtttgcaacctaatccagtccgcgtgctgagcttagcttttacatccagtccgcgtgctgagcttagttttacttggacatcatagtcaccatccaagagtcaaattcagaggatctcattccgaatttttttcacatgataacctggaaggcatgcttgcattatctaataataaactgattaaacaaaagcttgcaagttgcaaccctgattcaacctgcgtgcttaacctaagtttgttcggactccattgtcgccatctaggagtcaaatttcagagtatcatttcgaatcctctacacatgaagacatattctccaacatataaaatgcactagtttagtcattagcagtgaaatgttgacttgggaggaagaactagaagagaggcacctgttcaccacgatttccggacatttttactcgggtggaataaaataggcttcgcttcttaagcttctccgaaacgcggccatgctcctcctaggttagaacaaatcaccaaattaacaaaattccccaactccaaatcaaccttcgtcctctctttcgctctctctcgctctcaataaaaaaaaaggataagaaactccctgtggtgtgctgcgcgaaccgcgagctggagcaggcggcggacggccggagtccggacggcgcacggcgcgcggcgcgggaagaggccctcatccaggtgggtcgcgtggagcctgaggaatgtaggagaggctgtgtgaggagcagatgaagcaatgtcgaccaggagtggccgcgtggagccaagtactcgactcttgaggcggcggcggcggcggcgggggtttgccggagggcggacgggcgccgccggttgccggagaggaggttgggagggagagcagcgcgatttgacataaacccccatcttctattatataattaaaggaataaaaaaaaaaggagacttcacgttcgctctcgtggcctaaaaattctcatattaatcggagaaaaagaaaatacagagtccatatagaaatacaatttagaaatagcttaaattcgaaattaaaaaaataaggaatattagaagaagagactagagtccatatagaaataccattagaaaataacttgaattcggaattaaaaaaataaggaatattagaagaggagactagagtccctatagaaatacaattagtaaataactgaaattcggaattaaaaataagaaatattagaagtagagtatagagtccatatagaaatacaattaggaaataactgaaattcagaattagaaataaggaatattataagtagatatagagtccatatagaaatacaattaggaaataactgaaattcggaattaaaaataagaaatattagaagtagagtatagagtccatatagaaatacaattagaaaataactgaaattcagaagtaaaaataaggaatattagaagtagagtata

SEQ ID NO: 41862 - DNA, 717 bp, Oryza sativa
tataatggttgatcatttgtccatttattggagcatgtgaaataaactcttcctacatgcaatctgtagaatgtgccggaggtggacaaatttcaactgctgcagatgtatacagcttcggagttgttctcctcgagatattcataaggaggaggcccacagacacatgttcaaggatggattgagcattgcaaagttcacagagatgaacatccctgataagatgctgcagattgttgatcctcagctagtacaggagttgagcctctgcaaagaagattcagtcattaacgatgaaaatggagcacaatgtgttctttctgtgttgaacattggactctgctgcaccgattcagccccaagcaagcgcatcagcatgcaggaggcggccgacaagctacacacaatcagggattcatatctcagaggatactgaagcagtcagtttcagttgctctgctttgtctgaaactcactggagcaatgccttttcagtttcagttgttatgttgtctcaagctctgaacaatcctcagaagacttgatgttcatcatgtagcattgctcaatacttgacgcaatttagttgacatgaatactacttccgacttccaagaaaatgattgctaacctgtttccccacaacaatatcagctccaaaagtgacgttccagtattactgcttcccatgtcaacatttcttgactgctgcaatgt

SEQ ID NO: 41863 - DNA, 726 bp, Oryza sativa
ctgcaccccagtcgttttcatggattacgacgtttttacataattactatgaaatctttaattgccggccggtttgatcttcacataagatgctaactaatgacaagttaacaacgttaaatttgttcggtcacgaactcgacttgagacatgtcaacattccatgactaaggccctatttagttcacaaaatttttttcccaaaaacatcacatcggatctttggacacatgcatggagcattaaatatagataaaaacaaaaactaattacacagttagggagaaaaccgcgagacaaatcttttgagcctaattagtccatgattagccataagtgctacagtaacccacgtgtgctaatgacggattaattaggctcaaaagattcgtctcgcggtttccaggcgagttatgaaattagttttcttattcgtgtccgaaaaccccttccgatatctggtcaaacgtccgatgtgacaaaaaaaaatttccctttcctcaactaaacatgccctaatgtagtgataatagtcctatattatcttgggtgcatacgcaaccaaactatgagattttggagtactcctttcattacgtaatataagtcattttaacatttttctcaaattaaattttttaaatttgattaagtttatagatcaatttagcaacatatagaagttccaatgagcacaactcgcctgactgatatggtggcatgcat

SEQ ID NO: 41864 - DNA, 605 bp, Oryza sativa
catcttggcgactgtgatcttgccttcgtagttcttggccacgtcgtcgaggatcggggcaatcatcttgcaggggccgcaccattcggcccagtagtccaccagcacggtgctgccgggttgcagcacgtccgattcaaagctggcgtcagtgacatgcttgatgagttcgcttgccatggagttgttccttgttgtgagtgttggggcagttgcgcacgggcgtacgcagagaaaaatgctgtcgataattgtgacagaaacgaatgtccggacgtgcagcatggctggctaaaaacgcctatgaaagccatagcggcaggcaatctgcggatggctggggcggccccaggtcttcctcgtggcgttatgctgcctgccctttggcgctgcgcgccggtgatgagaagaaagaaggatgcctatgtcagctgccgccgtgctgccggttttgaactgcgatgtcgcgattgtgggggcgggccctgcagggctgatggcggcgcagctgttgtcggcccaaggggtcaaggtgcatgtgtttgacggcaaggcatcggtggggcgcaagttcctgctggcgggcaagggtggcttgaacctga

SEQ ID NO: 41865 - DNA, 626 bp, Oryza sativa
atattcggacataggctagtaaatggcactaacattttcctttacacccattaatttgaaggattgattataactaatttatttggttgctacagtgacaagacatattaaagataattatgctactgtacaatatccattttttttatttattggcacactatttaggttaactattatctaatcatttgatattaattaatttataattataaatatattttattgaatagtgaattatatatcattggaaagcttatgaatttagatgaatttaggttcaagtttcactcaaatccgagttaaaatgaataagttatgctagtgtaaagattcaactttgaattaatccgagaaattgcgaaaagctactgttcataaacgatttatttttaatccaagacatatccattgacaagtgggaccccgggtttattcctttttcctaccgaattattttctaaagggaaataggaagagctaataacaagtggggcccacatgtcatgaactcgagaccataaaacttctataatttgatttttaaccacccggacccacatgtaatagactcaactaataaagattaagaaggggattactattcactaaacacgtggggccca

SEQ ID NO: 41866 - DNA, 953 bp, Oryza sativa
tcgcgcttttgttatctgtttccgtgcgttttttttttttatgggaagcgcggcgcggcggcagcggcagcagcagagagcttcgggtaggggtggccgggtggggcgttcgattggcaagcgccaagcgaggtggtggcgtggcgtggtggtgggtgggtgggtgggggtggactagtgtagtagcgtggatgccggcgctacgtgccaagtctccagggtgcagtttagagtgagggagtcctaaccaaaaggggtgtttgttgttagcttgcccggtgtaccgcgttcagtggtggcgttcaaatatgcgtgaccactgacgtcgagttcagtgtcagctttgtttttttttcttttgcttaaaaaattagatgaagacaattagcaagcgttttattgtactctccggtttaccatcatcgagcacaagttttacaatttagcatcatacggatttgagtaatttagataaaactatacgtactttaaccaaattattgtaaaactataggtttaaaaatgtgtatcacataacaacaaatttaagtcatcatatcacgaaattatagatttagtaatgaagttatcaaagaactagatattttagactttatatccataacactattgagattacaaaagttgtacttctgtgaattgatgtaaatatgtagttttgtgaaaaaaatgtgttgttaaatctacaattttgtgatacattttcttaaacctatagttttgttatagataaatcaaagtacctacgttttgtgatctttacgatttttttaccatttttactagtggactagtaaccagcgtactatggttagatagattccaaactaagagagttgctctttctcataagtcgttccatggcgcgtcctccattcgtgttatcgccgatgcccctccagtcccttcctctattccgacgtcctcgccaa

SEQ ID NO: 41867 - DNA, 4467 bp, Oryza sativa
gcaccccaatcccgttgtacaacattgctacgctaggctgtcaggcattatgcaccatcaaacatgcatttcagtgctccatgcattgtacttcagtacctaggcttagctagcttggaactgcctgcagctagctcagcatcacttcatcagggccacgccacacaactgcactcgaagtgctggatgcatgtagcactaggagtgtattactcgcagtatgtagagccggacggccggccgatcgaaatgatgagcccatgattaattaaccaatccagcaccatcctagttggcactcccgattaaaaacgacggcagcgagtacgtacaaacggtaggtacacacagctacgcgaaattaaagcttgtagtacacgaagcatatatctagtatgaacagttgaacacacccaacccaacccaacccaacccaacccaaccaaccatccacggaggaaaaaaaaagagatattctcacgaaagagatcgaactgttcgagtacgcacgtacggttaggctgtcacattcggtatgcgtggcccccggcgaaagtagggaaagtacgggtccggttacgctgggaggactgcgcgccggctagccgctaggagtcatcaccctggcccgtctcgcgctttttctgcttgcccaccaactacttctacagttctactagtactcgtccggtagcgaggacggcacacgccacacggccacacgatcactcaccgatcggctcggccgcggtggaaagcagctgtttcttgaggggccagccgcgcgcgcgcgcgcggcgccggcggatgcgggcttcctcgacccgtgctgcctatcgggctatcggctatcggctgcagcacggcgaggcgaggggactcgcgcgcgggatctggttgggttgcccgcggcttgggctctccgcggatgcatcgccgtggcctggaggaggcctggaggagaggagtggagtggaggctggagctagctaagctagcgtgggttgtcacacgtacggctgatgtgacggagcccgtcggcaggtttggtcgggccgcgtggttagttatctgattgttgttgatcccggcgagtttatgtatgtgtcgcaacggagtgtacggtgctactcgttctgtccccaaataaaccaacgtaggagtatctggtaaataagttagattggtttattttaagataaaaagagtatgttctgttcttggtttgttttgtgataaatgtagcactccgtaacttaatagtataggcagcgagagaatgtgatgtacgcaatatatatatgtttacgtacgtctagagtcttggttatggctctgacgagtaacaaacggagccaaagttgctaattacgtgcatcggagcgactggatcgctgctgtaaaattagccgacgtttgtgcttttcatcgaccggattgcttctgcaatttgcgcactgtgggaaataagtgaagtgggggcttgagatcagccaattatctttgaggatgtgagctagggttcatcacttttggtttctcactgagctgtgggcactgcaaccttagaatttgttttttcctcttgtttattttccaaatctgcaaagccaccgacagttaaaagagtaggttgggtttcaataatcatttttttttaaaaaaggtaatgaacaccaacaaaacctcaattagggcagctatgtggctctagtggcgagatacgtcatgccattttgagcgttactgggttagttgcaatcaaaatactagaaataagcattagactatctaatcaataaacaatcataacaaccgaaattttgcaactctctcaatctgtaaccaatatgtgtatacgagttttgtaagaaaacaatcaagagatgtatgcaacttattttttaaaagggaaaataagggagcacaataacgtgttaacagtgaatcacagtgttttgattgtttggaaaccaattaaactactaatgagagtacgcaggtacagtaagcagctttgttgggaatgaatggtacggctgcatgccggccagtacgaaaaatgcggtacgagcagacaatctcatcccttcccgaggtatatgcatatgcggcttgaaatggtccatccaccgagagattaaaggaaatcatttggccattcgtgtgcaaaatttatgatcctgatccgagatcgatgtgggcaatcaatcattggtgtcctaatttgcagataagttcagagatggatacagaagagaatactctcaacacaatgataggttcagataagtagatgcctgctagtagggacatgctactgctagggacatgagacaccgttctttagttcagatcttggtcggctcccctgaatttgcgctagctttggcatcttgtttggttcaatagggtggtttgacctgtaattaattcatcatgcttccagaaaattattgttgtagagtttatttagcatatttcagtttaccctgaggagaatagattaaattgcctcgattcatctggtgactccactggtccaacgctgtgtagctcattctctgtttggaccacacgcattgacagggattcaacattcaaggggattaggccatgtacgactgcaactgtgtcgttttgaggcacagttggatttttattaattggtgagaaggtaagagaacttttttttacaaccaaatctatgaaaaaagaggtagttccacaaatataaggttacaaatctttcgttcaagaaaaaataaggttataaatcaacaagagaacgctatctgaataatgtttctgtaacctttggttgtgtcaaaataagttgtgatttgccatgcgacctatcatgcatgtcttttgtgtgtagtttctttagttgttttgtagtatttgatatggagaccagaacacaaccatctcaacgctgccctcaaatgaaaagccaattctcgcaacaagaaatttctccactccagctccaggaagaaactgaagacagaagacaatctacgaacagagacactccatgaaaataatacccaaatttatgtttttaaaacaatacaatacacaattacacatcagcagcatatctccttatgcccccatgcagtagacaacgaacccaactgtgtgtgccatttgctgtcactcaaatcggtcactgtggaatttggtctagcgtccacttcatgtcctttgctctgatcactttagaatgcctaataaattccttctcccaatcatacaatctgacgcaacacccatgattaattaagcagacctaatcaggcacaagcaccggccgaaaggtgcaaatcccctcgtgattttgcttaggactcgtatcaaaactaacctcctctcacctaaaacgaatgcaatagtacgaaggttcagagagagttgacctgatttcgctgcaggtccctcgagctaccacaagatcaaagaaggcctttgacttcccaagcttcaataatggataggactgtggcatttatatccatggattaaaaataatttcaaatgcatattgtactatttttttccggtgtaatataatgtacaacattacacggattatgtgtgtacagtaaggctgtgtttagttcagcgcaaagtttgtattttggttgaaattggagatgatgtgactaaaaagttgtgtgtgtatgacaggttgatgtgatggaaaaggactgaagtttggatccaaactttggatctaaacacagcctaatatggctccaaagagaggaattttgtataaacacatgcaagaaacaatgtaattcctttttttgattatacgcacacacactgctacacgtgcaacactacactcacacacccacatacatgtttcctaacccacactcaaagagatgaaaactaacatatcccttatctcactaaaattctattgaaaacacacctatatgtacgtagtatttatggacactaggatttgaactctagcagatagagttatgcacccacaactctatcatcacattgccggtgcttctctagaaacaatgtaattctaatgccatacatgtgaaatttccatctgcagctgagattaattggctcagacaataggatggcaagattgaggagaccctttggaatcatcagtttgcatgccccaaagatacaaatcagattttaggtgaagaatagcatcacatgatcccatgcgtaccgcccgttgcagcataaaagcggcgggggtgcagttaatggcgcgagatcagatactgtgtacgcaggtagttcaggtggattcagtgatcatatcctctgcatttttgcaacttgcacttcttcacagttcacagcaagtgtttggggggaaagctgcagtgttgtaccatttggtcggctagctctaaatgtttctgtcttaaaagaaaatttactgatattttgccctttcggcttaga

SEQ ID NO: 41868 - DNA, 782 bp, Oryza sativa
cctgcacccctcacaaattttttaaataagacaggcagtcaaacgttggacacagaaacccaaaaatgaagtctttgtgggacggagggagtactagaatagacacgtgtccaaattcatagtactaggtaacatcataattatactagtttactctatatcggggcggagggagtaataattagagcaaggctaataatacaaccgacctgttggctacaaggttctttgtagcattttctcaacctacccatataatagtttgcactttacaattaatacagggcccacttgtctctctcacagagtttcttggttcttgtgtccaagccggctgtaagtttacagcccgcttcttctctctctcctctcttctctcctccacctcagcatttagccggcttatagcctactattatacttgctcttaagttggttgtttgttggctttctgagctctgtccacttcccctgaaatgatgggtttttgtctcctttacaacatccttcttgctgttgaggtagctatatggtgtattatatctcaaacctgtaaggagaagatttgtattagaatgtcagtataacttatctctacaaagataaggaacaatggtaaagtctgagcacaagtaccttctttacaactgtgtggattccaattgataatacactgttcattttactgtgaaacagttcaacccaattgctgcttgatagatgaactgcacctttttttactgtgactttgtctgggttgctgtattcactaatttctcaaa

SEQ ID NO: 41869 - DNA, 689 bp, Oryza sativa
gtagatcacaggtgttcttggttgcctgtacaagtttgagagttgtggcacgaggttgcacggaaccagatcctctgaagttgggaaaactactcccttcattctaaaaaaagacaacatattacaacgaatctggatacagaggttgtcttttttaaaaaaaacagagagagtacgtcagtagcccatcgatcgaccgtttctcaaatatggaacgctcccaagaaaaatccaatgttgtccttgctcgcacgctagcgaacatgatagtgactgcgagcgatggcatcattggcttttttttttggagcattccatactcggaggacaatgaattgatacaccactgccctctaacatagtttttctaacatcagagaatgcggtgccaaggttgcacaggttggatgggtcgtggatagggctggaaaaaaggatgatggcactttagctcgcacagctcggcttgtttgggtttgttaacaagtcaaaactaaagtttaacctactcgtaaatctcaacttaactcatccccatccactcattgtcacaccactccacttggtcataggcctaaatatttagactgactttagatgattatatgaaagtatgaaattaatggtgcatttgctaaatttgtgatgatttaatacttatattgtatgcaaacatttgtaactttgaa

SEQ ID NO: 41870 - DNA, 5565 bp, Oryza sativa
  unsure (1)..(5565): unsure at all n locations
aaaattgtctcatccgacattgtgattgtaatattataaaaaagacatagcatagcaccttaccgactcgaccgcatagcatgggaccatgagaataacaccgacaagaaacttctgctcctgtaaaaagaacacaaatatggcaccaatgagccaaaatagcaagtcaaacacagctccagatatatgaacacaatgcttcaaattgtaaatgttgattgcacctctgggttcttgtaggctgacagatgattgaacagcaagaacagagatagtgaaagcgaggtgatgacaaaaatgccagcggtgattgaagcccaaatagggggcgcatagctcctgaaaactgagtacagctgctctgccaattccattgttctctcttgtctccctcaattctactcaaagtacgccactattagagctaccaatatattgacagcctcctcctgtttcacaatatggttcataaagtatcataattcacaagccccaactgatactggagtcctttattaggaggcagacaccaagaggtaggattatgttcttccaccaaatgcacggtagtattcaactgcaagcacaaaaaagactgaaatttttatgggcaaatcccagatcagaaggaccagcagcaaggacatgccctccatagaaaggagtaccagccgaatttaaatctggagaaaacgaggctcataaattaagcaaaacaaaaatcgcatctttccaatcaaactcctaactttgatgccgccgtgaatcagaaacaaaaaaaaaacgcaaatttctgccgaatttccatcgaaaccaatctattttactgctaatagccctatagagtgccccactgaggagcaaaaggagaatccgcccaaggaggggcaatgaatcgaagaacagatattacggtctgaaacaacacaaacctggaggatcagatttgtgccgcaagagaggagagccaatttatgaagtgaagggaataaaagaaggaagaagccgaagaatccaacgatcaaagttgcgtctggatttggaatatgggatttgggatttggagaggagcaggagttaggagaagaatgtgttgcattctaattatgatctaattagaatttggagaggagcaggagttaggagaagaatatatttggagaggagctttatgatctaattatgcaacacacaatgtgttgcataattagatcattgttgatgagactagaagggtaggtggtggggcggaatcgtagttagcaggcgatttgtgacgagaaattgaagttcagaagtgagaaatctcgtcatgagagaagagagcacttggttccaacattttggagtctatgctgatctgggcccatctttcctttcttgtcccccccccctttttttttcttgctaatctaggtctctaactaactttttccccttatcttactagttacaagcccgtgctaacgctacggtgataattaaaagtgaaacaaccgagtacagaagctttctttctcacaatataatgcaatataaatttctatatatcaagtgcgctgcacaactctaattatgcaacacattgtgagctagtggctgaacaaagaagtaaaaattgcaacaaggtgcacacatctaaatgtaaaacattccacaacatatattttttgcacataaatatttggaaaatgagtggaaacaaaaagaaagagagcagaataaacaccgcgtgctaaaaaatgttgagcttaatggttaagaatatttagctccagaaaaaaatctctacaaagaaccaaaccatagaacaagtcataaaccattttatctgattttaaacttctttcacttcctagaatacatgaagctcctatggtataaatctgattgttctaattgctcctctgtttaagaaatgtatctaaagaacaagatgcaatgtggtgagggacactcaactttcaaatcctggtagtacatctccggaaattagaacaatagtaaaagctcggaaattcagcaatgaactttcaagtctttacagggcatatttcataaattcatagtgatgataaaaaattcagcatatgagcttcatgtattctgggcagaaattcagcactgaacactcatggtataacatttgatatgttcagattgcataatttccatgtacatcaaaattattattaaaggggtaaaaaaaggatccaacaaaatagaaaagaactgctacctgtggcaagtaattttctgttaagatatcagtaagatgtggcaggtaaatgttaaaattgcaaattgtcagttcttgtagcattattgaatagaagtttgtttattgcaaaagtttgagtgagctacttatgagatgtacgaggggaaacatgaaaacaattgttgcttgtactacatcatttcctcgtgcttttagagggtgatgtcaagttgattgttatttgcataagtgaaatgaaattgaagggcattagtggttgagggatatatttgaacaaaccgtaccactctataatctatatattaatcaaacactaatgggatttctgcatatatccttgactttaaatggcagaattcccaatgaaaagaattacaatgcatgaatcaaacaggcaagcctagcacattcatacttttttctattttcgagaaatacgcagaacctacattcagttttgtatgggcgagaagattcaatcctggatataagaaacaatgcatattatgagacaaaactagagtgaagtagacaaatagaatggagaatatgtggatcaggttatttatttattcgggcaaaactgtgtacatggaatattattttagatttggttcctacaggttcaaaagagctcacatagtcaatgatcattctaaatctaaagaacacaatggatctaaacctagggaactgatcacagatgcacgccaattatcagatatgtatgtactccaataagcaggaatatagggtcactgatacactgcaaactagtatttatttcttataaaaaaaccaaagagattgatttgttaggaggatgtatattgtacctgcttggaactggactctgcaagctgaggaatgagacgagggcatggcctgacgaggcttcgcttgatcctgcagcaattccaacctcgaaaaatgatctgaaacctgagtatttttttgtagctggaaacattttaactggtaaattttgtttctcaaactatctaatataaaatatcataaactaaaaagaagtgaaattggggactataaaagtcacaacaagattatgtatgcatgaaaagacacggaagcatattgaaagacttccacagctatgatttgtgtcatgccaacataaatcaacattattaataaaactagtgaatcatcagcacgcaaatacacagatccaaaaagaaaaaaaaagaataccatcgatcaatcaacactcaagttagcattcaccttgagggagatgtgaagatgggcagctaaggagcggaaccacgggcggcggagggaatcgaagatgcaggcaggacgacgatttgcggtgcggggtcccggcggcgagcggcgggagatggaggcgggggaaatcgacgatttgcgctgaaagggggcggcggcagcagggctgaggggatcgacgacggcgattggatttggatggatggggggcggaggaggaggaaccctcccgcgtaggcgtagcgtgctctcgatctgatacgttcgatgattttaatactactttgaactgaactataagaattttctaatatattttacgatattcttataaaaaaatttggtgagtgtttgggaccgaaacaattttatatatctactcttattttttctatgaatctttcatacttaagattgattattattattttactgcacggatagtattgcgagttcaaggtgaaaaatacctatncnncgcggtagggaatagggaatagncntncacgccatataaaattgaatctttaaaaaacatgaagggggattaaaggtgtgtttagtacatgttaaaattggaagtttggttaaaattgaaacggtgtgatggaaaagttgaaagtttatgtgtaggaaaattttcatgtgatggaaaaattggaagtttgaagaaaaagtttggaactaaataaggcctaaaataaaaaataaaaaagatgaattcctgaagcaaaaaattcaagttgaaatatagtgcaaaaggaataatttgaagagaaaaaaaatgacaagaaaaaaaaactgaaaacaagaaactagaaacttcacagtactagtagtacaaaacaaaaaaaatcagagaaaggtgttaataaatcaagagagagatataattcctgaccggcgttggactggcgcagccgcggcgattggagtggaggggcgttcccctccggcgacgattgcttggggagacggagattaatcgatccaagtattgtttattaactcgtgttgtgccgtgtttttttttccctttaataaattggcctaattgtactgtacctttcgttctcttacctaaatctgatggcctgttccagaactctccagttctctcattcatcttcttgtttttcttttctcatagccatggccatttatgaattatgacagaaaattaatcagattatccattggattggattgtttatcacattaaagaaaagtaatcagatccgcagttaacttatcccatcatatcagttcttctggcaaagtgcgtgtaccgaatgtcagctataccggatagtcaacttcagagctcattcacatacttcagttcaggaactaatacagttattacaagtcccataaaaacaccaacaggcgtcaggccgcttcattcagttcattacactgatcggcaaatggtcagaaagttttgcaaaatgaaagtgcttctgccaaacttcatatgttttcctgccttttctggttgatcagacattcaaactcatcaggatacaccaacaaaattgtgtcctaaactcctcaagttactgttctgggtttcaactgtctagagcttaggaaaatgttcaggtttgttatgctccacattgaatcaagaaaagtacccccaatcatttttagtgcaaatctgagcatcggtagaatatagtggagcattttatgtgaatccaattgacaacactgcatattgtcatcaattgaaaaccatgcctgcttcaacctcaagcagctttctccaagccaaaagcaaggcaaattttgggcacaaagagttcagaattgaatttctctaacaaactggtgcaaagagaagtttactcatagaacataaccaaaaacatggtaaaatggcacagaccacagtagaggtagactcaactcaagatgattgaacaggcaattcaattaatgtttattggcaaattgcatgtgccacagaacaaatgaagaataattctcttaaatacaacatgaaatcaagttccaacagatttaattggaagcaacctaaaacatccaaacgcagatcaatgtct

SEQ ID NO: 41871 - DNA, 514 bp, Oryza sativa
aacctcctctcaaaagagaacaaaagtagctaacacactcaacttaaacatgactccatgaagattttcttcatagaagtacaccgtctttgtagtacgaaccacccaccctttaacatatataaacttatgttccctgatggtatgtggtttttgtcagcaaacttagttgaatatatatactttttgtttgcaacttgacgctggattttaggccattttggatggctcctgtgccatactgaaataaatacggctctgagtatcttctttatcacacacatgtttacggacgaacagtgttcctggtagactggtggaccaggtggtaccctggcactactgcagctaaaattaattagtaattcaatttatataggacccatttctgccatacaagctcaccagttgatgactgtcatactgatggtatactgctcctcgtattgcacatttgaaagaactaactgaagaaatctataaatatctgtatgaaagtaaaaaaaaaaaaact

SEQ ID NO: 41872 - DNA, 877 bp, Oryza sativa
ttaatcaaatctaaagaggattgacttaaaaaagttaaaataacttgtaatttaaaacagaggtaaattttctataaatttaattgacttaaaaaagttaaaataacttgcaatttgaaacagaggtagtatatttaaagatattttcagaatatatagggttacgtttattggattcgcctaatagcggcaacgaaacataattttggatacgacttttgtatttctacaattagtgatttcaaattaagttcagaaattaaaattaaaaagcacctataataatttaaaattaagtttaaaattttaaattttagctttgacttaggctgcaaattgctttagcctttcggatggaagtaattaggatatgattaattgagtaataaatgttatacacttgaaaaatatatttatttattttccaaaaaaccttcatatatatatatatatatatatatatatatatatatatatatatatatatatatatatatatatatatatatatatatattcatttgtttagatatatatataaagattgatccatcgagtaggtttagacatatatactgtacatgtatgtatggaatatatttactcacctttggtgtgatttctacaggaaaagaaataccaatgaagaagccgaacacggccgcggataatgccgtaaagatcgaacttgctgctttcatcttcgacctgcttttgctaagctaataaacttatcaaccaacaattaagctgttcgatcgatcgcccagctagctgctagcagaagctcgatcgatcattagcatgcttagctagcttgattgtcgctgtgctttgctcctggatcgactagctatagcctatagctgcgcattca

SEQ ID NO: 41873 - DNA, 556 bp, Oryza sativa
ttgatcattcaggggaagcttaattgcgcacgctgccgacaacgggtcgaccggcagccggccggccggccgcccaatcgatcgaccggcaaccaactcgaccaatgatttgtcctgccgatatatatacacgtaattgttcggctaatatgagctacgaacgaaccgggctgttgacgaacacatgttatatatacctacatcataattcgatgttaattgagcttaattcggtccctcaaaaataacctaagatgcttaatgcttaatccttcatggtttccattgaattagctgttccctggaaaattgaagtcggcgtggaataatatccatgatataaaggcatcgaaaggctggaccattgctcaaaaggatgaggtcgagtaccgctcaagtgactgacaggacaatgagctagtaccagaaaactagctgcaggtataacttttgaaagccgccttggctggctgtaccaatcctttaccggaagcacgacaaccaggaaaaccacatccaaccgaagatatcaacaggactgtatattactgccgca

SEQ ID NO: 41874 - DNA, 674 bp, Oryza sativa
tacagtagctcatcaatgcaaaacaaacagatatagtttgattagccttaaaatattacacgcttaattgtgtaatgcgtatatcaagctagggtttgatattaacccgtgcatatcagttgatcaacacatgcacgtgaagcactcagtcgctgttgatcccatggactgaattgccccgtgtcgtatgaaggttacgccggcacctgtacagatcgtaccaggcgacgagcagacacaccgggacttcgtctcgatctcagccggtgcgtgaaaacaagaaaaagaaaagtaatagaagattagtctgcagttagagaatgatctaactagtgaaaacgacaaagccaatgatattaattggagatcgaatcgatgaaattgccgagattgatcccttcgactggattgaatccgagacgaaaaagacatgcttgatgaatccggcgatgtcggagattggttccatcacacttgtgataggaaactcgacgaacccctacctggcgcgccaactgtcgaaacatgaattcggcaataataaaagggggtagcgcacgagacctaaaagtggatggatgcagagacaaaggatttagacaggttcaggccctctcaatgagaggtaataccctactcctgtttggggatttgaatccgccaggtgaattata

SEQ ID NO: 41875 - DNA, 704 bp, Oryza sativa
acagtacctcatcacggcaactgaagcggcgaaattgcaacaggcacaggcaggtgaggtgaggagcattctgatggttattatttttttttgcccccaccacctccgccgttccgcttccccggcccgaatcatcatcccccaatctagttcgtgtgcgctgttgtcgctgtgggatttcgcggtgtcgtattggattcgatattgggttggttggttggcctcgtttgctgttttgattgttgattttcttctcctctaataactgcacgcgctgatcgtttctgtacctgcgacatggatgagatgtccgcatttttttttgttcgtaattggggaggggaagctagccgtatagccgattgttagtatgttttgatccgcatttgcgcattgatcggagatgatagttttctcatgtcacctttctgtttttttttcctttacttctttcgcgcatatgattggcttgaattctcctgcactagcggttacctgataaaaaaaaattctgcgcgtacggagcatcggaatgtgaatttggggaccatcggtggcatccgaaatttgtcaatatatatacactagtatgtgttaatcttgaacttttacatggtgaattgctctagccatttgctccatccatccaaagtagtatcactgcacttgcctagtatttagctgcttcgtgtggtgattggtga

SEQ ID NO: 41876 - DNA, 1327 bp, Oryza sativa
aaggtcgaggcagatgcgaatggaaagatgagaaggtagaaggcgggatacctccatctaaccaattggacgtgtttcaacttattataaatatatatttttagacagaattaatttgatagttaattacagatctactgtattaggatggacataattgcgccttgtatgactcgtccagttaattcgaatagctgtatataaacagctcacaaagacttaaatacattgtccacgcgattagctatctgtcatatagtatagtggtttctcatattctgccataatgaagtaacttattgcatgcatgtactttatagccaccctgcttgaacatttgatcatcgagatcacaagcaaataattggttaagagattattattgcattgggctatataattaagaagctatagacagatcgaattgtcggggaaggagcattgaaacccggtgcccacacacagtgtgtgcataggtggcctagctcgacggctagccgtctactgttccaattaattaggcagctggtgcgatctctgtacatagccggtggggatttaagaggtaattgatctgatccatgcagctagcctgaggaaacacatgcgtcttaatacatttgtgtgccgggtccactggaccaaaacgagatgccgccgtgtgttatcaattgggtttgggcattcattcatacgctatgcacacattgcaccacctgcgactgcgacctcttcgaattttgccggtatatatgttttttcttcaatttttgagaaggaaaaagtccaggagaaggtggttatattgctctgagtaattttcttgagcttttatcaacctaaaattgtagtgctccctctataggttctggacaacatcagctgtattttctttgttagcctagcgacggctagttcagtgctaaccttctcctaggtatttgcgttggtgttgtttgtgtttttttttggggggggggggggggtgggtgggttattttttcttcgtttttctggttgcgaccttctaaggttgtaatcgtgtaattttttttcctgctctatcaatataaactttacaatgtctggtttgagtcgttcaaaaaaaattgtagcgctccctgtagccaaatatttttgatatggagagaactaaattctattctcccaacgtaaataaattagcccagaagtagctagaactgctgtatggccaacaagataagttttagtagtaattagagcccaccgatgggcgatggtctgtatcgcagtgacttaaaaacgatactggagccactaaatttctgacagacaacatgtttgt

SEQ ID NO: 41877 - DNA, 551 bp, Oryza sativa
atcaatgaagaaactcggggatatgaaaaggatcagataaattctacaacatagaaagggttagtaatatatttaggaggtatacaaagaatttctccatatgtgtaccttgccagttacttgaggtttaatttgaacccgcaactagcttggttgattaaacgctagttcatcaataattgtctttctcttgacaaatagggcaatggagaacaagatggaagtagtgccaaggtatgtaaaatacaactatctatctgtttggacaaattttgtagtccttacaaagtacttgcatgtaccaaagagctatattaaaaattttgttaatttacctcgagataccttagaggtattaaattttacattgcacataccgatatctactcaagaagggtaaaatcattttactgtttacgtatatgtctatacttacaacattctgagaaaatctctcacgttaacgagaaagataagctggacgttaatgagcagaacaaattatcactgtatatagtgaaatttaattgaaaccctaaataagcacaact

SEQ ID NO: 41878 - DNA, 675 bp, Oryza sativa
tgaacaaaaactcctgttctgcctggacaaaaacaaaataaaagcccccggcgaggatcgaactcgcgacctttcgcttacgaagcgaacgcactaccactatgctacggaggccaacttgtttactaataaatactccctctgttttttaataaatgacgccattgattttttgtcatatgaccattcgtcttattcaaaaaatttacgtaattataatttattttgttatgagttgttttatcacttatagtactttaagtgtgatttatatcatatacatttgtataaaatttttgaataagacgaatgatcaaacatgtgagaaaaagtcaacggcgtcatctattaaaaaaggaggtagtattcaataattttattcttgtttgagctttcaacacgaaaacagcataattaacagcacgaatactagccggagcagcataaccataggacgcaaggcaactggacgtgaaatgcatgccgccatgccataagtaggggaaaccaggaaaatatatagcagaaaactgaaaacttatcattgtatcgaaaaatagatatttcagattgtagatttactcatgagtaaaaatttactagatcatgatgacgtggataaattttgaatatctaatttttttatccaatggtagtttttaagttttcattata

SEQ ID NO: 41879 - DNA, 616 bp, Oryza sativa
cccttgcgacggtacaaacacgaactccagctccagcagtgacagcaacaacaacatgctcaacttctgggcaccatccgtcagaaacagcactagtgccccgtcgaatgccactatttcaggggtacactactactactactactactactactactactactactactactttgtgttcgatcgtgatatatacactagctagctacctcatatcatacggatttttacctgcagctggatcgtacctagcggttcttctttctcggacagtacactagtaaaggcagtagtttgtctgaatttacatatatatgaacgatcgatctgtctcgtaaccaatttacatatcgatcgatcgggctgtgcttgcagaacggtacaacgacagcagcagctgcagtggcgaaaaaaccgcaaggagcggagaggctgcctccgggtattgttgtccgggactctgatcttcatctacaccgcctctggggccacccaacatcggtacatgctacagctatatatatgcattatgtctgtctatcttctcatcgatcacttggtgcacaggccgcttgtatctatactactttagaaggtagtagtactttagagctgg

SEQ ID NO: 41880 - DNA, 987 bp, Oryza sativa
atttttggtgtggtcaagattgctaactgctcaaaatcattagacagaaagtgatggtggatttttgccttccgctgttgcagattgacagcggaagctaactatactaacctagagggctccaaaataatgtgcatgcgcactctctttttcatttttgcttctagtgggaactccactactgacaaagctttagcttatgaagcacgaagttgtggtgggaatgcggaattaatttcagaaatgatattcaaggcactaatcggatcaaatggggggattttatgccgtagggtttaggcctccatctcggcatgcatggatatataggatgcatgctccactttgcgatacgatttggtcaaaaaggttgtactcctatcttggttggagctaaacctacctgtgtatgtcatcaaggtagaaagcaagtgtgctccaaatccaatctttctactatgtgtcgatgtccctaacctgattggctaaagttttcctttctttgtttttttgagatgtttgcctaagttatgtctacaatgttatctcatctgcccttccttttgaatcctttaaatctagttaggatcaaataaaagtgttaactaatgtgtgtaaaggttggcaaagaaaaggggagagagagagaaacattcttgtacttcttctgtacagttccttttggttaattcaattcaggtagagagagagagagagacgtggggttgtccatgtcatgtttctcgtacaaaatattacttaaagtaaggctgtaaaatacataggtttgtccttgaacttcgcttgaagtctgtttttcattctaaactacaaaaccggttgtgctttcactgtaacttttaaaattagacaaataacacctagtaacatagttcttttaaagtagtttgtttgaaatggacgtgtttttccttgttcatatactcttccttggtattcttataatgtagatgtcagttcataatt

SEQ ID NO: 41881 - DNA, 704 bp, Oryza sativa
gatcttggccccatttgttttcaataaagatgaagataaagttagcggatgaaaaaaagagttattagcatacgataattaagttttaattattataaacttaaaaaataaatttatttaatattttaaggcaactcctatataagtaagtttttttccatgaaacataccaaataacaatttaaaaagcgtactatatatcagtttagaatatgtatgttagccaggagtgaacgaggcccttatgtcgtttttcctagaagccccggctgtgcactctctttctagtatttctcttgcactaaacattgtattcttactaatcatccacaggcacaacctcttgagttcatgtgctttggaaacttgtaggaattcaaagtgtgtgatatcacatttctatgttcttccgttaaaaaaaaagcatttctatgttcttcctgatcatgtactagcgtatgatatttctgtttttatcgggcgctcgaataggagagtttttggattacattgcctactaggagtatttgccttgtcctaactaatcctcgtacgttacgttacatagtataggttcaagtcttgttgacgaacggaacggacgtacgtacggagttcacacaagctaagctaagctcggtcggaaggaattaatggcagcgaatccatccggcgagatcctcacgtaggagtattatacgtac

SEQ ID NO: 41882 - DNA, 731 bp, Oryza sativa
gataactgcgcgtatattgcatttactaggtgttaattttgaatatatcaatcaattaatggacctggcatatatatcttgtaagtattaattactgatcagttagttaatgaccttgtgaatagttgcattgacattggctttctcggtgtaacccaccgacatggtcagaaggtactgcttgccactcgccacgtcctgtacgtacattcatacaaacatgcatgtaagagatcgatcgatcgatacatagaagctagctacactgacatcgatatgtgatggaggcctgtgcatggcgcaagcagagatgaagatcagatcgatcatacggatgttgggtttccccagaggcggcggagatgaagatcagattcccggacgacgatgcccggaggcagcctctcctctgctgctttcttcctcgacacctgtactgcttctgcttctatcttgctcttctccttctgcaagcatcatcaatatatataattgcgcacgtttttgtattacttaaattggttattagtattaattagttcgacacagttacgttgtatatatatcactatatatatatagtagctagacgagatatatattataccggccctgaaatagtggcgtttgacgaaaagttggcagtggcgctgctacggacggaaaatggtgccgcccacaacgacatgtacttgttgagtatgttgatgttgctggccgggggtgcagga

SEQ ID NO: 41883 - DNA, 508 bp, Oryza sativa
cctgcgccccctcagagaagagattgtagatatttctaaacaagaaatcgagtctaatatggataattgtatctgttaattaggataagagccaggttaagtttgagtcgtgtctgatatggatgagttttgtattatgggtataaatatatgcctagggtcttgtaaggaggataacaatagttcaatatactctcgacgcatcgccacccttttcatttttggttgtctcgatgagttcttgtttcgagtcgagctgcattggcttcgatctttggcaagatataagacttgtctattatcatatatcttagctaatctaagtggatgactctatttacctatatcggtgttgacgaaaaatacgcactcggctgatggtgccagatctgtgttggcgcgaactaagtcgacgaacacaacggcctaggagatctgcttaattagctctagtgcaggtctaaaatactgataagatgcgggtgtgctagtcagtttgatcctacaa

SEQ ID NO: 41884 - DNA, 1116 bp, Oryza sativa
tcctgcacgccccccaaatacaagcacataaattatttataaagagaaaagttttagactgtaatgtatgatggtttataccttatatttcatctgaatgcgtcgaaggttgacctcgcattccatggcctcccgttttgtctcttccctctgcgaagaatgtattatttagttgcagaagtataatttggcatgttaatgctgatgaaccaccgtaaggccagttcattcatgaactaaccttaaccaaagcatccataagtgcctttgcctggtccaagttgcgccgtacctaatagaaattttcaaggtagcattgtgagaactagaataatgaaaaagcatatagtacttaaaatgtaagaattcaaaagccacagctaaccgattatcattcacaggataagacaaggaaatgatgtttcagaatttaagttatacacacaaaactagcacagcactcaagttgagagctatgtataaaatagaaacagaatgaagcaaaaagcccttaaagctaaaaataaagaaactgttgggactttttctctttttgagaggaaactgttggaatttgaaacaaagaaaagtggcaaatggcaattattccattcaataacatggatattaaattaagcagaacaaaccaatcatttcaaccaagataacagaagttctccccaaacaagacaactatagcaagaagagtttgcattaaagttaaaattatttacagaaagaccttcttgtgttcatttctctagagcaactacacagctaagttcctctttgtcaacaaacaatagcaaatcaagagtgcacaaaaaagaataaaggactagagttttactaattaacgtgcagatgaaacatgaaaaatattgaaaaacagatttctccatatcaaatcttggtaatcttgagacatgatttaacaaattaagagcttcaacagtgtaagcagacaaattggtttataatgcttctagtaaggtgtaaaaactgagtacattgcatagacctcctccacaataatatagtaggattagtgtttatcatacactggtacactgagaacctcatcaagcagaataatgaacaaaatatcttcaaaga

SEQ ID NO: 41885 - DNA, 5936 bp, Oryza sativa
tccccctcctcccttcccacgcagcaggcggccggctgggccgcgcacgggcccagtggcgagcggcggcaggcggcagccgctgccggtatttttttttacaatttgtgattcactaagatgtataattttgtgatttgttgcatgatctgagatatataatctgtgatgtatttggtttgtgtgtaattttttaaagatttgtgatgtatttgatttgtatgtataagtaacttaagatttatgatgggaatgttttgggatgttactttgatttgaggtttgatttggggatatgtatcctacttgatttggagatatgtatcccacttgatttgggagaaaatacaaggattaaactctagctaaaaaaataaaaaaaagagacctaatgggactgccgctactctctctttagtgccggttggtgttaccaaccgggactaaagataaccaacaccaaccgggactaaagatggatctttagtcccggttatttcaatcgggattaaagatgggtatctttagtcccggattcatagtcctggttaaaaaaccgggactaaagggggttaccaaccgggagtataaatgatttctttaccagtaagggacataccattgtcaccaaatgacaaacaaaaggctagttgctgctgcatgcaaataacttgtcattgactagagaaggaggaggccatggtttctttttagggaaaaaaaacatgtatcccgacattagactgtcgagtcaaagcgagaagccttgaaagcgaaaaagaaagaagagcaaagacaaatatttacaggggaaacagcacttagggctactcctcgctaaacaggaaaatgccggcagctctctagactgtgacttcctcctttatctctgcaacaaggagttcctcagttttctgcttatgatcaaagacccgtgcgttatgttccttccaaatacgccaacaggccaacataaaagaaagaatcaaacgaggccatggtttcaactccccccaatgcaagactatatccatcatctcagagtaaagcattccaatatcttgacaagccaatgcaagacaacttactttagttggtggcacccaaggtggcaaacgatgtactcaaccagtcagttcataagaggaaaatgaaaaaggaaggggggaaaaataatacaccttgatgtagggtttcgcagggatggcggtggcggcttcgttgctgctcgaatacgtcagccgctcgctgcggtggccgattcctcgcgctctcaaggagctcctcttgtcgccccactgccttaaagagagcccacggtggctctacagctcaagacggtgttgggacgaaatcccaacagaatatggtcagctctctcctaagccagtcgccagatttgatctgtgtaaattgattacccaaatttattgcatatcggatccaattagctgtgtgtttttcctaacattgggtatatgaataatgtcttttttttttcttaaaacttctcaactctgttgccatatatgcagagttgttctttttttcatttgggcgacactgggacatctaatagttttcttttattttggtggttcactcagacgaatttccttaaacatgtaaccagagatattactgcttattgagatctcaagcttaatcacgccaatagcaggggatcaaactatctttattccaggagttcataagagctcggatataatccatgttccattaatttataatacgaaggaaaatccatgttctatctttatcaaacggaagtttaattgcattataaaccaatgttccattattaaattataatacaaaagcatgttgcatgtgtttgcaggctttacagcttgaaagggcacaacgagatcctgcagagaagaataaaggggctgtttggtttacacgaacttattccaagtccctgtcacatcggatgtttggacactaatttggagtattaaacatacaataattataaaacccattccataagcttggactaattcgcgagacgaatcttttgagtctaattacgccatgattttgacaatgtgatgctacagtaaacttttgataattatggattaattaggcttaaaaaaatagggtgagaaagggtgagaaagcacctcgttttccacgcgcacgcttcccaaaatactaaacggtgtgttttttgtaaaaaaaatttataggaaagttgctttaaaaaatcatattaatctatttttaaaatttaaaatagttaatacttaattaatcatgcgctaatagctcacatcgttttacgtatctttccagtcttaccaatatccttctcctcgaactcaccctaaggctctagaagagcgcatgatttcacatatgggtaatttaaaccgcggattagataaactagaaggaaggatcgatggcctgagtgctgtcttagaaagggaggtgctacataaaaagtaattaaccaatcactttatttatttactgtatatatactagtattgcatatgtgttttcgttgcttgtttatcctaattatgttcattgtaactttcagatgcgatgaatggacactaagggtggtggtgggtctgactggtatatatggtgttgcttttcttgttaagaaatcatgaaatgcagagtcataagaagaaggaagatcttttcagaagcaagtcaacaagtgagataatggtcaaggggaaaatccttttaagcctttactttggcattttttttgctagtttagtgtttagtgtatatgttcttcacttcatcctggactagaatttaactttgctatctctgacttggggtgtttctttagtgtaaaaccattctgtaagattttggtgaagctccttttttattggcaaaattggttcttagcatccaaagttttcaattttggttttatagtaccaaagttcaccgtttactataatagcaccttatatcgtacctccgtttctatttatatgccttccgtcgcactcttctgttttccgttttctttaacagtgctggagatcatggctgagagaatggatcatctttccccttcttaattacaggattagttttgatctcctgacgaaatgagcgaacgtactcgttccgggtttgcatcgtctgcctttgacgcaaacggcaaattttgtccaagccgttcgtctcttaaccaacaactccatcgtttggtcccacgctgacactcccattctatggactactctgcacttaatactagccaattaattcagaattaggtcttgtttatttccctaaaactttttcttaaaaacatcacatcgaatctttagacaaatacatgaagcattaaatatggataaaaataaaaactaattgcacagttagggagaaaatcgcgagatgaatcttttgagcctaattagtccatgattagccataagtgctacagtaacctacatgtgataatgacagattaattaggctcaaaagattcgtctcgtggtctccaggtgggttatgaaattagttttttcatttgtatctcaaaaacccattccgtcatccggtcaaacatccgatgtgacacccaaaaaatttcttttcacaaacttagttgtttgctctataggaaagccaacaaaatgatctccgcaataaaacaaggtaaaatagagctcgcaccattggcaaatttgtgccaaataaaaagaatatagaactacatctaatatatttactcatctctcgttccataatacttaaccttctgaataaaattagagtcaaacaattaatctttgactatcaataatatttgaaacatttggtttgaagaaattagaacatgatgtataaaattagtctaaaaaatgatttaataaacttaaatatttactttttacgtatattataatataaacaatagtggggttagaaaaaatatttgagcccgggcaaaaatttcaccatcagtttattcaaaagtattaaaatttaatggtgttttcgccggcgatggcttcgcccctgaatattaaaatatactacctgtgtcccaaaatataagaactaacgatcagatgagacattctgtagtactacaaatctgaaaatgtctcatccgatcctaagttcttataatttgggatggaggaagtagttaaatatatattttgtaatatgtttcatagtacaaaatgttaagaactatatatagacatagtgatatgtagattttttttttaattgtacgataatttctcttttgtttacggtgaatataggacaaaatagctaagttgattatatccatgagtaggttgttaaagtgatttattagcacatcagattctattgattagtggctgttaattagactatgaggtgggcctaacatacaacggttgattgagtgatgaacggtttagatgttatcaacggcaaagtttgccgtttgcctgaaaggcagactatgcgaactcactcgtcctgtcgtccgttctcggtggcgacgagctcgacagttctcgccatccctgtcgccggacatccctatcgtacgcggtgacggtggcggctggccttgtcatgccgatctccttgccctcctcctcccctggacgtccccatcgccaccatcgctggcattatgcttggagaactgcatatgaaatgaaggtgccttctaatgaatttcatcgagtttttttttaagaaaaaggtcataagacctggcttctattgaaagtccgaaggttgtgctgggaaacccagacaccagattacagcatagggagggacgaggccttcaagatgaagaaaaaacagacttagactcaaactaccagctctaattaaaagaaacaccacgcccaaaaggaccaaaagggttgctcatacaagcagtttcagacacaaaacacaacctcgggggtcgacctagttcgcgattgatcgcgagaccttatgacccacgatcaggtccccccacatggtttctttttttggcaccacattacttctctattttagtaattttatacacctaaagtttgtacacctcaagtttacacatctaaaatttataaatcaaaagtttatatattgattcaaatttaaatttgaattcaaatattttttatatatagaatttctatacatctaaagtttatagactcaaagtttataagtcaaaagtttatataccctattcaaatttgattttgaattatatccgattcaaatttgaatttgaattcaaaattttttatatatagtatttctatacatctaaagtttatgcacctaaagtttataaacccaaagtttataagtcaaaagtttacatacccgattcaaatttgaatttgagtacaaatattttttatatatagtatttctatacatctaaagtttatagacccaaagtttataagtcaaaagtttacatacctgattcaaatttgaatttgaattcaaatattagtttatagacctaaagtttataagtcaaaagcttacatacccgtttcaaatttaaatttaaatttaaatattttttatatagtatttttatacataaataaaggtctaaacaatcgctaacatcagctgtgtaaaaatcttgagcaataaagcaactaagtattctccgcactcaatgggccgaaaaatggatttgcactgatcgcgtgatgctcccgcacgcgagcgatcgctgattagccatttcgcaacctcagcagacaggaagaactgaagcatctaagacaccccctcaactaagctatcaccctatgcccagcctattacttccagtgttggcagcagcgaccttcatcttctctcccaactccatcatcctgttagcttcttcagcacgccctaaagccttccactgcagcaaataggaagcaatc

SEQ ID NO: 41886 - DNA, 2139 bp, Oryza sativa
agatgggcttaaaactcttagggacgaattaaaggtagttctaactatttctctgttgcgatctctaatggtgggttattatttggcaaaataatagtttgttaaataataatctacagtctggcacttttatcttcaatgttaaaagtgcggggcgtcacagctgcggcaaccacactgtggtgcagcggctgcaccttacagccgaacaggcctagtatgttttttattctctgaacttaaatttggactttgtgagctagggccattctagtcttgcatttgcaatccataccacctcaaatttgtctcgctaatttagtttgaaatgtgtctcatttgtaaacggtactacgtaaatatggtattgcttagatgttttttttctcaataaacaaaatataaagatcgacgaatatgggtggtttctaaacttatccggttgtgtcacccaagtgaaaaaaaaaactacttgatatagcacattttgggtggtatggaagttaacaataataattgaatggaactaaactagcatataaaaaacccaagaatctcctatataaaatcctaaaaacaaaaatgtcaagatattataatacaagtgttacacgttgttgaatacaccaaggtctccttttgaacccctgaaatttacaaggttttcacattgactaatttaatcggtaaaattatgtcaacttggggctgaatctggaccgaattagcatgggccgatcagcccgaagcaaatcatgaatttttataccggacagacttgatcttgtactggaaatagatccctttcttttatgtctctcaaccataggtcaagttgcaatcacatcccttggccacaaaaccatgtataactcgtctctcagacttccaaaatcgatgcaaattcgaaacagttttaattgatgtgatgcctatgtagcatgttatcctggtcttttaggtgatgtggtacgacagcattgaacggggagcaaacaccgagatagcgagacaagagaaatttaactatttgccacataggaatgtcacctcttacaaactctttttttttaagaatttgccattttcgatgaagtgacgtgccaactcatactactagcatgcataggacatacaaaatgtccattttaccccttatgggaccaagtcagcccatcccctccctccatctctcttcatctcctgctagccaggcaaatcgagaggcttgacgtcggcacccactatctcctccgcctcaacgtcctaggtacttactagtaattcaaacgatgtaacctaatggcgatcgatgtgcttgatggtcaatttattatgctgcttagagtaattttcttgttttatattgaagagttcaaggaggaggatttccaattccaggtgggattgttgtcctctaccattgaagtttttttttatttgtaggcaactgcattgacatcctctaccttcgttattatgaccttttaattgttgtatactccctccgtactcgtaaagtaagtcattttggacagtgacacggtctccaaaacacaactttgacttcttgtttctataaaaatatttattgaaaagtaatatatgtatacttttatgaaagtatttttcaagacaaatctattcatataatttttatattttcaaactctacaacttgagagttattcatgatttatattcccaaggtttgacttaaatattgtcctaaacgacttcctttacgagtacggagggagtatattgttatttgcatgtagacccttttgccccacacggtcattttttttattagaaaaattagacagttggtgagagtggttgacattctattagaaaaagtttggagttggtgatggggtgatgatagaactgccaccactactactcaattttgtaagaaagtttggaatatgatgtcaaatattgggagacaactataaatcagacgctcaatatacagctaaaacttatgcaccgtcatagatgtcttatccccactatcctttgctattgtattgattagcctccctccccctttctctccatgcccggatgactaagatctgcgtggtacaccactaatctcttaatctttttcaaaaagtatttaaccaa

SEQ ID NO: 41887 - DNA, 1425 bp, Oryza sativa
acttagacacctgagcgccaaatagcatggcgctgaatatacattggcacgctgacttagtctaccatccgccatggcacggcattcagtggcaactgacgtggcgctgaggtgtctaagttcagcgccatatgatttggcgttgagcaaaaaggtcatttttaaaataagttttggcagcggttcatttataaaaatagtttttgcaaagggtaaaattgtcaaaattaatgcatggtgcaagctagctacttcaagctccacacacctatatgtaatttagttctagtatagccgtatagctagctaaactaaggttctacacggctgactttgatcctacaactcggctaaactgctactttctccgtttcataatgtaagtcattttagtatttcctacatatatattgatgttaatgaatctatatagatatatatgtctagattctttaacatcaatataaatgtgggaaatgctaaaatgacttacattgtgaaacggagggagggagtattctttaatcatgattacgtgtctagattctttaacatcaatataaatgtgggaaatgttagaatgacttacattgtgaaacggaggagtattctttaatcatgattacgtttcctaaaccggtaaataatatattttctaaatacattttccataaaagtttttattaaaaaacaaataaactcattttacttgataaacaacgtgttaatagcccatatcgtgttacgcaccgcgttaaatataatcttaggcaagatgccgtttccaatgcagcccctgtctattaaaacacagggttacccatgttatgggcaccatctcagccaatctcccactcaatatattccccctcccatcctgtgctgtcttgactcttctccttcgtagttctaccaaatggcttccggcgccgccgtcaccgccgccgccgccatgtgcaccgtgctggtgatcctctcaaccggcggccagccaccggcggcggcggcgcagaccgattactgcgccaccgcttgctcctcgagttctaatggaacggtgacgtgctacaacaacgctatcaacacatgcagctcaaactgcagcatcacacctcagtattgcgaccagtgccgcagagagtccaaccagcagtgccagaactactgctacaatggctgcttgtacggctgcagcttgcagcacccgtaaattcaacgcatcccttatttctttttattcactgtaagaaataagaaagggcaccccccgtctgctcttgtgcatctgtctattttgtgtactcgccgtatgataaaaaatatataatgttagaccttttccattttgatacaggtgtgactttgactataacttagccacaataatttaaacaatatataataagtgcaggagatttaaaaaaa

SEQ ID NO: 41888 - DNA, 2723 bp, Oryza sativa
gttagaagcgttggccttggttggtctggccaatctaggcaaaccatctgtgcctgacggcgttgttctgggtatgataggtgggcccatatggtagtgcactgtggatttgctcaatttcagtcggttttgactaacatgtgggccctccaatccatatgctcgcgtataatttgtcggaggtacacttcgtcgtatggcgggtgtattttcatccaaaattacttgcatacaaatatttaccaatagttatggaaatggttagtaataatctcctaccactatgtttcatactttattttgtattctttatgtaggaattgatggttaaagttaatgactgtcaacagtggcataagttcgaagtttagtgatcctaagtatcagatgtgtgaggattactgggatgaattcgccagctacagaatatctaaggaggcaagaaaaatgagtgaacaaaacaaggccagctctgcaatgaacaagtatcctcactgacttgagccaagcgaatatgctaagaatatacccaaatggaatgagatggagaaaaagctatattgagcaggtgcaacacctgagacagagcggtggggaacccggacaaaacactatgtgtactctaggaacacagaactatcacctttggggagttgatcgccgcatgatctcatcggcaagagctaaaacagagattgttgagacccattcgtagtcatcaaagggtacttttgtgcctgaaagagatagatgagctcacattggcattgaggaacccccaacaccctggacgcatgaaagatgtaggtctcattccttcgaggtgtaggtacaacaagtataacataggagggagaagatcacagatacttcatgcaattcatctcaaagatcgatcaagatgaaacaaaatttagggagacaaggatttcttttctgatgttcgaataacagggatcctccactccgtcgatgtgctctagagaactagatctcgattaaccccttgcctcatcaagcaaagatccacgaagaagtctttggcctccgagcaggaaccagtgaaacttgctctaccaagacaacctccgagcagccagctcggaatgtcctccaagtctgaaggcgaactctactctcatacacctacccaggtcaaagtacagcttgagcaagctcgagggtgacacttaactgtctaggagatcaccctccaagagtaataaacaccaaacagtagcctaacgacaatccctaagtgcttaggtcctcctagctcgctcaccagcatcaaacctcacgaccacccaagaaacacactcaaatcactatgggagcttaagaattagatggcagaggtcaagaaactctaggagaagctagcagatagagacgcaaaatcggaattgtcaaaggagcacagggggggggggggaggtaggaatatatacccactccatgatgtcatgtagccgttactcacatctttgaactagaaagatgtctggaagttccggacagaaatgtcaggaacttattctgaccaacatttagggacatgcagaaaaacaggggcctagaatttccggcccagaacacctagatgtttcgacccacacattatgagaaaacccaaacttgtgcaagtgttatgcaaatgtgtctcttatctagacaccttgagcacatgaatagacggatgcaaccgtttggtatcccctgatagtatggcttttaatagactgaaaagtaaaaaagaaatttaaataagctccgagtccttgcgccgatttgcatcatgtttgtacaggtctccaagcacacttaggctgcttttgttattttgtgttcccaacaaagctgctgcccacggaaaacagaacaatctattatagcgtgattaattaagtattagctattttttcaaaaatagatcaatatgattttttaagcaactttttgtaaaaaacgcaccgtttagcagtttgaaaagcgtgtacgcggaaaacgaaagggggagttgggaacacagccttacatatttttacatagtttttaaaatgttagttgatgtgtctgtttgtgtgatataggatatattcttccgaatagtcccacaaaatgaactacgacacaggtgatgcatggacggctttacattcttattattacctttacatagtttcatacaacatatacatatatagaggcatccatgcatgcatccatccagttgtccggcatgcatttgcttatttatatgccatctcacaaacccacaacacacacactcataacacacaacgcatttgtttaactatatatatatcggccgtccacaagcacacacacactgcacaaacaaacacagatatatatatattcttgggttaatttcttcatctcatgtgggagcacgagttgaagcagtagttgaagcagaggccggtgcactgctggtagacgctgtactggcactgactgcaagcctgtggccctgcgaggctgcaggccttgccgcacgccgagatgggcgccggcctgcacgacgaggcgcagctctgattgcagattgagtggcaatcccgctgctgcgcctccacgggtgggatactgacgagcacgacggcggcgcaaacggcggcgacaacgactaaaacgacggtgcggatggaggccattttgtgtcagcttatgagctagagaggggaagaagaggcagg

SEQ ID NO: 41889 - DNA, 1113 bp, Oryza sativa
gaattcatgatcaagggtctattttccatgctcaaagactggactatttattattcctcgaagggttatcaaccgaatacttgcgccagtcgagattcaattattatatatattttggagtatctcataagggataatcactcagatcaaaagctattcatatgagccacacttggtctatatcacccggaagatttattactcgggagcatgttacatgcgtcatcctttaaagggtgtcgaaggcatattttttggcccaggcctaatatgtctgcagcccatattttcaggtgtggcctgtcacgttcttttagggacttaggcactttttgcttacgccaaagtgcgcgtgatcaagtgcccaataccttaaaatccttttataccgcagttactcagctttttaggagttggtacaatgcatcttaaaaggtgttaaacagtaaagctttatatagctgccccgctgacttttttatatatagtcagggcactgtttgggtttatcaagcaattgattggatacaatatcattgctttttgccacgtaagtgtgcatttttattgaccaatattatggcttaggctgattatatatcttggtcattttccaagtggttggtaaatcctttatgagtttatttactcggatttcacaccacatatgccgtatatttccgggtgtggtgaaaccatgtgtcttttagggacttaagcacatctgttaaagcagtgtgcgcatggcgtatgcccaatactttggaaatttctttattcacaacatacaagcttctctatagctgttttgctatgtgaatttttaatgatgtagccaactttaggttacactcatcatattttacaaagtagtcggtatatcactcggatcatgttattcagggattcacaccgcatatgctacatattaatatcaagtcgcttagttgactataattatcgaaaccactcggttggttggattatttattccttgactatatgcttggtttgttcaattaaccacatagtcgagggctacacctattaggtgcatctagtcgatgcacctgactttatttttcagccctccacagtcttcagatttggtaa

SEQ ID NO: 41890 - DNA, 897 bp, Oryza sativa
tagctagctgactgcatgcctggctcgcggtatcgtgcgatgaccgtttttgcatgcagaatctgtaccttaaataagtatagtattaactaaatcaaatttagattacaaatatgttaaaagaatattatgcccttccttaaggaacagaagaaagtatttattcaattaccaaaaatgaggaaaaaatacaataatattggaaaagtatacgtaccgtcgactactctaaaactacactattttagcaatgaaattttaaagtaaagctgcaattttttaggtagggaattctagtgttgaaagttcaggttatatttttcttccgtttcgggagctaggatgctcggctaacatttggaaacgtggggttaaggttaccatccaaattaaggttttccaagaaggttaactattagtagcatcgacgtcaaattaatcaaccgggtcaaatccttggcgtacgtcttattcgagctttttttttatttagtgtgtactataagccaaattaaagagacatgtgcatgactcaattaattaagcaaccaaaaataacttttagctagggaaaaaaaaccatgccacgttgaaccaaccaggtgcaaaacggtatagattatcacccagcttaaaattgaaaagctgtattaatcaagcaccatatagaaacataatgttgatactcgtgattcgcccatgatactcaatgatactcctacatttttatatgatatcgatgatggatagaaatagcttacatgcatgatatcttgaggtctaattgtagtaccttagagatactcgaattaaatttaaaaatatactgttcattcaattttttttgaaatattcgggatgtaaattttttttaagaaatatattgtcaatctcgcg

SEQ ID NO: 41891 - DNA, 791 bp, Oryza sativa
ctcgacaaccgatgcgatgttcccaaacatcgcatcccctgcggttggcaccgcttcacattgtataaatgtactgttgatcaatgagaaaatcatccattcgctctattgtgttcaattctctctctcgctcaatctctctcgctccaatcaattcatccactttcaacacgttagtcgtgccttatattttagcatgaagagagtatgtcatattaataagtttaagagataatatttaaaaactgtaatagtaacatgtgggctggcagattcactgccaacatcattagagtccttttaaggaagtataaatcaatgatacattaaagaatcatatactacctcagtctcaaaatggattttgacaatatatcgataaaatcctttaaagtcagagatatcattgtagtatccttgactttcggaatgcaattctaaagatagcataaataagtgatagagaattttttttttgtttgcaagggacaaaagagttcattgatcagaagataaatccttccccataggatgtgagatgaggttataagagttaccacatcaaaattctgagcttgcttcacaatgagcataatttgcaggctcgtagagagttgcaaacatgacaaactttttttttccttagaaagcgtggcacgccatatatatttttcgtggccgaaatttagcgttaatttacatgaattgttgagttgtattttccatatctgaatgatcgtatagctgctaaacgtaataaatcttcctttttttcccggggctgcaggaat

SEQ ID NO: 41892 - DNA, 602 bp, Oryza sativa
acccatacctgctttcgacccctagtgtgcaccgaacggagaggtactcatcatcatttcgttgcttctaataaataaacatgtcacaaaacttgcaatgcttgaacacctattgcatgaaattgaatgttagggctttgtttcacaatattggccttaattttattggttgatgcattgaaatgtgaatctgttcatgttattaagagttaatgataatcatcactaacatcaaggccattaattgggcccaatttgagaaagaagccttacaagataaggtgttaaaagccacggatggaatggttagttgatacaagtctcattagagattactttatactaatttcagcttagtataagaaatgagattactttccacggatggaatggttagttgatacaagtctcattagagattactttctagtgatttcagcttgggataagaaatgagattactttctagtgatttcagcttcatataagaaacaaggacttagaggaatgtagtggaagaatagccttgtggatcagcttagtgctttaaagcaattaatataatctgatgatttttttcatcgtttctgtttaggatatgc

SEQ ID NO: 41893 - DNA, 526 bp, Oryza sativa
aaaaatctgtatcttaattagaaaagaacacgaattattttgaagccaggataatgaacttaaccaaactaccgatacgaacatttcaggacaaagcatccaaaaggcaaaaatatagcccaatatctgcattgatactgcagggttattagatgttatttcattaaacgaactaacaggttttagtttactatgtttgttggttagcttctcagatacaattgtgcggtcccatttggacaatgggattgggaaaaaaattcccacccactaaaggataacttttaatcctagcaactcattctgcctacctcatttcatcctcatccttcactttccctatcccaatcccacccctctcaaccaatcatccaaacaaggcctgggtggttagttcttgtttcttgacatgcaaacaaacatatcatactttgatttcaacaattggcaggatattactgtaatattaaaattaccaatcttgtgtatatgttagacctcagaatatgcggttggctttcatcaa

SEQ ID NO: 41894 - DNA, 647 bp, Oryza sativa
acttagcttccatgaatatacatgtgcacgcatatgcatctaaataatgtcatctatatatatacggatctttaaaggagttttcttcacatgatcagtgttaactttcagtttccaccactactaaaataaacatatctacagtttggcactatcggtgttggaaatactaaaccggtacctataatgcttttcccgctccaaacgcgcatccatgggacaccatcggcctgaactggcaccttgctgaagacacatgtgccggttcgacaagtatcagttttttaaaagaatcgacacctataatatattataggtcctagtttattatcatccgagatgtgccaggaagatctagcatcaagttttggaatgacggacaatggtgaagtcagatctaagtatgaggggaccaacttaatttacaagtaattacactaagaaaaaatattataaaatgttacgaaaatagatgcacaacggaaacacaaattttacgtggaaaacccttgcggaaaaaaactacggacgccgaccggcaacgatcaatgtagaggagtttgatacaacgtgggggatacattgggctgtacactctcgccgtgtggcttacagggacacaagggtggatctgaatgggggccttg

SEQ ID NO: 41895 - DNA, 662 bp, Oryza sativa
  unsure (1)..(662): unsure at all n locations
gggcggccgaatccanaactagtggatccccccttgcaatagacaggctatattttcatacgtctgattccaggcatgtcacggaatcatattaaagatgggacttcaggctgaaacagtgaaatgattgacacgcagaaccaaacaccttacttcaacaggtatatgccagcattaaaaatataagaaactctaagagagtaaataaaacaagatcataaaccatcacattctaaggtgagcagagatacagatgagatcaaaacagtagggaagttaacatccataccataacatgtaactaaccaccagtgactactattctgtcgaagttatgacaggagttcctaaaatagttcatcaagattactgcactagcttccaaagaaatggttgggtattcgaataggtacgtatccagcacaattcaagaaaacagtgccaaattgttcagatacactaggtgacataataagtgcacatcaggtgacggaacaatatcatgcatttaatgttcagaaacgcccttcaagcaaattgttcgaactttacacaaatggtcacacaactataatggtggtgcttctaaagagcattgacaaattaccccaaaaaaattcaaaataagaggatttcaaccaatccaacagaagaatacaatc

SEQ ID NO: 41896 - DNA, 980 bp, Oryza sativa
cgaaagatggtttctccaccagtggcatatgctacttccaattttccaaatacatgcatatttcaggaaaggacccatgcaacattttttgtcacggcacagcatgcatgcatgtatcagccaagcctaaggatagtcctaatacaaaggtagcatatacttctctataaaaatgatagtatatactaatacaaagtagtatatactttacttctctacgtaaaaaagtagtagaaaagaagtatgtggcagcatatacttctctaggtaaaaaaaaaacaagtactccgtccgtttcaaaatgtttgacatcgttgaatttttagtacgtgtttgaccattcgtcttattcaaaaattttaagtaattatttattcttttcatatctatatttgattcattgttaaatatactttcatgtacatatatagttttacatatttcacaaattattttaataagacgaacggtcaaacatgtgctaaaaagtcaatggtatcaaatattttgaaacggagggagtatgtggctgtggcagcatggcatatgtgcgtatctagctaattaaaagaagcagcacgatcctcttaaaaaggcagtatatgcttataatcctcgagattaactattaatattaatcatgaatatactagttggaaagaaaagaagtatgtactaacatactacttttaaaaagtacatacttatactacaatacaaaacaagtatatatacttctacaacaagtagctaagtatatatttttaatgagaaaaaaaggtatatacttccaacgagcttccattaaatttacgtacgcaccggccggtgcatgcagatatttgaaaaaaaatagaaatggtgttttcttttttttatctaattattcattatgaactaatggatatccattaagaagagggagtacatacacctgggagtacaaaagagagatcatatatatatatatatatatatat

SEQ ID NO: 41897 - DNA, 4520 bp, Oryza sativa
aaggtagattccatctccctgatgcagtggtcgtcgcccgcaaccgtcgcttctcaatgatcggagcggccggatctgaccctatgtgtcagccgacgacgtggagagtggaggggacctggtgtcgtctcttgtcaaccccgtgcagcggcgactgactgcaatcacggcgatcggcgcaagcagcaccttccaaaccaccatgatgtggattgagaggtggccgccgaagctggtggaagctcgaccgatggcatgggcagcgacatggaccacgagcggctccgttaccttccactcccggcaactacgagctcgaccgtgggaggcactctcggcggcgtgagggatctcgcacaagttgtcggttttgaggcgctgcagctgcaggagcgagccgctgcctgcgcaagtcatcggcatcacatatattttgttttttttccattgtttcttttttttgtctttattatttttgacaacgcagaggagaacggatgcctcgacgccgacggctccatcgtggtcaatccacatcgacggtggcctggaaggtgctgcttgccggtcgccgcacgcccccgggctgtccaatcagaccgatcgagagtggatgcaaaatgctctaggctgtagatcagcaaatataaccggcgacagatgcgtgctgctctttgccaatgccgatgagagctgccgatggccaatgttttctttttgtgtattctgtattttctttccaccaggaccgtgtgattattttatacatgtgattcactgtatgactggatgcaacagatgtattatttatatattatatatatatacccacaatctacaccctatatgtagcttgcacaaatcttagggcaagtatattaggtgctaacaaaatgtaccatgcatgatgtttacgttatactatattttttacaagtgtaaattaccttgtttatgtaatttttgtatttcttttatgcaaaacttgtatatgtagtttaccttgtttatataaattatcttgtttatgtagtttttgatggtaggatatatatcattttggaagtatcatttttgcaagatgacaatttggtgactaaatagcatgttataaacaaaataagggttagagaaatacaatgcactagttatataaatgtcatatatgattgttattggaaaaaaattatttggtaaaaaaggcaacatacatgttatacatattgtgaaccaacctaatcctaatcttttctctctatagtaagcattcatttggttaaggttaggtacattttgcagcatgaatcttggaacacatcaacggtgtaaattgtaggtacatgtgaaccccgagtgcaaatatacattttcatatatatagcaaaagtgcccgtgcgttgcaccaggtgtacagtgataaaaagtgttgtttggtttagtcaactaatctgctaaaaaaatgtttgttctatatttgtggaatatatatgatgtttagttgggatgatttgtagcatgggagaaaatggatgaacgaacaatgcgattttctttgtccaaaaggcgacggatgaaaatttgtatcacaaatggaaatatttattttttatgtaggtaagtctaataaaatatgagtggaatttttgtactaaatgtactttgagttgcgagaatatatactttttagaaacacgagcattgagattgacgaagttaccacaaacgccttgagcaaccgtcttaaatcaaagatttgaatctaggttgattggttcctccacaagaaacctatccagttaaattatacacactttgcaattgtgggaatatacctgtgtattgttacctgaataaaatgtgttgagtttaacaaatcgtaaaaattaatcttattatttttgtgagagtaagtattgttttttatttacaaattgtatttgaggtcaaatattaataagtagatataaaaaaaatgaaagaagattatacagggagggaaaaaaaataaaaaaagagcggatagggacaaagaaaaaaaaagagcagagggaacaggtcaagatatttttaattgtttaaacatttttaataatgagatgcccgtgcattgcagcggataaactaaaaatataataaatacaaaaatattatatgattaggatttagattttatgatatgagccccattagaccttagaaatagaaaaagttgtaagaaaaagtcccattagaccttatcggcctgctattgtgcgcccaacccatgaaatacgcgtggtgctacggcccgatatggacgctggctcgatttgagccatttgttttgatggacggctcggatcgattctaaatccatcaaaaccctagcccgaatcacaccttcccccgaccacaagctcctccttttgctcggctcctccccgaccggtggcacctcgtcccatcccctcccctctcccgaccagcggcaccactcctcctctgccgccccctctctgccactccctctcctcctcctcctcctccccctcccctcccctcttagcggcgtctctcagtgcggcggcttcccgcgggtagatccggtggcaccaatggcgccggtggcttcccacggtgaatccgatggcgacgacggtagcagttcccacggtggatccggcgaccccgacagctacacgcgtggtggcggcttcctgcgccggatccgacgactacgacggtggcggcggcttccggtgatgtcttattttttttcctctttcacttgattgtcttattggattttgcatctatgtttgtgatgaatttttgctgaatcactcgtgcatttggttgttgatctagactctagatgattttatttttgtcttggactctcatctcagacgttccggacgagggattttttttggaggggacggatgaaaaagtagcgtgttgacggacgaggtgacgatcggaaagttacgaatcttttagttagttaagaggtgttagtttttttaaaaagaccaactcttgtaaaatattataggtgtagggtaatataaaaccgacacctataacacccttttttttaaaaaaaaggcacctgcaaaagccaagcagagtcttatccatccatccacagcggagataaggctgagcagagccgagccagtggggccatcgaggagataaggccgagatctcgcattattttttctcggtctctcgttttcctctcctctctctcggtcttctctctcgctttcctctctcttagagccgaggcggcaggcggcggcgcaagaggggaggcggtgggcgctgggtggtggcggcgggtggagacggtgcggccagcggcaggaggcggcatcggtggcgatggccgcgccctcccctcctcgtcagcggcgagtggcggcatcggcggcgtgcagcgggaggagcggcggctgctcggaggcgccctccctccgccagatccggcgggaggaagggctccggagccgcgccgccttaccatcctccatgccaccacccaatgcgccggttaccttgacacccgacatgcctcctcctgcctttgttgttggatttatgataatacatgggtttcttgtgggggtcaaattcatgaggtcgaaagattaaatttggtattttcttgttgtttttggttgtctagttgattgattgatttggggatctagcttggggatgttttttgaagacagactcggactcaaatgaacgaacctaaattttgggagggacggatcgcacagtcgtatggatgaaaattaggtgatgaaaggaaaataggtgacgaaaggaaaattatgaataattagttaagataatggatttattttatatacggacgacggaaacttttttaattttttaagtagttagagattagagataaagattagatcttttccttttgtgattaggaatttatattgtttatttattttttagaaataaaaagaaaaaaagaaatagggaggggagctctttttttttgggagtacctatacagctggcgccacattttggcccaaaaatgtggcgattcctggaccacacaaactactgaggccacaaacaaaacgggcgtgcaaaaaatcaaaccatacccgttacagcaaaaaaaacccataaaacaagcgccacatttaggcctaaaaatgtggcgaatcctggacaacaaaaatcactccggccttcaaccaaaacgggcatgcaaaataacatcacaacaaacccatttaaaaaagcccacaatggcaagcatacaaaaaagcccatatgggctaaaactaaaacaagatgagcccacaactagaaataacaaaaaaaaaaaagcccatgagtgacagccagaaaaaaaaagggttcatcttcagctacaaagaaaggaaaaagacatgctaagtgaaaagcaacgccaattaagcactttagaaaagatcagagcaaaccacgtgacaagtgctcatctagctcgttctctccccccaacc

SEQ ID NO: 41898 - DNA, 847 bp, Oryza sativa
aaaagaaaatacattcaccagtaactaaaattacatttttaatttcaacatattaacaatgtaagaagtgaacaaattgctacaatgatgcaaacatcttcactgtaaattaaattcgattcatataaaaatatatatagaagttgaaaccaaaattacacagtaaagtactaacctagcgaaaaataaacttaaaaaggagaaaattacattggccatagatgaaaattacatttgtaatttcaatattaaatcaatgtaagttcaggaaaaatagtgtaaatctacaccaaacttgaatacaattataaaactacttcattccagagaaattatacttcaacaaaatttcaactaacaaatctacaccaaacttgaatacaattataaaactacttcattgcagagaaatcatacttcaacttcaaattaaattataaaactacttcattccagacaaagcacattgacacagcataacccgttgatgagacatagcaaattaaattttacctagaaataggacaacacaagatttacagtcaaatataataaaaattacatatgtaactaggatgtaagtagggtataactaggatgtaactagtgtgtaagtagggtgtaactaggatgtaactagtttgtaagtcgggtgtaagtatgataaaaaaatcatttacctattactaaaattacatttgtagtttcaatgtataactaatgtaagagaacaaactgcaagagcactgctctctatgttattttgggtgtagctatatttatggcgccatattttttacccaaaaaaaactcggcaggtatttacattgtaaattcctaaattaca

SEQ ID NO: 41899 - DNA, 620 bp, Oryza sativa
  unsure (1)..(620): unsure at all n locations
ctttagagacaaaatttgctacaggacactcaaaaaacgtataattagttgtaggacactgcaaagacgtgatttggctctaggacactccaaaaaaacatgtaatatgatggaggacactgaaaccattattttattttttttcgaacaaaaaagagagagaaacaataagaaaagaccatattgcccttcggctctctcggcttggctctaggcgtgtaatgaggctacatgtggcttactctgattggctcctcatcgactcgatcccctttactcatctgtcgtcgtgccaccgcttttatcttctcaaatatgtctaaccagcagcgaatgtctccatgacgatgacctcgcatcaggtgattcccccgtggccacgagtgagcgaccttccatgcggctgctgctcctgaagggaacaaaatgaattcatggagatggacgcaacagtgaaccaaatgctgcccagcgcacgagcgcgccgattgcaccctgtgattccaacacaaacattaggtgagatgcatccttccagatcgtgaaaccgcaaggcaacacgcgggctcgagtgcaggggaatgcctcnagtgtgagtgaggaggaagactgggggcact

SEQ ID NO: 41900 - DNA, 762 bp, Oryza sativa
ttgtactggaggatgtcatttagtaaaatcacctaatctggttgcatacgaaacatgctcctgcattgaggtccatttcctaatgtttgcatcatccattgttgccccgtcagtagtggcacacgacttggtgccctttgcggtcatacaagttgagctgcaaggaatccttcaatgtattattcaatatcatcttcggatatctcgcccatcgtaccttaggaatcgtcatcgctgctactattgctcatcccttcttatctgcacaaacatggcaaattcatagccacacataaataatccatttggaattgaagagggaacacatatataaaaaaggcaacgacggtccaaacagcatgacttagtaaatataaaatgcgattaacaacttgactcatcacatagaaaattgttacaacatgaaaaccattgcacaacgttcaggaatttacgaactacacaaatcgaacttaacgagaacaaatacgcattgtttatgaaataacaacagggttcacgaggagggaagaaagtaaacaatacgatacaatattaattgccttagcaaacagttctcatcctcttcggtcaaaatcctcaaggtccccctgcaccatcaacaccatctcctcgccctcctcccgtggacatcttcgtcgcctccattgcttgtcgttgtctctgttctaaccctgtggaatcggtcttctcagccatagagtgggcctgtccatgccgccggcaccgatgtgcatcgca

SEQ ID NO: 41901 - DNA, 898 bp, Oryza sativa
agcccttagataataataaaaaataaaattgatacaaacaaaagaaattgggtgaaagtttaaaagaaggtcgtaaactaatattaccttgagcacttagactagcactagcttgtccacagccaaaagtgctctaataaaaaatatgaacaatataacacataaacaaaataacaaaaaatagtctgctaaaaaatatttagcagttaattgctggaatcattaacattgccattaaaagtaaaaaaaacaaatatataattaaagggtactacaaagcatgtatacatatatataaggggacacttacaggagcaaaatcttcagttgacaatgggtggtttccaacagaatgttcagcatctgctcatgaataaatcataaagttgatattatgttacaacaataataaaaagaatgaatgaatcttaagtcacaaaaattaaaagtacaaaatccatacaacaatgctaaccaaaaaaggaacaaataacttacaagatttactgtgaggagttcgcttttcattaaattgaaatgagtgattgttaaatccaacatgttgcttatcagtttgaaatgaagcattggctgtagctgtgtgtgcaatattatgactgtcaagttgaactgtttcagatgaactagagtcatgcaacatctgtaaaatgctgagaataacatcttcacatgacagactatcagagacatgatttatagaacagtgactggtaagcttatcgcaaaatctttcaaactatcagacaaaaaattcccaatagctgaatcaagtttgtgatggaatgaaagcatttgttcctgtagtaggacagactgaaaaaagaagtggttaatatataagcagaaaagagatgagctgcactatatgaaaaataaa

SEQ ID NO: 41902 - DNA, 4448 bp, Oryza sativa
tcacccgcccactagcaacccccctcaccacgtcacttttgttccatagaagacaagagatcaagttttacacgttttggattcggattcgggcctcctgacagcatcaaatttaaatggacctagccgctgatcttgaaggaatttgggggcctatgagtacttgttggaaagcttatggagtctactttcagatggttttgttcccacttcagaagtcctaccgagctgccgggaatctgcaaaacaagccacgtatctcatccagtccgaatctgatttgggttttggaccttataattgtgtcgtgggcttagcccaaaggggtgtgcgccctagggcaaccctagggcgtccctaatcatatttactagataataccccgcacgttgctgcgggactcaatgattattgtaagtgcaatgcggaaaatacaaaaggtattttgcccacatataatgcaagtgcaattatctaatgtgttcacataatattgtagcattgctaaaaaaatatgattgaatatgcattgtttttggttgaaattgcttgttgtccaaatttcaaatgaaagaaaggaaaggctacataatgaaaaggtttattattgttattgccagtcagcaatattgtccaaattacatgcttcgctttaaataaacagatgctgaaataaaattaacaaattattctcgaaagtaacaaactcatcacatctcgtgccttgattacttatcgttgcagtggaacaacttaaagaattacagttcaatctagtttctgttagtgttaagaatgtgatagtgaagtaactctcttgcattagttgagtagaaaatcatgttcccagagtgaacctttcaaatgcaaaactttatgatcataccaaattttaaatcagtgatcttgcacaccaatatgtagttagcactttttcaggctgaatgaagttactatgttaacaaacaaccttacctgaatgtcttgatgcagaccaaatgaccaataggctgaaactcatcgaatagtttcactgcgcagcagaaattgtgtgatttcgtaggaacataataaatactccacgaactacgaaccaaagtgaacttacacgttgaactcctgtaattgcttaacccaaatacctgcaagtgaaacaaaaaaaaaaattcagacctatactgttgtttccaaataggtgatgtgtatggaagatgaatgattaaaactccatacaatgtgcactacctttgccgttacatcctgcttaagttccttggcgattaatacaccagctgttacaggatagcaggagcctattggaccatactggagaaaggaagccaatgtggctgttgagctcggtaattatgggctggttgaatagttgatcgatcatgagtgtatgagatcagtgtctaagatcgatgtgtggctgaatcgaacggctgaaactgatagatgtgacgtggctcactgagaagcaaggaaaatagttttaattgcagttagtggggatgaattgtataggtatataggattcagtagccgtcatcgtttagagtcgggttttgcttagattaatttgtcaagaacagtttcgccgctagatcggtttgtggaaccctaaattcgagtgcttaatcattcatatgcaatttggttacaatctatcttgttcttgcttatgttcttcaattcgcatgcaaagattagccttctcggcgaggtcaactaggtttcggcacggttgataactagaggagacgtggtgctgcgattgcggggctcagtagcgtgttcgttcagaagccggatcgagttgtgtcgtgactccacccaaatcgactgtttattaatacctatcggaagatcaggacctagcatcctcattagttggtactatagttttgaatctgaaccgttgatcagaaatatggatcatcagttggtactgtagctttgaatctgaactcttgatcagaaatacggatggctagagtagtgtgcagttattaacttgcagatacaagtgtaactgtaccggatccgaattcctccgtttggatttgcttcattgcgaccttctacaacttcttgtggtgtttgaatcaccgtcaccgtcaccgtcagcatcaaaatacccgaatgccttttctatttctttttcatatccttctttgcatatttcaggagactatggttaatttggttatccatcaagggcctctctgtaaaactgtttgtacttgcagttgtaaaattgcattagcctcggtgtttggtcttcaaaatttttgtaaaaagaaaaaaaaatgagtcccggggcccgtatgtaaatcgtacacgtctccacctctcgccgcaacgtgacgatgtcatcgttcgatcggagccgtccgtccgatagtctgctcccaaaggaggtaggacccggatcgatctgagccgtccatgccgctatttatacacaccctctcctcctcgtcgtcactgctctgcatttctttcttcttcctcccaccccacgactgcactactaccagtttaattagcactttagcgagctgcgatgatcgattagtatagcctctctctctgagtttttaattaatttgttctttcttctctcgttgggaatcgaactgcggtttctttctttgcttttctttttgttttggtgttggttttggtgcttgcttgctgggttaatttgctcctctgctcgatcaatcgatcgatctgttcttggcgtggcgatgagaccagtagagatcaattgccatggcgtatatcgatttgtgctggccggatctgttcgaggcaggcaccatatatattttcgttcttgtgtgtgttcttcgtggaaacacacaacgactctttggatctaaactttgctgttcttttttaatttttgtttgggtttgtttgtttttgctgcttcaattcgtcgtttggttatcgttcatgcgagagagtcttggcgtgcagatgagatgcaacaaccataacctcacacgcatatatgcatgcattatctgagggcaagatcatctgcctttggtccatctcgatcgatcgcttcgtcttgggtcgtcgtttcctctttcttctgcttgaattgcttgcacagatcgtttaattttcgcgtccttttcgttctttttttcattttctttctcctcgttccattggtttttctcgatttttcacccgggccgagatcgatgctgccggccgacgacgtcgatctctctgtcgttcttcttttccttcttgccgtacgcggctcgccggagttttggttctttctccgccgctcgccggagttgcgccggccggtcatgtgccgcgcggctggtgagtttccttcctcttttttcacccggcagcaactgcaacgctcccctgcagcagcagaggtggtcggtcggtcccttcaaccgccgcgccttgcgcgcgacgaaaccatcgagaccgttgggttttctgacgggaacaatccaccccgtccacgtgtcagattctctttttcgtctcgttgatcaagtcgtgactcgtcgtctcttttctgccgtgcccgacgaccttagttactcatttattactgttactgctactttactttcttcagcttaatctgttgcttcgttctttttctttttggatggcgcacctgctagctatctggatctcttgcttcttgaagcagccgtatcttggcctgcttctgcttctgctgtgtgctcaactgctcatgtgcttgtgccgatgataataaatttttgtcacttctgagcgatgcaatgcatctatgatcgttactacattggagctgaaagttgaggcacataatgatttgatttctctattgcccaatggcattcttttttccctttctttctttcaagaaaagctttgctctgttttcaggacagtgtttctttgggtacacagaggcacttgtatgaattgaattgtgtatgcatataggatgttatgtgcgtgttctgaggcccttgaattgcaatggtgatacgaatcgaatcgacgcaaggctgaaacattcgtgttttgtttctttgatctgccgctttggttacaactcagtaggacaattgttagctctctgtttctggtaattattgatcttcagtttggacacgaacgattctgcttttgtattttgccttctgttcccttttgttatggctgcagaaaagtttgtgatgttagtgtactgtgcctatgatgaatgttgaacctgtgtcaggatttgaaccactgggcatgtaaatctcactaggttttttctgaggcatgttttgctatgatgaactgtaaatctcacgggtttaccttgtctcatcgattggccagtgatgatgagctttacatcttactgacactgatctgtatgaagttgcaatacaacagtgcgagcggct

SEQ ID NO: 41903 - DNA, 1458 bp, Oryza sativa
gaacccaaccttcttatggttatggggcaacgcgatgaagcgtgcggccttgcacaagcgcttcaatgagtacccaatgtggcttacttttccattcagaaaaacatcgaatatcctgtttcagatattttttgtttggatggatgaattttccggttaaaaggacagataccgacagtggaaagagtaagtacggtttttttgttagggatgaacacaataataaaataagattcagtacatgccatcctgtcaaactaatttcacattaattaatgatcaaatttacttttggcgatcgtgtaaaattaattttgccatgaaagaatgaatgcagagagtagctctttctttttcttttttattaactatttttttttctcttccaaaatttgacatttcaattctagtatggcatctctctgaacatgcctatgtgtctgtctgttgtagaatcatatgatgattaatcttggtgatgaacaattgtcaacggtaagtgttgttgaaaatacggtggatagtattttcgaatggtgaacactgcggtcggcaccgggtgcttgtcagaccgggcaggaggcaccggtcagaccgggcggcccgatggtctgactgagtgattccaagagggagtcggtttcgggttgtttttatggaatttctagattgattcatgtttattatttctagatggtttctattcgtatgtgatactattgtatgctgatgtgagtcaagttagcgtgaacttgtactcagatatggagtttcattgttattcatgtgcaggtgttgcttgaggctatgggagtatagtcggtgatggatcaggactaggctcggaagaagttgaggtccagacggtcaaggatgtcatgcgggatgctcaagctagagaacaatgtacatggaggtgaaggtttccatatggcatacacatcgtgttgtgtgcatatggaaagaggagtcaaatttcgatcggagtccaagtttggaaagactagagtttgtaaagtttgtttcttatacgggaaggactttttgtatgagttggattcgtggctagggacagccatgttatcggtataaatagagagggaggatgttgtctgccggtatcaatggatagagagttgagttgagagataagtttgggtatcaagtctagttcgagattttggtgaggagtgatgttggtgcactttgtaaacactagttgatgcaataaagtcgagatagattaatctacatcttagagttttcatctatcggtgttttctggatctcgacggtcgatggtttgaccgaagtattacgagcggtcaccagcggcaatcaagcagtcagactggcggcggcgagcagtgacaagtagagaggcggtggtcttatcggccagacaacacctgtcagaccagcggcataggagcggtcagatcggtgcgcacatggtgg

SEQ ID NO: 41904 - DNA, 635 bp, Oryza sativa
taacaaaaaaaaaacaaaaaaatctgacagttttaaggttgcaattttgtcagaattttatcttttttgttattctctatgtagaatgaatttgaagatgcaactttgcacgtagatgtaatactattgaaagtacatgtatgaattttcttagaattttttgtgataacttttagttggtgtacacggtgtgtacacgcgaaggcctgtgtgcataggatacgctcccgttggttgtatttgtaaagacaagtatatgtgtattagttgaatacccgtgctttgaattttactataatatttcctaatataaataaaaatacaattgtcatgaattatgttacctatctatttattgtaataattattcaccttaatttgatttaatttatatgagactattcatgtggatttgatcatttttaatatcaagaagctcaaggataattttcaaaattttcaatggaagtaaaatgggatgatagattcactgccgccacaactccatctattgtatactaatagtctattaaacttcatacaaacgctctcaaactgtcacgtggcttattacaaacgctcataagtcgtcatatggcgttttaataaattagaaaaattcctaaaaattctaa

SEQ ID NO: 41905 - DNA, 2167 bp, Oryza sativa
ggttcctcacgtctgcagctcgtgtttcattcgtgtgaggcccgctttgtcagccgcttgtttcgattgacacatagagtttcacttcattctctttgtggatcatctctgtgaacccggtccacggtgatctagccatctgactcgtgggtcctgcttgccagtcactcgatcatttctctcgagcgatattacatcacacataatttaacggtataataataattaaacaattcaaaaatatccatttaaattacacttaaaactcatatggtcatttcttgacatgcatgacccgtttaaattgtttaatttttgttataacttcaagaacccgtgattgttgtttttatgcatcgttatagtttcttttttagatttgtagccatgttttgtggttcgtgtagttgtcgtcgtgttagaagttcccgaagtcatcggaagaggccataccatattccttgaaaatattgaatcctattattgcaaaactatgttgtttcacttctatatgcatcgcttttgtaaattttatgatgctcactattgtttatttaatagttagtatttcctatgatctttgttatatagccatgttgttgaattgctacacatatgctcttgataaccttaagaaaatgataaaatgactagtatggctccctatatgatggacttaatagttgctctaggttaggcttatctatgcttagatccaacatagaaccactttttataaattagactgtgggcaacaactaaaatgtgtaagaatgatgatcagaactccctaaatctgttttggtggggcgcgaggtgtatggtttttgttagaagcacctcgtccactataaggaccggtcttcggacctctgttgcgaagcataacagtgcaaccacaagtctaatgggtaaggcctgactagaagtttagaaaagtctggggccagggaggtccactttgacctggagcacgagggggcatgtcttgtcccgagggattcggcaaactttaccttgtcggggtccagcgagcggcgaaaaccttagcaggtccttctattttgggttgagctacatagatagtcttgacacgatctttactttttgggtacctttgaggtatcacgatgcatggctgacatgaagtcaagtattgtgtcttgtgggtaaagatgtacacctttggttagagtaaaactattcgattagccgcgcccttggttatgggcaagcctaacaatatacccaagttatttcttctaagtgatgatggaattcatggaactttggacaggtggttaacctgggtttaaggccggtatgcgtgggtccgcaaccatgtaatattacttagaaataggaccgagtttaaactatgttttaaaaacatgaaaatattgcaactttggctttatgcaaaaataaaccctattatgcaaactcttttcccctttgcactataattcatttctcggcatggcttgctgagtacggtggttgtactcattctcgctcaatctttccccctctagtcagagaagcttttcgaagaagaagtcttaggtggagtcttggcttatccccagttgagcgcctgtgaagatggagccgtaggcccgctagtccgctgctgtttttcttttgttgtcaggtctaatgtgtctttgtaataatgtaaatactatcgtgttaattaataaagatgtgtctttgtatcaagtttattgtagtgtaccctggcttttcctgggacgggattaatacactagcgttcgggaaagatattttctaggcgtgacacatacgatgttttgagcattatattctgatccaatggttctacccacctccatcacccagtataagctccttccagcttttgtgttccccatattgtgttcacctactttcaggtgaccatattgttttccccatataattcaagttgtcattaatttcagtccttttttttttttgcttttgtaggatatagctagagagggagaacgttggaacgttagattggtagatagttcttctgatatgaatagaagatccccagccataacgtgaatgagcaaagcataatgacactagattatatttacagtgaattgtagaacacatggcattaagtaagaagtggctatgataatggtatatt

SEQ ID NO: 41906 - DNA, 817 bp, Oryza sativa
  unsure (1)..(817): unsure at all n locations
gccagttcagcaagccatggccggccactgcagtgaccacacccgtattgctgggcttcagctcctagcgaagagatagacaagcggaggtggcgaagccacggcctgcgccacccgccccctgcccgcgcgccactctgccgcttgcccgcgcgcagctcctccccccgccatctgcgcccgcttgctgccgcccgcccgcgcgccattccgccacccgccacccaagcgtggctcgaggaggaggagaaggaagaagaggcctgcgccgcgcgctgcccgcctcccgtgcagctcagagaggtggctcgcacgccacctgcacccgtgcagctgccacccgtgcagctgctcccccgccgacgcccgtgaagaagagaggagagaggaagagaggaggggaagaagaggctaacgcgtggggcccacgtgggtcccacgctgagttagttgccacaccggataaaaccggagtcaaaaccgccgagagacctagtttgcagtggttttataagttgggggacgtcggatatctggttttgtggttgggggacgattttgtaactcgattgacaagttgagggaccttcggtgtactttttcctctcccttctgtccctctacctctccctcccggcctctcttcctcttgggctgcagccgccctcgacccacccctctctttcctttctccccttggaccctaagtccgtttcnnttgtcctccgggcggcccagctggcccagcccccggtcgttttccacctccagccgagccgcctgttcatctctcaactcaagcaccgccggcatgccg

SEQ ID NO: 41907 - DNA, 699 bp, Oryza sativa
tatggcgtgtttcttcagcacagagtcacattggtcacactcaagaatactctccaaggtgccgattgctttgctgcttgttgatatttcatgccacagaatattgtttgattttgtagggccatacataaatcgcataaatcggcttagtatcttcaccccgagctctgccatacaggaccattcgttatgttgttttttgtgaagtgatcccttggacgttataagtgccacaatcttgttgatcaaggccggatcatctgtgttgctcatgaggaacaagttgttcttgtcgtaggagagctttaaaaggatctgcatgcctgtaagttgcatctgtttataatctttggggtaataatccttttctttgacagaaatctggtgatcatcctcttcttcaaaagaaagttggtcgccgtcgtcttcttggaaagaactatggtggtcattctgaaatcctttctgctcgagttcaagcaaggaagatacacatcgaatcccctgcaggattttgtctaaacggacctcaccagcaaagtgctcaacaatccttgcggctcgcaacctgatctctccatcatatgcacttttgaaatccagcatctgaactaagttgtggagtatgggactggaggatgcagatccaatcatattgtatatgggggagccactagtttcaaacggccgccacgcggt

SEQ ID NO: 41908 - DNA, 720 bp, Oryza sativa
cccccaaaaaaaaatcggaactgagacatttaaatattttatgaaacatgatgaagatacacgttgaaacatgtcgctgtcacgtatgaaacaacaagtattaacggattgaaacatgtgtttttttaacaaaatataatcatgcgatatcttgttgtaaagatttaattaaaacgaatacaatagtgtgatcggatcatggattggataaataatttaagagaaaaatcattttgaagcttgctaaaatacatgcatgcatgtgtgcatagatgaggtggagagagagtagtagcaggtagttttaggaattttatgaaataccctgaagacgcacattgaaacatatcactatcatgtatgaaacattttattttaacggtttgaaacatatgtttttcttttgacataacataatcatatgatatcttgttataaagatttaattggaatgaatacaacggtgtgatcggtttgtagatcggataagtaatttagaagaaaaaatatttaaagagaggaggaaaacatgaaaagaaatagttatgtatgtatgatgcagtgataggataggcgtccgatatttatgtttcttcggacgttcggtataaaggttttcccctccacctccctcctcccacacttaaccctctcactctctctctctcctttgtacgtacatacctgtcacttaccgtgtaaaaaagacctacgtacgta

SEQ ID NO: 41909 - DNA, 7559 bp, Oryza sativa
ctcataaacgaacttgagtttggagttaagatttggtgagaatttattttatatgtacacctatctctagtatttttttcataaatttacgaaacttttaggtataattttcacgagttttcaacacttagctcattttcaccggatatatcctcatactttttttcccatcctgtttgtttagtgtcgggttgacctatactccaaaaagttccttacgaaggttaatacttaagcatcacactttcttgcatgatgtgtgtcatccttgttttatttttttgttaatgatgttaggtttgactaaagtgtcaaacccatcacattaattagcaagtaggagtatcatcaacgaggaaagggttgtcctttggaatgaagaggttaagctaagcttggcacataaaggcagcacagatatgctactagctcaattatttgcatgtacaagatggtctagactatagatgattatatattaatacttaagctatgcaggggaggaggagaaagagggttagcttaccaaacaaaagcttcagccacaaaagattttacaaacaaatgggagaattattttgaatgccaaccaatctgatcttccccaaattaaacacacccatctacatctccaaatcctccatggtataagaaatacatggaaattctgaagagcatgggcaggtatactgtaagccacttcaaccttttttctaatctgaaataccttcttaattaatcaacaaaatacttaagtcaattcaatggagacgaggattgtagtagactagctaatccaggagtatgccttatattttcaataaattaaggttcgccctaactgaaatgaaatcatttttcaaaaatttaaaatggagaagccagttgcccactatgtgtacagttgcccactatgtgtacagtgcaattagttaattggcaaaaataaccttgctgaggtgatctgtatatttattttatatgattcaaaccacagtacgtaccaaaaagaattctgtaagggcgtcacatacgttgaatttctctgaccgtagtaagacttttgaggtactacaaaacaacactatcattattttacttaatcttcaagcatatatggatcattaaagaaaaccacaattggattagactttgacatgcttcaattatgcgaagacttgtgaccacaaaacaacaaatgacacgtacatagctagcaccacatgcacaattagtttaattatgacgacaaaatatgtaggaaagatccccttatctagctagtcctagttgagttgttgggtacatatataagctagaaccacacaataattcccatctaaattttaatccggtgagaattcctagctgcaaaaggaaaggacactctcatttggtggctcaactccattaacatcctaccagttgccattatttcagtgaagaaacattagcaacgcacgcaatatgccaatgtaaacgtgtcgccgacaggtgggcccatatgtcaaagagagtttgcaaactatttgtagccgtgcccaaaattggtttagcatgagaggtcaaaaactatagttgtcataaactatgcttatgcaagagaaccaagggaatattatgtatggccataagctatgaattatccgggattagggaataattgccgtcccattcttctgatccaaggggaccatctctttgctttagcaaataatttcaatactagctatcttctgcccgtgactgacaagctacacacaattacgggtatcgggcactgtaacagagaaacaaatcgagacccggtatgattttttaagataatgaaaaaaagggcatttttaaggacaaccacttattataaaatttatcaaggcaacaataagaactgaaataataaaaccaacacataaagaaaaataattattaaaatttatttatatatttttacctgtagttgacgaaaatctgtataattataacttctaagtttcgaaatgcagaatataagagctcatggttctcttcacacttttaagctaagccaaaaaaaagggaagtagcttttggtgaagaaagagagacgacggatcctggatgatgagatactaccgtgtttaattaaggagccaaaaaaaattgaccgcaaaaatttgtgatgatgagttttgcttttacctttttcctacttcagtcacagtagtgatcttttatcattctgtgatgataatgtttggcttcggcggtgcttttgctagcagcagtacgatgtatcctttttgccattcttccgaggctttagaaaaaggtgaaaacaagcaactttcgacatggtgccttccacctataggctacatgttccgtaaaatttgcacggttgtatttgtctagttatacacttgctggatttattacattagttgatcatggaaattttacatgcatcctactccctccgtcccatagtataagggatattgagtttttatttgtattgtttgaccactcgtcttattcaaaaaatttgtgcaaatataaaaactaaaaagttgtgcttaaagtattttggataataaagtaagttacggaaaaataaataataattctaatttttcttaataagacgagtggtcaaacaatacaagaaaaactcaaaatcacttatattatgggacggagggagtacgtatttattcaacatttcacgagtatgaatacaggtggcagtgttgtttcttctttctaaaaaaaataatacagacatatgttcatacacactcgcacaaacttataaatgcacatgcttatagcctacttttatgagcacattctaatattgggttagcatatattaagttcgatgaagttatcaccagcgtctttactgttgatgtgtgcgtcgtccacatctaaaaactaattaaagtaaatgcaagataaattttgctacatgagattgacttcggggttttagctgtagaacaccgtacaaatgaacctttggagaaagtcactcttgaaaattggatatttgttgataaacaccgtacatattaaaatatttatttccgattgaataggacatagaaatcgtgtgataagttagaaatatccttgggcccacatttcagctctcccatctctcttctctcctctctatcccttcgtcctctcccaatgatcactgccactaccttgtcatccctatccaaggcagcctccttgtatctctctgcccgtcaacctacgcggatccccttcctatgtagactgccactgtccaaagaccatcaacatccccgagaacctcctggccccctccccgtccaaatcgacgcctcccaatgaccaatgccaccaccctatcatctccatctcctctctctctctctctagatctggtgcttaggaaagctcatgtcatcatggactcctcgaccgccgccgcggcatgtggagggagaaggagaggtggtgccgtatcaacaacagtagtagtttcagggccggtcttggggttttggggccctagggcaaaaacttataaacacgtagcatttaatattcgatgtgataaaattatccatatctgacataggatgccttcccagcgacgtaaatctcgatagtgatctgaatgacgaccgacggatgatcgacacgagcgtggctactggcgagccgtgatttgctgacttgatgtttccgtttacgagacgccgagaagtcgagaagtcgtcgagagcgcaggagtagcgagcggcgtgacgtgatcgagacggcacaacgcgagtggtgtgatgtgatcaaggcgaagtgacgtaagtcaaatgaagatcgcttcagcttcgctgaaacaggcttgacgatggactaaaatttattttctgtattaggctattcaattgtctaacttaatatagacccatggcccatgaactagaattatacaatacgtagtatatatactatatgtgtataggggccccctagattttgaggggcctcgggcggccgcacggcctgaacccccccccccagggctggccttgagtagcttgaaatgtggctttgctcggggcccaacgtggcttgtgtggtcggcaagcatggtgtcgcatgatcgttagtgtggtgaagggtgaccgatagcgtggtgagggaggagaggggatatagtgaaagagagatgggatagctgacacgtcagcctaagggtatttatgacatttcacattatttctctcttctattcaactgaaaataaatattttaatgggtgtgatgtttagcagtaaatatccaacttttgatagtgttttccccaaaggttcacttaagcgatgtcctatagctaaaaatgcaaatgccatgtaataaattaagtttacctaaattcaaacacccatgctaaatcaaatcttgaacttgaatgtgggtgggcaagtttcacctggaagaaacctagccatctacacttaattcacatttgcgtaatattgctagttgacttagcctcttcatacattttcagactatgtttacggcggtcgctactactatcagtgttatcatcaatgcataaaatgacgaacatctgatttggtagtaatgattatttcaatacccctattaataaattcatatgaatagaccaggatcagaccagagagataactcaaaataaattaactcctgctaactttcttctaatatatatatatatatatatatatatatatatgaattgagtttggcctagttcaagacataacattttagcacatgattaattgagtattaattattacaaattttaaaataagtttttttaaaaaaacttttacataatatttttttttgaaaaaacacaacagttaaccgtttgaaaatggggttaaatcgagcattggagaacgtttatagacatgccaacagggtttacatgtacggtaaccttatctgtttttgaaaccacgatatacctcgtggtaatcgcgcggttatcatgggtggcggtaaccccacccaaaatagtttggtgaattctgcatgtcagtgtgacacgaacgccacacgctcgtactgcgttgaaccaacggcagagaaagtttttaggtagcccagtaagggcatctacaaccaaagacactctatggggcatctataaccaaagacactctatgggtgccctcactaaccgaagccactccgtgggacacctatctcccaatgaagcatactcgtacctgggttcttcaaaatctcaagcaaccaggtgaaggtactccaacccaatgggtaatcccaacccataaagctacaagtgttgtttttctcttttacccctctcttcaaactaaggaatttgaagacacgaagcattcagaatacatgaatatattcaacacaggaattttcaatcaagggtaacctcatatattataatccaattaagcaatagaatactatatattttctatctcactactctcaagtactactctctgctccctccgtcccataaaaaaccaacttaatattggatgtgacacatcctagtactacgaatctggatatacatatatccagattcatcgtactagaatatgtcacatccgatcctagattcgttttttatggacggagggagtagacaggaaagccttatcttatcctcctcattcatcgggtcattcaccgtatcatgtcccccccccccccaaaatcttccagaggcatcgagagcagcaaaccatcaaaatcaacagggatggctgagcgagcttgcgcgcgcggccgagctgggtaccgggcggagaaagcgaggcggcagtcagccgacgagctcgcatgggcgcacggtaggagcgagctgccaccatggccagcacaagctcgagctgcggggtttgcgactttgccccaccgcgccaccgccgattctgccacacagcgccgctcgtgagctccctccgctctctctccctctctctctctctcccgtcgcctctctctcgctgctgcccgtcgtcgccgccgacggagagcaggcgctgccggcagctggaggcgacagtccagcgccgtcgtgcgctgatctggccccctcgcggccagatcggatggaggggcgccggtgaaggttgtcgcgtaggtcgtcgccggcatcgtctccgccgctcgtctccctctccctctcgccgccgacgcttacctttctcccgccgctcgtcaatctctctccctctctctctcccgtcgcaagcggccgtgagggcgatgaggagggtcgccgccgccgccggagccatgccgttgctggtggaaggggacgagggtggaaggagaaaaaccggaggacagagcggtgtccttgggctactcccccacccaacgcgcctcctctatcaatctcccaatccaggcactcgtagagccgcgcccctctactaggggcgcgcgcttttgctggggccaggggcggagctaggtgtatcaagggggtgcccaggaacccggttcagaaatttttttagctatagtttatcaattttcaccatatatacacctcctcgattcaaacttaggcacccgtatcaagctaaactcaatctaaaatagactaaaatatatgagtggaaccccctcaatttcgttctacctccgcccctggctggggcacggcacggcgtgaaaaagggacgaggacggacgacgtgagccagggacacggcctggagagccgcgttgaacatgccctaactgtaaatacacatgacgatacagcgccccggaggaggagcagcaacacgagtacagtaaaaacgcgcatgtgcattgtgcacgcgagggggcgtggcggcgacgcacgggtacggtgcgtgcgggctccaccgcggcagcgacgggtcggaacctgacaacatgtgtgttgccccggaccacgcgcgacccccccttccaaacccgtcgcgtcaccctttttcccccggcctgtcggtgggacccacctgggcatcgcattgatcgatccttttttttttcttcttcccctacgacgtcgctcgcccaagtggaaagccgaggaaaccttgtcggtcacgagccccttttttacatgtttggactctgtaggctgtcggctgtgtagcagtagcttctttccgccgcgtatcgtatcgatgtccgaaagaacatcgaacggacgttttcagtgaacaaatcgatcgaatgctacgcctactcctagccgaatactccctccgcccaaaaaaaaaaaaaaaagaaaaccattcctatcatcgcaagataaatttagtgaggagtgaaaatgaccaaaatgacctttatcattgaaaaaagtagtaatggtaattggtagataaagggtatctaaggaataaaacatctcattttatatattgaagataggtaggataatagaagttgattttgtgtggaagaaaatttaaactctataagttaagttttttttttaaacggagagagtaggggtgtgtttagttcacgctaaaattgaaagtttgattgaa

SEQ ID NO: 41910 - DNA, 1642 bp, Oryza sativa
tccttcatgcgttgagtaatttactgaattaacccttaagataatcccaatgtgcctagcagctgatagctgagaagggaattaaacgaatattgtttggcgatgtgcgaaatgcgctgaaagggatagaagggtgtgggagatttctcatgaccaatataaggtggctcaatttgagagaggagatttttactgaataaaaaaagtaactagcctgtcatttgcctctagttatatattctattagcaacaaaacagctgctggacattttcgcagcgaagggtagctatgtatccaagcaagttactcagcgtcttccagtcaatcaaatcagccattccaatccctaaggcgagatttaaaaagtacagtactacatttagaaattaaggaacctagagaaaacagcagacaaaataacactgctgtaccccgactttatttgtttaaccatggctatatgaggcacaaagaaagagctggaaataagagggataaaaaatatccacagaaagaattaatatactccctccgtttcatattaaaagtcattcgatttttttttgtcaaaattatttaggtttaactaaatttatagaaaagattagcaacatataacaccaaattagtttcattaaatttaacattgaatatattttgctaatatatttattttgtattaaaaatattagtatatttttctataaatttaatcaaacttaaaaaagattgtgtaaaaaaaaagtcgaacgacttataatatgaataggatggagtagccatgaagctctgcaagaaacctcctacaataggcaactagttggatggaggaaactaagcggtacacttcaatcaatcgccagctaaataattctctaatcccctccttttaggtgagaaaattttgtgcagacaagtcgatttgtttactaaaccctaaaccggaattgtctctcgccatgattggggctgagagcgacgcatgcagaggacagaaatagccattcattcgaagaacatatggagtattgtcgaacactgcacagtgccatatgggttgggatatatatctcgatcaatcaattttcaatccagagtgcacgtccatgcatgcaaaggtgaaaacgtgtaggttttttgcgatcaattcatgtctgaaaagtgaaaagttccagtgacttggagaaggcaaccaattaggacatgttaacaaccttgaagtgaattgcagcgagctagctgctcgtcgttaattacttgtaccgagtaccgaccgatcgatggggatgcaaatctatgttgattaggaattaatacatttttatgggaagtgaaaaggagaggaccgatcgatcgaccaaggtgatccaccgacagtttaaattcttactagatctcaactctggtaattaagaatcttcataaaaaagataaattagtcacaaccttaccttactgttgcctgaactttaacctccaacagtattatttctacgtcagagaatccgtttcctcttatccactttgttatcatttttaactctaccaaattttaatattattaaattttggtaggacaataaaacagtttcctcatgttcactttgttactatttttaactgcaccaaactttaaattat

SEQ ID NO: 41911 - DNA, 1079 bp, Oryza sativa
ttttttcttgtttacttcgtaactttacatgccagaaaataaacatgatggacgaataaatactccaagcctagaatttaagaaactgaataagttaagacacgccacatctcagcttatgaaatttcatttctcttagtcttttccagtggattcaaatttgtggtagcacaaatccctacttttgggaggcgcatgatgcactacttagagtcatgcgaaacaaatgtggacaagtgccttctgttcaccaaaacctcatctgacctttcaaaaatttccacagccaccatttcttgtttctacttaaacactaccatcattctttttctgatgtttaggtctttaggacatcgatccggctccaacacaaatgtttgatcattgtcttttttaatcatatattcataaaagatattgaaaatataaccacatgaaattattttcatgaaaaatctactcatatgagtcacatatcaaatcttaatatttttggatttattagcgagttaagatttcaaggtttgactgcagcacgccttctaaaacatcatctaatttagaacagatggagtagaaggtgaggccacgaaatgcaatcatagtagctttactggttgcagctaactctctctctctctctctctctctcatctcagatgggagcagtatcaaactgaggaggaagcatctcttggtcgaggtaagcgtttaaggaaggctgtttcttacagggaaacatttgcaaccattcctaatgaagctttaagcgaggtaattctgcattttgaccttgttctgcatttattttctgttgatcagttagcaatgctggttcataagttaatttactgtgttactaccttctgcataaaaaaatatgcttgcctaaatatcctgtaagggatctgttctcctagctaacgagcataaatttatctttgcatttttgtccaccgtggtccacttattgtggcatataattgctgcaaccctatgaacattgagctttgcaacttttgctttctctataagtgcataaactattcaaagtatgccttatgaggctctctgaatat

SEQ ID NO: 41912 - DNA, 1126 bp, Oryza sativa
gcataaagctcttgaggaatttcaggatatctcttggttttcttcgaggattgcttcatttctgcagttgattcaccgagacgtttagccccagatggctgcacaggattgggatcttctacaattctcaagggatttgcactggaatcatatagtttcatgaattcttcaagtctgtcatcagcataattcttaatcacatggcgctgagcaatcctttccttttgtctagctcggagtttttcactgttacaatcagaagtaaatcaatgcctgatgataagggcacatgcgaaagtaagtataggaatccccagccttagcatgagggagagggagggagataaagggatagatagcatactatttttccttcaaagccagtccagctgcagtgtattctcgctttggttcatcctcctcatcagagtcctataccaatgccagcaaatcatgaaaccatgactcaaaactattgtgaatataagagtgcaaggcaaatagcaaattaaaaactgcactgcagtaacatatctgcggaagtctctgaatattacatttatattgaatgcacgcaatattactcatgggagattaaactattcagggaactctggtatatatctgaattatcagggaacacataagctttcaaatataagcaagtttcaactgttcatttgattctccaagacactaaagtaggcattggttttacttttttcaacggaaagcctgattttgagaacgtgaacatgagtggtagactgaacacacacactatctcgattttaaagctatatgatgcccacagctcagactgtcgttcccatttgccataacaattcaacattacagctattaacatgctttgtcaagctctaaagaacaacactaccaaaatcatatcccccttgaatagccctaactagccgattttccaaaatcgtacataaataagaaaagtgagtcctgcagggtcacaggaattcacatgttatcatgtgtctgtagaattacataggataaatcccacaaaatgaaattatttagtagtaattcatcaaagagcccataataaagagtaatttattgcaaaattattttttgaactatgttaacacaa

SEQ ID NO: 41913 - DNA, 1400 bp, Oryza sativa
aaacgaagttgagtttgaacttgagatttggtgagaatgtatttcatatctatacctatctctagtatttttttcatgaatttacaaaacttttaggtatgattttcacgagttttcaacacttagctcattttcaccggatatgtccccaaaaagtatatgttaattattgttgtgaaactaaatatatagaggcagaatggatagtacaaaaaccatgcatggatgcggttgcaccggctgtattatcaggttataacaaatgcacgttacctgtaacactcgagctcaatggaaaaaggttgccaatctaatctaacccaaagtatttttgttgtgtgaaatttaatcaagtaccttctgaccaacagctaaagttctaagcaactcgtctaattcccttaggaccaagctcagttttcagtacttattttttctatttctgaaaactatatatagactactggtacaatattgtgtatttgtactcacgtgagtctgattgaacaattatctcctcacccccaactctagagcagacaaataacaccaaaccatgttatacagtggttaattgacatggtagtgatttttgctgcaattattccttcgtagataacctccactggtgccaattaatcttactagctagctaaatgatatccaaatcatcatgcatagtgtgagtctaagttagtgaaactacagcatattaataaaaccacagtcgaatatattatcgtgttatttgtccgattttaaaagctaatggtgaatagaaattgtgccgaaaataagtggaaggcgagcaggaacttcgccttcctcctgaattaggatttttcaatataatgactgcagtttaaaaccaaaataagcatgaggaccttccttggacaattaattttagtatttccagctccactaaaaacaaccacaaatcgcaaaaccttctaattgatccttgctcccttttgatttggaggaaaaacataggaattttagagaatttcaatcctataggaaaatttcctattaaaccctttgatacaaaggatacaatcctttaacattcatatggaatggacaatcctataaagatttaggaggaaatttaggaagagtttcaaccttttggtaattttccttgagtctatctctctcatccagttcatgtgtttttcctgcggttcagtcaaacggtcattcctgtgttttttctgcgttttgcaatcctctgttttatacttgcattcctttcaaaatcctacatttttcctattcctatattttctcaatctcacgattcaaaggggccctaatagcacacatgaaattatcccaacccacaaaatttgacaatttgactctttgcaaaaactaattttacaaatgaatcg

SEQ ID NO: 41914 - DNA, 1142 bp, Oryza sativa
gtagctatttctagagttcaaatatgctcctacaccatcatggtgggattgcaccatggtgagtgtgtggagtgatcctgaactgttgctttcctttcttttacagtggtaagcctgaatgtaatcaaacaacttctgtcattttgataatgaaatgggggagcaatgcctctctttctcaaaacaagtttctagagttcaaatttgtcccaaaatgttgatattctccacctaccccccatcacaatcatctcccatttattttttcacctactttctcttctcaacaaatcacaaccttccaccattcaatttcacctacttatataattcccatgaaaacctctagaaatgcttacattttgggatggagggagtaatattcaacatggttgtgttgtcttgcatttattgataatgcttcttttgattcttgtcaacatggctctccaaggaaagatgctgtactttatgatttctcttatcattctaccaccatggctgtgtcttttttctaatgatatggattttggggaaaaattgctatattgcattttgcatttgaagagatgcgtgatcaatatgttcttataaaagattctgtagtaggaagggaacttcagtccttcaaaagatgaagaggatcatgcctttctcttgcaattgcttttctggtttaagcaatcattcaggtcattgaaacacttctgtgccttatttctcagtttttattttctgcatgtcatgtgtgtgcgcgcgctaccatctagtacctatatttctgttacatcagtactctacctaaccatttatattataaccaaagtactgttttcagttaagatacttcttttgtgcgtatgttttaattggcatatttttcaccatttatgtaatagtggtatagtgaggttgttcacagactactgatggacatgaaataccaatgatcttgaagatatgtcaaaccgtataaactaagtacaaacacatttgttctattcggactggaaaagaccactttgatatatatatagtcttgaatctagtttctgaaaattagctctatttgaaacattggagtcaaacaaagcagagcatgaatgataaatgacttgtgtgaatgtgtgatatttgcatgt

SEQ ID NO: 41915 - DNA, 1617 bp, Oryza sativa
tcctttcaaagctgttttaataatataactagctgggtggcccacgcaattgcgcggctagcaccaaaataaaatcatatatttttagtatgattttacttaaaatttattaaatagctatatcattgtactaagacatcgaaagatcaaaccttatcattcccccatgtttttaattatatagttttttaaaaatcacaccagttgctaccccttatgtcatctccttctttatttgcttgctcgatctaccattatttctattcattctcctgcaacctttaaaaattggatcttatagtttgtagagtttattgtcatgttgggtttcgtttttataatttctagacgtcccgtcaaacattatcattataattctctatggcccgtccactatatcttctctttattgtcattgagattttaaaaattgaacataattatcgtttggattcatttttactttctagaagtcccaccaaaccgtcagcggcttttccattgtacttctctacggctcgcccgttgcctcccttctttattattattgagattttaaaatcgaacatgattatcattgttttttttactttttagaagttcttaacctttaaaaattggaccttgtagtttttagggtttattgtcttgttgggttttattttttataatttttagaagtctcgtcaaacgatgccactatgctcctctacagcccgtccgctgcctactctttatttcattgtgattctaaaaatcgaacataactatcgttggaattcattttttattttctaaaagtcccgccaaccgttgtgaccgtgcttcttaacggcctgtccgtcattcctcctcttaatcgtcattgggattctatttgggttttgtttataatttttagatgccctatcaaccatcaccatctactttataggcatgaccacgatcaaaaccttgagagcaaacgtagaggcttccttttacattactttgatgtattttatttatataaaactatactgatcaatataaaccgttaaaatctagatcctttaaatatttcactttttatgattaatgtggtaattttcgccgcttctcagctctgccccatcatcggagtatgagctataacatatggaccgtaaatatgtagaaaactattagggaatcttgttacttaggattgtttttaaaaaagaaaagcatactgctgcctctagagattatgcgatagtgcaaaacttgaatgtggttgaaggagtttggatgcccagctggtttgcctcccctgcacatgattttgtacaggacgtgtcaattgtgcctatatacgatttctaatttagctacacggacaggacatgattgtctcgtgtagtaaattaagtttcctaatccaattttgatttcaattgctattgcgtagcacacatcaaattctagtccatgctctttcacgtgtctgattcatgatctaactgtgtagattttttttcttcggttaatatgaaaatttctagaccccagagtgtacgtgatgtcttctttcaaagttgtcttaataattttgaagtatataaaaataccgatcatggtaatttggaaccaattggt

SEQ ID NO: 41916 - DNA, 1182 bp, Oryza sativa
agagattctagatccctatatgacgcacgaggagccccaagtgtatacagcagaatggttggaggcgtgtattaagccgttgttgcacttggcctgtcatgttccatggttcttggaaagacagacctggaatgcaagatgtctgtgcgaaactttgtgcagtcaaagaaatttttctgcagtttggcgatttcagtttgtgatagaagttctgtaattgcaggcatacatgaactttttaaccaggcagcatgtgagcttattcgtttaaattcataaataaattttcagggaggaacagtaagattttcttgaggcaaagttcactaaattcttatatattttctttgccatgaactagaggatgaatgcattcagtaacctgtaatcagtaccaagttcagttacagttggaaggtgctgtggtttccattagaatgtgctaaatttgggtcattggttagaagctgaaaagtcaggttttagaggaaaacccaaaatgtattagggggtcaatattgttctgggtttcagctcgccggctcctgcagaatcttcatgtcatatggattttgtgtcgtcactaattttaattgacgattttggtcgatgaaaacaaaggttgatcttaactagaaaatgctctgatcagtgatccaatttattttaacaacaacagactgacagagccaactgtcgttgtaacgtctgtttattcttgataatataatcatactcagtaacaaacaatctttcctaactgaactgtagcatgtatggaattatattgtttattgcatgacggtgtgattatcttttctaaattcttaacttcgcatgatcaaccattggaaatgagttgaactggtcagctggagatccagttctttgacgagtctaagctgcagaagttgtcgtactcacaagttctcgcatttttttctcacaagttctccaggacagtccaaacctgggtgctgagacattagagtatgtgttttgttccattcaaactttcaatttttccgtcacatcaaatgtttgatcacacgcatggagcattaaatttggacgaaaaaaaccaaatacgcagtttgcatgtaaattacgagacgaatcttttgagcctaattaagccatgatttgataatgtagtgctacagtaaatatttgctaataaca

SEQ ID NO: 41917 - DNA, 535 bp, Oryza sativa
atacaagtgtatacatatcaattcatgagaatcttggtgatatcattggcaattggatgtctttttcaaaatctttgatttcttcttgatttttgttcggggagaattgaggttattttgagggggagttagtgttttttcataaatccttttggcatgtgttgagggggagtttgtaccttatggttttatcaagcgataatatgacaatgagaaaaattgagaaaagagtgctttgttctatacatatggtattttcttatgcatgctagcaatactttgaaggtttatttgtctctagcatagcttatatgtattctagtctttttatgagatttagattttgcttttaagggagatgatgcatgacacttaaattctttcacttgaattaagaaaatatgcaatgttgatgctagcatatggtttgatctataaatgctctatatatatgctttattgacttgttattcctcaaatagctttaattgctcattgtgaaaaagagaataaaaaaaatgaaaaaaaatgaata

SEQ ID NO: 41918 - DNA, 1458 bp, Oryza sativa
tcctgcaccccgagtgcagccgaacaggcccatcccacatagtctaaaacacaagagtacatagggtattacgctcccgagcgacctaatctgtatacttggttgtgtttggtgttcatcgtacgaacgaagcttgatctcaactcgccccttagccgaatctcaaaggggagggggggggggagttcttacttccctgctagaggagattcactcttcgacaatagtgaacagtgaacattagaatgtgattcttgctacattggacatctggtgccttagtatttgtcttaaaaaattttcttctaaaatagcaaaagaaagctagatatatacatcattgagtactatcgtgtcaagatgtttcgtagtgcttcagctccaactctacctctcttgaagctagatcccagtcaaatagttttagctccacttaaaaatggcacggagtgatactctcacaaaataaactaaagaagcaaaactaggtttagatagctctataaatccagtacaaatctaattactatagttaaatttaaaacttagagccttaccaaacggactccaagaacataacttcgacagatttccccaaaacaaaagtgtttcaccaggatctagacaaaacaaaattaaccatacacacaaaatatgccctttttttttttttgcccaactctatcatacttgtactaaacttgggttattctgtagaacatgacttcactactaaaatgcatatgagagaatacttgattctccgttattccctcgagatagatgttttgttagttgttcgctgaccatctcgtcgctgttagaacttaaaaaaatcagctcaaaggtcttctttccgcccttccccctttctccgagcagcgaacggcggcgcacggcagccatggtggagcgcgaggatgttggtgggccgatttcactggcatgggccgagcgcgagcctgttcgtcgtcggccttgctcgctcgattggagcggccgcgaaacgaagggtagcagcagcagcgccgtgcgattcggaacggacggaccaaggagcgacgcccgacgtccctctgacgttgcgcttctgggtgggttcagttcggttctagggctccgataggaacgttgccatggcggcggcggcggcgggaggcgatggtgaggcggcggtgatgcgggcggaggtcgccgcgctccggctccgcgtacaggttcgcggaccagcgttcgttttttcctttttctcttcttgcgcggctgtttcggtggatttagtgaagttgtttcttctctttttttttctctactggtgaattataattgggtgtgattaggagttggagagggagaaccagaggctgggtaagattgcttcgagatgcacctgcggcagctccaaggtgagatttcttttatccttagtactgccattttcattcatctaatcggagc

SEQ ID NO: 41919 - DNA, 2220 bp, Oryza sativa
cagtaccccaaaagtgtcactcagcaagttttatggcattagtcaagcatgaccccaccatatgctaacaaaaacctgcatctgtggctatacctttatagctagatatcttggagttttgatgatgttatcatgttgatatcatttctagaagaatgcttatgtactgcatccctcacctgttatcatttgtcatgaggttcttctctgttaacatttttcctgattttcttctgtaggacgacagtgctgcttcctctccagtagttagtgaaagtttgtccagcagtaaacaagaaccacagaagaacgtaaagtcacatgtaagtgtaacttcagaccataatgtcatattttaatttgatcagatggttccacaataacatctaccataatcacataatggagttttgctttcttatcttatctgagtcatatgcatacaatcgaattatagtgcaatggtattgtggaatacaatagttcatgcacatatgcaacttaagatacactaagtttctataggtaaggatagtcatttgtttactagaaggaactctgtttgttgtcatttttgcatgtaaatatattagatgtgtatgtctccattgagattaatggagcatatttttcacctatactaaaacattaattttctaagaaaacttctgtctaatattacctgttttttttcttgtgtttagtgtagaggttgccaagtgggggttgtaagtcactgcccaaagcgattaattgctctgaaaatcatgtactttggtcagaggtatgattttatttccaatacaaaaatcatgtgtttccttcatctgtgatgctttcttgcttaaactccgatacaatcccaatattgtgctagcttctatgtgatgaagataagaagattgcattaaaatcctgctactatgtgatcaaatataggcgtactatatgtgtatatgcaacagctttaagttaggaacctcttcactggtcacagatcaaactttgagtcaataatattaacacatgtttcttctgcaaaattgcaatatgttctcctggcacctgcaaaattgagtcaataatatcaaactttccaatccaagaacttctgctggcacctgcatccgttctctttactttgttagttcttattgctcgtggcctcgtgccttgtctcttttctcatttttttctgcaaatatgcttgttctcatgcagattttatggctttgcttcagaagcccacacagagcctacagttgaggtatattttttttcctacgaactacatatcagcttatttttgtttctctaagggcgtctaaggttttccattaatactcctaccttttctgttccagtctgagatatttaaagcacttgaaagggcgaagcttctggttggaagtaggaaagaatcatgttattctaggtgtggaagaactgataagggggtttctgctactggacaggtacttgaatgtgtatggtttgttcaatgctagatgattatattatgttttcttcttgtatataatataagcttatattactcatagtagtctcagatgtgatcacgaattatttttgtttctggttttatttttaagaagcactcttctggtctttctcatcagaaagtcatatttttcatgtgctactttcttgctactgactagtgattaatacaattatgtactgtgattaatacaagttcactttctctgtcatggaaaataccgcataaaaaagttcataacccaaactccctttttatacataaccatcaaccttttacattccacaatgcaacggttgacctcaaattttaaataatagcctgtaatggaagaaagaaatctatgtagaagtatcttcacaaccaatcagtatgtcattttgatgtgctcgatgttaaatttctgaagacatacgtcaaagattttaagtgctactgcttgcatgcaataggtacactattttttaggaatctagatagtaattttgtattgcaatagtgtttgatgatttttgcatggtgcagaaatgagtgcaatatggaaaatgtgagatatgtctatgcactaaataaaatttgtttcctcatcctgcacctgcaacatgcaggtaatttccttatttctgcgatccaacataaaagatgccaaattggatgtactagacaacaaatctggtatgtttctgccttctattctt

SEQ ID NO: 41920 - DNA, 1914 bp, Oryza sativa
tcttttatttaaactctgttatgttgttctgaatttttgtgtgtgtgtgttagagagcagtgtgccagtgattgctcctgatccttcacgatctaaattttctgtagacatgcatccaaactttcatgtaaagagagagcttatctagacttaaaagaaaagggagagaataaaggatattttttttagaaaactgtaaatttagtaaatttagtgactacaacattagctaactagtatttcaaattgttgtgattgcacacaaaattatcacgaaactgcaacttcgagatcaccctaacattggaatacacttactttcgcttagtcccatctctatcgttgctaatgttgctgacacattgggctcacatgtcatgacggaagttcctgacgtaggcgaaacaacgagacatgtcagtaatatatgaatcaaaaagaatcaaatctcatggccggtttagtaggtaaaaatttttgttttggggagtcacatcggatatacagatacacatttaaagtattaaacgttgtctaataataaaacaaattacagattctgcctggaaaccacgagacgaatttattaagcctaattaatccgtcattagtaaatgtttactgtagcactacattgtcaaatcatgacgcaattaggcttaaaagattcgtctcgtgatttctatgcaaactgtgcaattacggagtagttttttcttttgtctacatttaatgctccatgcatgtgtccgaacattcaatgtgatatttttaggaaaaaaaattttgggaactaaaccaggcctcagagggagtacgagagtgacaattgccactgtgatagctgtgttgggagtcatttcaggtattgcataccacactaagggcctgtttagattccaccctaaaattttacaccctatcacatcgaacactcaaacatctgcatgaagtattaaatataggctaaaaaaataactaattgcacagattgcgactaatttgcaagacgaatattttaagtataattgctccacgatttgacaatgtggtgttacagtaaacatctactaatgacagattaaatatgcttaataaattcgtctcgcggtttactggtggattctataattagtttttttattagtgcccaaacaccccatgcgacaccctatataatatccaatgtgacacgccaaaactttacattcctatctaaacaccccctaaactcaacgtgggcaacaaagccttgtgtatcgttggcctatttttcattgcttggtaatacttcgttgtatttttcacttgcttatcttaggcaggagaaaagaaaaaaaaatcaagacccaatagagcatatgtactagcatttcagaagacggtatggggtaagtagtagcacgagccaaccaccacatgacactgaatttagcaagagtaaataaatggtcgccatcttgcagctagtaatcactgtacaagcaacggcatggagagctaagtactttttgccccttaacaatcgaacattgcttagatgcaactgcaagtatccatcataactgcattacgttagcgaccatgttaccgaaacattctgtccctccaggggaaatataatatgaactagacaaaccgatattcatctgattcatattagggcccctttgaatcaaaggatttatgtaggaattttatatgattcaaatcttataggaaattttcatatttggccctttgattcaaaggattgaagctttccaaatcctatgaaattcctatggaatggcacattgcatgtggattttggaggaaatttagcaagagctccaacctcttgaaaaatttcctttgagtccatctctctcatccgattcctgcgttttcctgtactccaatcaaacgaccatt

SEQ ID NO: 41921 - DNA, 733 bp, Oryza sativa
catcagcttgaaaacttcaggtaagtgatcatcaaacatacttctcgtgattgaacacacacaaagagatctcttgggaaatttaccttggagttggatgactatgacactatgcagcactgatccttgaaggattcacccatcgtttgaaactcttgatgcgatactgaagctagccacgtaactacacactacaagctgactttgttttgacctttgctatccgttcctcatacgaagctgaaacaagaaggcgactcagtttcacttggaagcagataaacaaggaaagaatcaaaactaagcaccgcaccaacatatcatatgtgcacaactgatggcattttataggcaaggctattaacagttgcagcacaataaactaatgacagaaaactaacggtaggactgtcagaatgtcgaagagtaaaccaagaggctggcataaccaaataaaacatttgcttgtccttaggaaaacatattaacaaaaatgtgttggaagtaaagaactatataacaattacttacgttctgtttgtcgtgacattagaggaatatgattcctcttcttgtgacgaggttcaaatggatcaggctctgcaatgacatctcacttttagttcactaaaaatggcataaaactgagaaaggatcttagccttctggaaaaatggaaaaggtttacatgaatgtacctggagaacataaacaggacaatgcggggtgcagg

SEQ ID NO: 41922 - DNA, 1108 bp, Oryza sativa
ataggaattacaggtgggccccacccgtcagcgagggtggcgggcgggcccgcccgtcagcggcacgcgcgcgggaaggaggccgattgggccgcgggggagaggagagagagggagggaggtgggccgagccggcccaagaggggaagggggaaaaaaggactttttagggcttttctttttataaaaccattttaactttgtttatttcttaataattattatttgtgctctgaaaattccactaaaatttgagggctccttttagaccaaggagaatttaacaaaaattctccgggccacattcgaatttttcttgtacgtattttaatgtttgccaatttcttttcgaattttaattaattctattattccttttagaaaatgaattttatttcggaatgaatttatcaggacgtgacaaatccaccccccttacaagaatctcatccccgagattcgaggaggctagcaagaagataggttgggcggtcttctcttcttgtctgacttcttccgtcgcgtcttctataacgaacttgcctagcaaaacttctccactctggactgcttgtctcgatctcctgttgcagatggaatcttctgttcacccgacttgtccctggttgcacctttaactgactcagactaggctgtggtagttgaggatggggcttcagtcctagaacttcttatcattcatatctttggcgtcaacctcatacaagttaccaccttcatgacatgcgtcgacatcagctttgtcattactaggataccatgcttgtcatcatgagaataccatgcttgtcatttacttctaacttgccaccaactgcctcatattagctttcctggtctccgggtgcaagctacttctgctattcgatgcaagggtcggtaactttgcctttgaattatgtttctaagaagaaccaacttatcccacttgacatgctttgacgtctccccaaatgactttactgctggacttgttatggtctgatcgttatcctgccaaatctgaagcttcgttgttagatgcgattttaatctgacctccatagactatcttcgagcatatcacttggttcataactgggaatag

SEQ ID NO: 41923 - DNA, 575 bp, Oryza sativa
gcagcagaaacagtgcttcgtgtaagcaagtaagcaactgcggcagcatcactgtgttgtagcggctgcaccttgcagccgaacaagcccgatgtatgtgttacagagttcttacaacgagagaaactagagttctgctccagatcatttctttcaatgtctaatcctaagtcatcagactcctccttttatatcttaaggagagataacaattatattcttgcatggacgaggaatggagaggagggctgtgtcaaaggagtcttcctcggcgatatgctcctcccacactcgtgctggttggccagcggatgtcacattggtttttcttttcttttattctttggtggacggattgacttgacgaccagcatctctgttcgtctcccgctacactctattgtaaatgggctatcctcgctacgacgtggaacaaaagaagtagcagcaccatgcaatacgaaacatacgaaggagtgacgcgcgacttccctatgacgttgagagcgtgaccccagacgatctactccctctataagtctataccatgatattgcttagcctgggatggcaat

SEQ ID NO: 41924 - DNA, 655 bp, Oryza sativa
ttactgacaaaggagacctagggtctcgtgtcagaggaactatattctaacctcgagttaataaccaacctgttgatggaaaagaaaaccaattaaactgtgttgggttaaaaagccaatgagacagtagttggggataagagtttgggtacgccttttacatatcaagataaggattgttggatgaaacccataagggtacccgccatgcctctacattgataagttcggatatacctacaaacagttaagaagatccaggagacatcaacatttgaggacatagtagtcgatggttggtaattagtctatcaggtatcagaaaagggtcaaaggtgatatggcagaagaacaatttggatgctccccatctcgaggaagcactaaagatgatcatcggcaattaaaccctagtggcatagatacagatagcaagcaatgtatttccctgaaggtagtcagtgcagctttttgacgaaccccgtcaaggtttcactgaaaggcagcaagccaaaggatctcatcgccaccagaagtgtccgcgacccaccttaaagagtaccacctgttagagatagcccgaaagatgattgatcaaggaggttggcaaagaggttctctagcaggaaagatgtaggccgaaaggtgattgata

SEQ ID NO: 41925 - DNA, 630 bp, Oryza sativa
aaatcttagcaccaagtcggcccgttagcatatgctcccatgcgtggacggcccacaattgtgagcaatgagatttgctgggccgaggaaacggcctaaccaacccctgggccatgacgtacacccagtgggttgggttgggttgggttgggtggcactagtaactgcgtgcatgcggcggacactcgtgtgatcgtgtcggtctcgactcagtaccacgccggcatatgctggtcccccgcgcgcgcggcgtacgtgtcccgggcgcgccgcacgccatccacgatcccatcgtcttccgctctctccacctccacgtactcgcgtttcacgtgcaaacgccccccgcgcgacgcgcgccttggagagggagggtcagcgacgtgtggggggggtctcgcctgcatgcgccgcgtcgcgggcgcacatgccgtcgcatgtgggagatcgccgcgccgcaccacgtaggggtgcgtaccggtgtcccaccctccatctgatccgtcgatgactcaaccgcattacgtgttactactaactaactacctcctcgactctcggatcatccaatcttctcgcgcaccaaccaactaaccaaacgccctcgctgcctctccctcatcagtcatc

SEQ ID NO: 41926 - DNA, 718 bp, Oryza sativa
ggggagttactaactttgccccaaaccgtgagccatatatatgtgtatatacagcggcccccaaattacgggctttgcttaacctgatcgcgacgcaaaattttttatccctgtgcagtacttctgggtggaaagatgttgcaacttgcaagcctaaagaacagtattttatgcggttgagtctggggagattaacgacttggtcgggtttgttaattgggtggacatttgaatattgctttaattagcttagcccacaaagaaaagctagagagagataccaggctactcctacataggagtactatagtttatcgtaccatccaagaattaatcaaagaggagatcgacagcaactgtactaacctggtgttgtttattttgatgattatgggttagctatgaccatcatatagttagaccatactacaggaggataaggaagaatctgcagggtgctacgcccagacagatacaaataattaaggtagctaaggtaaagctaaaataagctaggcaaagctcacatgccaaagccacacgtgcaggacacgcccaggatctcgaagtggaaagcaaaccaccaccactccaggcgaccgagacgaatggttaattaatttagtagtacacgatttagaaaaaaactactaatactagggtatttagctggtgtgatagtgctgaggctgctttgttgggtgtgtttaagcagaga

SEQ ID NO: 41927 - DNA, 701 bp, Oryza sativa
tctggaaaaaggagttggcagatatctggaatgtaagtcctctcaacatctctgtaatggttggtttcccatacaaggtatattcttcttcccccacagatgtattgccaacagacgtattcacattattcatgatactgacctacatcaacactacaggcatatcaatattgtaggaagaagtaattaattatttatttggcttaaaacccaacgggatttctgtacagtagaactctgagtgacataatagtcagtacatgaaaagtattttaaacattacactgttcgacatagtacacttaaaatgagaaggcaccaattacataccacttctggtatttttgtgatattgttaacaagaggctccaatagctctggcttataacatgatgtgacaaaattaaccatgacttctggagctccagtggtgatatttctggaaaattaacaaaaaaccaatgttcaaaagtgttcatcatgcaaaaaaaaaaggtaagaaaagaaatgttcaattggtaacaaaaggttaaaaatttatttgtttggggagggaaacaacatgacttgtttggtcatccctgtcctatcaaataaatttacttttaactgaacaattatagagaatgtgtttgtagaccgagatatttggcagcagctaatgaagccaaatgcactaacttcagtaacatgtttaaata

SEQ ID NO: 41928 - DNA, 755 bp, Oryza sativa
cggcggcgagcgggcatggcgcgtcgacggcgtcgcggtggggctcgagcgtccggagcttggcggcctcggcgaaggcgccccggcggatgcggcggacgcgggcgaggaggcgctccccggggagcgcgccgtcgcagagcaggacgaaggtggagccgtccaccctgcagacgcccttccccttgaacgcgagcccctcgcatgtcagctcgagcacctcgttgcgcttcgggaagtagcccttgcggggcgggggaggcggcgaggtggtgggggtaggcgcggggggttccggggagagggcggccgcgacggcgagaaggcggcggccgcggtggtgaagcgggaggcggcggcggagcggggagaaggcggcggcggcggcggcggcggccgtggccatgagggcggcgggtggtggcgcggttcggatggagaatggacggtggagatggcgcggagggagagaaaaccgacgatgatgctggtgtcaccggtggtaaggtgctctgtccaagagggcccacttgacagaatcacagaagtcacattatggccatgaaccctgctgtttagcaaaatcattactactcggagtactaccttttgaaatggggaatcttttcaaatactccaatttggattgtttaacgtgaagattccatgaagttacttgctcaagttttggtcacgctttctagaaacccatgctccctccatctcaaaatataataatttttaactctagaatt

SEQ ID NO: 41929 - DNA, 614 bp, Oryza sativa
attcctgcagcccatcactaaaatgttgatgagctcatttacataaatgagctcatcaaggcgatttactcctccatttaatttaaagcctgcaccgactgttgtaaccctttctgaatatcctgaacatggcttagttcatgtgtttgttgatattgctctgttttagactcatcgttgtaaattcctcaacaatatccaagccttcgtctcctcccacctcaaaactggcattaccataaccttgtcgtgccacatgatctaacgcctcctgataaaaccctgcggccttactctgttcatccatctgtttggctgaactaatcgcatctttcaggtttgtgccatcacgtaaagttagatccacgtaatagatcggggtacgatagctctgagtggtacttttgcctcgcaaggtcaattgcaatggcaaacacgaaagcaagtcacctgaagctgcatggtagtaacttaatcgggctgccaaagtacggatgctattaaagcctgtggttctaaagatgaatgtgccaaattcatccgattcatccaaattcacatagagtctgccatagggtttacagagtcctccttgcgccaatggacataagtca

SEQ ID NO: 41930 - DNA, 1600 bp, Oryza sativa
atcatggatggattaagtgagctttaaactattttttctcataaaatatttatccaaatcatgatccaattgcaccattaaatccgttgcaattaaatctttaaaacaagaccacacatgaatataacccgatgaaaaaaaagcttattattgaattgtttataaatgttgcatgatgttgcgccaagtatatcggaattgtttcactaggtagatcaaaaatgtttcatcggacgttgtttcaccttatatgaaaataatgtttcagcgaatagcgaaaggatgattcaattcactgcaacatttgatccatacatagtgaacgttacgagtacactaggtgaaacattttaaattgataaaaaaaaatcagatggtcaaatgttgcagttgaccaataagtgaaaaattaagttacatatggtgaaacaaaaaaatagcaactggaacatttaaatattttatgaaacatggtgaagatacacgttgaaacatgtcgctgatacatttgaaacaataagtattaacagactgaaacatatgcttttcttttatcaaaatataatcatacgatatcttgttgtaaagatttaattacaacgaatacaacggtgtgatcggatcatagattgaataagtaatttaagagaaaaatcattttaaagcttgctaaaatacatgcatatatgtatgaatgaggtggagagagagtagtagcaggtagtttcagaaattttgtgaaacacactgaagacgcacattgaaacatatccctatcacatatgaaacatttagttttagcggtttgaaacacatgtttttcttttgacataatataatcatatgataacttgttgtaatgatttaattacaacgaatacaacggtatgatcggttcgtagatcggataagtaatttaggaggaaaaatatttaaagagaggtggaaagaatgaaaagaaacagctaggcatgcatgttacggtaacatggttcgtccgattcatccggctgtcgatttgcagcatttttctgacgtcaacagagagaaaggagaaattagtaagtaaggagtgagctggtcgtagggtctaatattttttatctgatcggatgttcgaagagaagcattttcaaatttttaatcctactccagtaaataaaagtagcggggtgtcgctctacaggtaaatcatgtatgttagttgaggctgtgtttagttctacaccaaaattggaagtttgaagaaattggaatgatgtgagacggaaaaattgaaagtttgtgtgtgtagaaaagttcgatgtgacggaaaagttgaaagtttgaaaaaaaaagtaggaatctaaacagggcctgagttgaattgggagtgccagagtatacaattggcaaagaaaagaagtttacgctgcaccgcatctaccaaattaaaatatcctaaatttttgttttacctaactaaactaaaattgcctgctaatttcattctcaccattgacttttcaatttttattaatcgcaatttttcatttatgttattactaatttgaactaattatagttgttactgggaaactacagtcgcgcaaatgtgcga

SEQ ID NO: 41931 - DNA, 1811 bp, Oryza sativa
ttttttagaatttgtaattcattggattgatttgtgatgtatttcgtttagaatttgtgatgttttttttttagaatttgtgatgccaatttgatttgggtatataattgaggatatctaaggagcaactcgatttggaaaatcaaaatgtagtgagcaaaggaacaatgaaaaaaaagaaaaaaataggaaaaaaaatagtgaccaactgagtctgctgctaccatcactaagatggatttttagtcccgattatttcacccgggactaaagacgggtatctaaccgggactaaagggggttgtgaaccgtgggtaaaaaccctttctccagcagtgtttactcattttatgcatgcttatttataatttagttgcactataataattatagttataacgcgattgtagtgtactccccctcaaaatctaaggcagttttttacattaagacacagaaaaattaactcatctctatataacaaaaccaagaaactatatgtatacatgcattattaagatgattgattagatttcgatcaaaaatttaatttagtacatggacacaacaaatatgaccatctcatttagaaaaacaaaaaataaaatgtacttaaaactattggactaagggagtatgtaaatatatatgatgtaactatagtcattataattccattatagttatactaacaaagtacccctgctttgttactgtaaaatgttcatactaattatttgaatatatgttatacatttgatttaaaaaatattagactattatataatatcagaaaatatcaggtgctaatttgaaaattgtgaaaattgtagtaatagtgagctggtgacagaaccagcaacattactattatcttatacattagtatagactatagattataatttcatcttagttacagtgcacgtaaggatctgattgaatctcgaacttgatttagttcttctgcggcatgtacaacgagttgagccattaacacttgaataattgaatattaataattacaaaattttaaaatgggtttatttgatttttaaagaaacttttgtataatttcttttgcaaaaaattcaccatctaacaatttaaaaagcatgctaatgaaaaacggggaaattatagtttggggttgatcgaaaaaagaactcgcctaagtaggatgtaactatggcatataaactagtagtatatataatttgtctgtttccccccacttcatgttaaacaaaatgaatcaactgggggttcactgcattgggcagagagaaacgactatcctttgctaattgctagtaggcctaaaatctgagggatcaagtggcccaataatcggtctgtatactgctggatatgttcattaagcagtctgtatcccacgttactcctgtataaatctcgaagatgatagagtggcctaaaaatcgactcaaactaggcaaagaaaaatgttgatagaattttagcaaaactgtaaagcttttgtcaacttttctctaaaatctcaattgaattgttcattctatatgaatttcaaaggaaacgacactggtggagaaagaggctttactcccggttggaaacccctctatagtcccggttatacaaccagtactacgaatccgggactaaaaatacacatctttagtcccgggtgaaataaccgggactaaagatccatctttagtcctggttggtgtaaagatggttgagccacgtgactgacgcagacatctttagtcccggttgatcttaccaaccgggactaaagacttttttttcctccttcggtt

SEQ ID NO: 41932 - DNA, 1115 bp, Oryza sativa
gtgcccggctggtgccggccggcctctcatcccgccacctcgcgccgggccgccaccggccggcctccatcccaccgctgcttccgttgccgcccgctggaggggaggagaggggaggaggagaggatgagtgggggagaggagagaaggagaggatcctcggcgcgtaagatggcgaggagaaggggatcggaggagaggagaataatagatagggtgtgaggagaggaggagatatttatctcgatctgagtcacgcgtacgcctcgatttctctgcgcatgccgatcttttttcccggttggtgttaccaacctagtcccggttagtatattagaggggtctgacatcacctatccttttttgaaccgggactaaaattgatcacaccaaccgggactaaagatcaaaaagtagctctaaccttttcaaccgagactaaagataatctttagtcccggtttttattgcaaccgggactattgtggaatttggtcgaccgaccaaagatggtttctccaccagtgcgacaaaattcaatcatccgttttcatagaattaaaattctctcaaattaactatgttcttcctataaaataaaggggacctaaagttctcgtcttactctatccatctgcacttactctatccatctcttatttaatgggagacactagagtcttctctggtcgctctaacatcttaacatgcaacaacggaattgctaacattcatttgacaacaagcaatggtggatttctgttgaatcctccactgttagctcagctctgtaggatcaaataaaaaaaacaagtctatcagatgagggtgaatggtagaaacactaaaaaacctaaaagcttttagcggaaataaaagttaaccttaaatttgacgaaattgcaccggtcacaccgctagattgttgcaggtttgaccacagtactcccgtcggtctgagtgcttgcttgccaccggttcaaccaccgtcttgccgccaattggactacctccctgccatcggtgtgaccaccctggttagaccactcaatgaactccgctcaaatcatcaggacctagaaaaacatgtatcgacgaaacttttgaaagtagat

SEQ ID NO: 41933 - DNA, 1796 bp, Oryza sativa
ataggtgttggtttttagctaaccggcacctttgtggccggcacctgtgtaggtttttgtagtagtggttgctcatctgtaacacatagaaattggtggaagctcagggttagaaatgctgtttgacaggatagtatttgcgtaatggtgttttgatcagcggtgagttaggtgctacatttaggccggcacacttttcccaatctctctccctccgcacacacattttcaaactgcaaaactgtgttttttatgcaaaaactttgtatatgaaagttgcttaaaaaatcaaattaatccatttttgcaataaatttagctaatatttaattaatcacgcgctaatgaatcgttccgtttatgcgttgtgttccagttaggaacgaggaatggcgaacatagccttacactattcgttgtttttctgtttgatctttaagtttctgtatcttacaaaaaaagaagagtttacgatggtgtggaaggacttagctgcccaaacatgatagctttgatctgtattgttccaagagttgctaccgattgcaactaattcaggggccatttagcttatatgtatatctgtgctccaactcttcaccatatatggtcaatcagagcatctgagattggcaataacctattttcaaaattttgtttttgggttttctaaatttaatacatagaaagtgaaaatacttatctctctagaagagagcctaaaatgaatttctcaaaaactaaaaagtgggccctgtatcacattaccaacggaatcccgttatcctcctcacgcccaaggcccaacccctgaggtcgatctcccccatgcgctccattccccttccctcgatctgtccctgatgcttatctcatcaccacccccacccccacccaccacaccgtcaccacccgcatctccctctcatcccttggccgcagcaatcaacaatcagtagtaaacaattagcactatcagctcagcaatcaggacgaataatcaacatcagcaattcaagtagcagccataagcaccggttcagctgcatcagaaaacaacagcagcaccagcaacagcaacagaccatgatcaattatcaactccagcagcagaaatcaacatcaacagcagcagccttcaattattatggttaggttgagctcctcctgcttgtgcatgggggtcaggtgggcatgcacctgagctcctctcttgcttactgccaacatgcgcttcctgagccacacgagccgagatgcccactcgccagtgatctcctgccatatttgaggaagatgttgccgacggtggagcagcttgaggcggcggctgacgaggtcacgagaaactatgtggagggaaatatgtttgctaccgcgcaagaacgagtcacgagcagcaggaaagcagcggattgggagcgctctatttgtttagatgaatgaatgaattcagaaattgcatctattacacatagtcgagaaactatgtgtaacactaggtcagcatgcatctatttgtttagatgaatgaatgaattcagaaattacaactcatcttccgtgcagaaagctcatttcggtcattatcaaaaaaaaaaaagaaaaagaagaaagctcatttccgtacaattgtcatattaacctctctaaactctgtgggatagttgagaaattaccgcgccacgtcatcctgattttgcaaaaaaatgttatgtggatctacttgaaagaccagagacaacaaaccactaaactgaaatgcaataattggcccccatgcaaattcatttgat

SEQ ID NO: 41934 - DNA, 4247 bp, Oryza sativa
ggtattggtacatctatctccagtcaaacagttgcccatttctgtttgctttctcaagtagtagatcctaaattcgttggagccttggaggacggatgcccacactgagatttcagtcctggtccagatggtatactaaaaggaaaccgatcaacattataatgggtaaaagatcatttttctcctcatcagttcgaatttgcagatttagctgaactcgttggatgttggacagggcatggtgccagcaggtaggagaactattttgggggctcgttttattgtggaagattaaacgaaaaatactttacggcctgtttggttggagggagtttttaaggagggattgggagtttagagagatgaggctattaactgctttgtttggttgggatacatgagaattttggtggaatggggatggggaattgaggaagaaactccctctttttagtacctgggtagtaggtggtaattaggagggaattcctcctttaatttgcctaaacaattctcagccatccgttttcgttaatgacttaatcttcaactaaactccctatcaatttccaccacctctaccaaacaagatactgggattaaaaatcaaattctcaccttaatctcaccgtcaattccctcgtgtaaactctcaaccccttccctcgagttgccaaacaagccgtacatacggttacggcttcgggtgcggtaatcagtaggtaaagaaatagggctaggtatttgtttttttgtcactaccacacaatcgatttttccagatgagaccccctctatgttacaggtggaccataactactcccacatgtgaaaatcccttccgcgagggcggttcaagaatcgcatgcgataataaacatatttcttaggcccgcgtgcaattttttcacccaactctatttttcccatctctctccgtctccatcataccctttcctctcttttgtctgagtctctttctcctcccatttcctctcattcctcataccacctctcctcaccctcacacatgacaggagaggccccctgcgggtgacgatgacaggggagactaccggcctcgagcaaatccgccaatgccagcctccctctccctcatagatccggttgcgatgttaggagaggtgcggatccgtcgtcgccagcctcaccctcctcatggattcagtagcagcagcacggggacgcgccgatatagtgacaacaacaatgacgacgatgggatgcgcagtcctccctcgcagatctggtgatgacaacaatgatagcaagccatcgggcggcggatctggtgagcccggccctaggagggatggatccgcctacgtcggcctctggtgcagccgggtctcgacgacgatggtggcggcggctaggacggatttgggttagggtttcgactttttgttttatttttttcactaaaattttgtttgcaagtgatcggcataggtgactgtatgcgaaaatcctatttttgcttgctgttgcgctgccagcatagaaagatgttgattttcgcatatacctaggtgcatgcgggccacccagccgacaacaaaaacctgttttagccatttgcaaaaattattttttactagcgtgttgggctagaattagctgcccgtttaagtgtacagtgatgatgatgtgtagataactttatcgtgacgttttaaattattatatttattgaactcgaagtatatgaagcaactagttaagtgtttgttggtatcaacatttgttgagcattgtaacacactcaaaaattaattttagaaaaaaaaacatgttaaaagttttatatttaaatgaacgtttggctttctatcatgtgttgtaaggcttcctttcattttttttgtttggtgtatgagaaaatattgaattaagcctaaaggagccaaaagccgctacagaaaaatgcagtaataatgatgatttcgccagtgtttggggtggggaattcctcaccaaaggcggaacaccaacagatgatctcctggaaaggaaaaatgttgtcttgctccatctctagcaggtccttctccgcattagacatgtcggggatttctctctcctctgtcagttggaaaggaaaggggaagctccgatctaggttttttgggtgaagattgacgtgggagctaaaggagtatggaatgaggtgctgcgccgcgcgatttgtgtgaggtttcggaggtggaggcaaaccctatgattttggtttcagcaactgaatgcaggcggtgaacaagagtgcggaaggggaaattttcggagagaagatgaagcggtggagaaaacggagatttatacacgtgtcaaggtttcggctgttgtactggaccaaggcttggtgcgtttgcatcacattcaatgaacaggtgcggtagagctgcatccttattgggccttggtggttattgcttcggcgatacatgtgcagtatgagcttgataccttaaagaattccttattccctgcaaagtggttttctatcaaggtcaatgcaatgtgatttttgagggaccaaaatcctttttctataaagttcggtgctgattgatgatatttcttttatataagcgatagttgccgactgctacgcgtattttatgcacggttggcctagcgctacatgatttttttctgttaattaagtcgtagttgactttgaactatgcacggttggcctagtgttatgcgtgtcaaattattaataggagaatggtatatcactcgagcaatagcactcagtgattggcaccacatatgctttaatgcaatatgaaaccactcgaatggttatctctttaggattttttactatatgtttagttgagtttcaactaatcatatagtcggagctatacctattaggtgcatctatttagagctagtatgggtaactatgctttaaaagaatctagggagatactttaaaattaagggcctgtttagttcgcgaaataaaaacttttgggtgtcacatcggatgtttgaccggatatcgaaaggggttttccgacacgaatgataaaactaatttcataactcgcctggaaaccgcgagacgaatcttttgagtctaattaatccgacattagcacatgtaagttactatagcacctatagctaatcatggactaattaatctcaaagattcatctcgtgatttcctccctaacttgcaattagtttttcttttaatctatatttaataatctatgcatgtatccaaagatttaatatgatgtttttggaaaaaaacttttaggaactaaacggtcgtaataacctacgttggacaggggcttggaaggcatcaggagcattcgatatgccaagtctttattatgcgcggaagggcgagactcaacgctgtcatggggcagcgagctcagagtgctcatgagagcaagtttaatactatagccaattattagctctaaattatctatagctaatataatagccaattcatacaatagtttcttactatactattaatatctggtcctacctgtcactggtggagaagtgctttttagtcccggttcgtaacccccctatagtcccggttttcaaaccgggactaccaatccgggactaaagatcgctatctttagtcccgggtgaaaaaaccgggactaaagatcgatctttagtcccggttgatgacagcggcagtctatcagctagtccttttttcttttttattttctcccgaatcgagtggtatgcatatcatcaaatcaaaccccaaatccacatcacaactccacagcacgattcacagattcaccacaaattcattcacaatatccattcacatattcattcacaacatcacaaatatattcacaatattgattcaaaggttcattgacaacatcgagtcacatactcattcacaacatcacagattcattcacaatatcgattcatagattcattcacagatcaaaacatccaaaccacaaattaaaaaaaatcaaaaaaaaaaatcgactcactggccggcctcccatcccgccgtcggccggccacccatctcgccgcttcccctccggccggatctgggggaggggagggcgaggccgccggcgaccggcctccatcccgccggcccgcgccgggccgccgccggccgtcctccatcccgccgcttcccctttggccggatctggaggaggggaggacgaggctgccggcgaccg

SEQ ID NO: 41935 - DNA, 514 bp, Oryza sativa
ccccttggctggttaaaggcgcatagatatgcagacagggagtgcagttgcaattcatacctctcctttttacgacctcaaactggagaatcttctcaaaaatgtcagcttaatataaagtcattataattactctctccaatagtccaattccaagagtaaatcattttaaacttttcactcttctataaatattagtagctgcagtaatttgatgcacctgaccctcctcttgtatcccttgctaatttcatggtatcccccattaataaatgaagtatcattttcaaactacaggacaaggtcattcattttcttaattcatgtacccatatctaaaagattaggggattaatatttggcatgggtgtcttaagggaaaaaatagcaagtatactatcaacaaggttaaatatgataaaaggaaaagagagagcatacagcacgcaatttcacgtatatgggatccagattcgatgcttctaggttctttatagcactggtcaaccactca

SEQ ID NO: 41936 - DNA, 1092 bp, Oryza sativa
ttcatcctggtagccaagttgataccgttctatagcgaattggtgcggctgacaaacgcctgtgagatagggctcttcttgtgtgctagcattgatgaaacgcctgtgacagatgcatcgatagaatcctccacacctatatgattctctgttgagtaaattgcgcccgcggtacacaaacttgtaaggtgggtgcaatttagtgtaaaaacttgaaaaactctcttttcggtacacaaacttgcgtagtgcgtgcgaaccaaggccaagacatgacttcatcaccaattttattgagttggcttgtgattaggatgccacattggcgcatacacacgttatgggggcatgagttggctacacatatttgcaaataacccctcatacatcttccaattcctccgaatcttcttttgtgttgtagcccacgatgatgcccatgctagagatcagtttcacgatagcctaccgccaattgagtttgcaacaaaaggagataaatcaggagattgatatttggatcaaggtggaaggccgcgaattggatccaggcggtaggactttgctgggagaaaacacgccggccacgtttagggcagcggtggtaggacgttgccgccggcgctgaggcaacatggtgccagggctgcgaagtgaaggtgcacgatctcctgtatacagtgagtactttagtttatcatggtcaaaaatgagattgtctttctcaattccaatttttgtggagatttcttcctcttattgtcgatttattaggtattgcaaacgagaaggactatcagttgttttaatttatgccaggagctagttcatggtacacaaaagctgtaatttttgttgacatttatggtatagaagtgatcatggcaaatttgtatttttggagagcaatttgatcattaatgtactgctagcttctgttgttaactatgctttcttcctggatatacccttaaacatctgaacctaaagtaaactgttctgaagatgaataattatctgtacacaatatatgtagattccgaagatgaagaattcagcattgagatgcaccacggaggcttttttatggga

SEQ ID NO: 41937 - DNA, 1643 bp, Oryza sativa
tatattgctaattatatttttctatggaatcacgtattggtcagcacagaataatgtacttactaaaatagtgaatatcaataaaaattgtttaactaaatttgaatggatcttgtgtcaaattaattagtgatatgaggaaatttgagccattttctcgggatagtatttgtcttgttgtatgcatttgttcgttcttgaaattctgtgaatgattcgtttttacttttccttttcaagtatgatcatctaaaaaaaataaaaaaaaatacaaattaatagttcaattacgttttctaatgccattccccctatactgcaaagtttacaatgcatcacatacatatttgagaactcaatttgaaatctttaaacaaataaatgcagctatatttttgttaaagcacaaataatttagaaaactatgctagaaacacatcctaaaactaaacatatgtactccctccgtcctataataggtgacgttttgactttttatttgcaacgtttgactattcgttttatttgaaaaattagtgcaaatataaaaaaagataagtcatatgtaaagtacttttgataataaatcaaatgataaacaaaataaataataattttaatttttttttaataagacgaatgatcaaatattgataaacaaaaactcaaaaagacaagtaatatgggacggaggtagtatataggaatatcgatagacatataagttagttagagtacctatggattagttagactatacaaatcgataaatacctatgtaaaacagaagggatcttcttaacggcaaacggaattagttggagcaaatcgacgggtaccttcttaattaatgaagcaatgatcaaacatggatttcttaggtacgaccggacttgtcgaagtgtgggtaaatatttcaacacctgatcgaaattcatacctaaatgaatttgagccatgctggatgttgcttcagaagcaaacatgcatgtaaaaaacaaaattagacagaagaagatcaaacctaatcaaatcgtgtcgctgcctaagagaatggatgtgcttgcccagacgtgatgggtttgtgccagcagttgcggctggtcctctgatgcagaaggaaaaaggactcccagcatcacctttgcgtgacgtgagaacgggatgccggagagaacggtcatggccatcgtctgcgcagatcgtcagattggttctcaatgtagcctgccatacgcggatcaagcacgtgcatcgcaaagatcctccgtctgaagcaacatgagaatagtctcaagttgggcagtagaaaggtaccacctccgtctgattttaagtgaagttgtattctccatcttatttaatttttttttatgattaatattattagatgataaaacattaatattattttatgcgtgatttatttttttattttttcatattttttagataagacggacggtcagctgttaggcagtaaaacttataattgcatttaaaatggaattgagggagttgatggtattgcatacttgcatgagctttttataagtaacaagaaaggtagcccatgcatttgcgcgggcatgtatcgtatgctatatttgatgaatctataaatgtgaaatatcatgctttaa

SEQ ID NO: 41938 - DNA, 4362 bp, Oryza sativa
cattgttctaggagaggtcacatcccaaacgtctaatgggcgatcgatcacccgacccatctggtagcgatcagatcccctcccccctccctccctccacctggtttccttttttggcaccgcattactttcctattttagtaaatttatgcatctaaagtttaaacacctcaagtttacacatctaaagtttagagacccaaagttcataagtcaaaagtttatataaccgattcaaatttgaatttaaatttaaatattttctatatatagtatttctatacatctaaagtttatacacctaaagtttatagacccaaagtttataagttaaaagtttacatacccgtttcaaatttgaatttgaattatatctgattcaaatttaaatttgaattcaaatattttctatatatagtatttttatgcatctaaagtttatacacctaaagtttatagacctacaatttataagtcaaaagtttacatacccgattcaaatttgaatttgaattatatctgattcaaatttgaatttgaattcaaatattttctatatatagtatttctatacatcaaaagtttatagacctaaagtttatagacccaaagtttataagccaaacgtttacatagccgattcaaatttgaatttaaattcaaattttttatatatagtatttctatacataaatttttctaactttttttttaaaaaaaattgtgtggtgtattgtagtaagaagagaagaaggggagaagaggaaggaggtattgcctatagaggatggggggatcgcccattacaaccccgtcacatcccctcctagttttttttttttttgacggagggagtatggtttatgtgattcaggctggagctggatagctcgtgtgtgttgcttacattattgttacagtttgagctcagttttccattaatttgcttttgaagactcgtttcttagtctgatgaactgcaaatttgtacactcctccaagagtatagaatatcgctccacaaatttttttcttctttttccggcgcacacaggaggaaagtattattttttaaaaaataatgatataatctaatggtctaagatatcgggtccaccaatttaagtgaaaatcaatggtgagattaaacagtgccatgtggcgatttaggtgtatttgtaggagtgccgcgtggcagtttgagagcgtttgttggaggtttaatggacttttagtagataatagataatagatagaagattattgtgggtgggctgtaacttgagactattctctggagatgatctcatatattgaaaaaaccggatccaactttaaatatagagggcattggctccttttattaattggatttgtttagaagtgaaaagggacatgacaacagttcacccccatgttcctttcattaattgaatttttctagaattgaaaacggacatgacaacaactcacctccatgttgttgatgggaaattggatgtctctttctaaaatattgctatgtttatctttatcttcaaaatatattctccgcctacacactgcacccttgtcttgacaaattacaatcatctctaatttaatttatctatttatctttcctattttattttatccccttccttttaaaaagtctaaagttaactacttcctccatctataattttagcctaataatttataaaaaaaaatgtacagtaaaatgtactagacatctataattgtactttattttgttcttctcgttttaggcatcaaaccttactccctccttgttctctctctttgtttcatctccgtgttaattagttaaagatacggtagctttttaatgtcctgcttaatatattttgattagctaaaattatcgtcttttgtgacacggacgtatattttagaatgatgacaataatatttatggaacaacggatgttgacggtttgaagaacagaggtggaaggcgccggcacaggctcttcgtcagaggtggacgaggcgtcggaagcgccggagctgtgcgacatggctagcaagggagaggtagcggaagactaagatcagagggtcactgataccatgtagaaggagatttggatcaaccgtaactttcattgatcaatggagcttatatttatacatgtacaacaaggcttgggagttgcctgggcctaactaatcccctgatctaagggacgtgcagcggtgcgagcggagcgaggagcgcggcgtcgtgcgcggggtgcgcgtcgtgcgcgtggagcgcgcctcgagagtctgacgaagccgttcgccaacagatatcttgaacaaaatcacttatacggtagctttttatgaaacttgcacttgttaaagacacttcttgaaataggacgcttatcaaaagtgtttttcggattttctctttatattataaggctttggtactagtcaattcacaagttgataccttgattataaggggcatgtatgccatcacccaactacagtactgcccaccaagtggctgccaaggtgacctgtcccggccgagtcaaccggtgtgatggaataataatttggttaatcaattcacatgttgataccatagtaaggagcatgttaccgtagtaaggggcatgtatgccatcacccaactacattactgctcaccaagtggctgcccaagtgacctgccccggcctagtcaaccgatgtgatggaataataatgtggtttcgccgtacacaagttgataccctaacggtaaggggcatgtatgccatgacccaactacagtactggccaccaagtggctgcccaaggtgacctgtcctgtcctagtcatcgagtgtgatagaataataatgtggtttcttcttcgatgagaagattcttttgagaggatatcctctcgtgtaactttttttttcaaatctatccatctactatatactaaaagtctactaatcttcctataaacactctcaactcgccatgtggcattctacaaacactcctacaccgccacgtagcgctataataaattagagaaattaatagaaattctaaggaaaatagaaaacatcgtactgtaccattgattttcatttaaactgatgaacctattattttagaccattaaattattagatctataaaaaaataatatctctctcccagtatacaattgacgtacgagaggaaatccttgcttacaattcatcgtcaaaaaaaaaggcaaaagatatgtcagggttatagataacacatacccaatagtagttgactaagctcggcaggaccaccataataccaagtcttatacgaaaccataccttgtatatagaagaagttcgggataaggaaagacaagtagagttctacatgaaaactataaggaccatcccgatcgtatccatacttatctccctagttctatttgcacaatgagacatctatgggtataaatgcaaggccccctagaaggagagagggacatacataccaagacaagcctagacaaatcaacaagctcagtcagaatagacactaatacacatcgccagacatcgacatcagagatcagtctacacagacccaatttggtgccatcaaaggccgacaatagggaactagtgctttctctaatgttaccaagtacgtattcgaggaggaagattaccccaccgttcactacgtgttggtgctccatgccaccaagtcgacgacgactaggtaggttatctcaaatattgtgcttgcgtaattctaaagaataagagcaacatcggctttggtcaacagtgttatatttaattgggtaattgatccatttaaatcaattaaatcaaataaattccaagcctcattatgttaggaattcatgtgcattcattctcttatgggatatcaatgggatgaggagttttcagaattaatccatttgattagggaattgataacttatatcaattacgcctaattgatggatggttgatgcttgtgtagtggaggatggttcatgactagttaatgacaattagttgctctattccttttcctattccattggtaacctacatcaattactcataattgatggttggttgatggttgtgtagtggaggatggttcatggctaattgatgagaattagttactcttttcctctttctattccatgactcttactcttcatcttccattccacatataaaatgagaatggatttgatctccctaagaagaagtcagacacactttcatccatttccaaggctgttgctgctacggtaatcccatcccgaagagtgcgtgcacacacgttgggagacttggtctctgaaaccacgcactgctg

SEQ ID NO: 41939 - DNA, 1897 bp, Oryza sativa
cgacgaagcacggggaacacctcattcgaacgaacgagtgaatgactcaacaatggctgcggctaaaccggtgggctagacacgattcacggtaaagccccggtacgacaaacgataggccggtaggaacctagggttgcacctacggctagacaactcaattaccgagcaacgggttaaagcgacggctaggtttaagcggcacacaactgtgacacggcacggcagcagcagcacagcggcgacaaggcaattagcaatggcggcacagcagcggctactcgatgacacaaacgagagattaaaacctaaaccgagggaacagagatagaagtctcaccgaagcaaagcgattggagagggagagatgacgacggcgacccggcggcaacacacggaaacgatgacaatgctagacaagcaacggattagattgaatttgatctagggtttaggtagacgtggcaatgataagacagccaagcgagatctccggataacgaacacaggaacgacgatcaccggcaaactacggagcgacgataaaagggaggacaccgggagaaagagcgcaaggcgacggtccttaccaacacttacgagacgacagacggcgacggaagatggccggtgacaagcttcgaagggcggcgaggtactgaccacggcggctggagcggcggccggaggtggagagagagggagctcgcagggagagcgattccggcgatggaggaagacgggacttgagaggataggtagaggacgactagggggtcctttatatagccatgggagcccaggatcgagcccacatcaacgggaaaaactctggaaagtttaggatcttcgtcggaaaaaggatagattgaaccgcgaaattggaaaggatttccatagaaacttttggggatttcgtggggaaattgtagaggagattgagaggattccgttcccgcaactaatttggaaaaaggagcaacggggaggccggattcggaaggggatcggcacggctgcagctcgggacggctcgggcgctgtccagatgttgaagacaacactgtagcgagagggaagaaaaacagacttctatgcgggctgagaggaagggagagagaagagaaggaaatgggttgaaaagggcccaagctgaggaggaagattttattacttttccaaatatattaaccaatgagatgatctttcaattgttaaaaatacttccaatgcacaaatagttccaagaaaattcttgaacatacttggacactcaaagtatttaacaaaactgtaaccagctcatttaatgattaatttaatatgtgaataattactgaaatgttctttgtattattaaaattattaaaaatccgagaaaattccagagagtacaattaatcatggagaatttaataaaaattaaatccaaccatgctttatatttaggaatttttacttcccacatttaacttcacttgtaaattaatgaacatttaatataaattctaatattaatttattaaataatttataaatcctgagacaggaaattcaggctgtgacattaacagtcttcaccgaaacagtggtatataaaagctgctatggaatagggagcattctcaagagccttaaaatttggtggggattgttagatttaattggttaattgatccatttaaatcaattaaattaaataaattccaaggctcattatgctaggaattcatgtgtattcattctcttgtgggatatcaatgagacgaggagttttgagaattaatccatttgattagggaattggtaacttatatcaattactcctaattgatggatggttgatagttgtatagtggaggatggttcatcactagttgatgacaattagttgctc

SEQ ID NO: 41940 - DNA, 768 bp, Oryza sativa
aaacacacagagagaaataatctataatacaattgcaggcgctcacaacacgcgcacactcacctctataaacatgcacacacacatcctacccctataaatatctcctaaagactgggccgacatatcttgtgatcgacgaaatcactacgagcgtctcgttgccaacggatatgtcagcattgatggaataattagccgtaaatgtgagctcccgtgtcaagtctaagacttgaatccgggtgggtatgttccatcataaggaacataaccagttaagctacactcacttcacaataatattggatattaaaacaaccataatttttaagctacatttttggaatactactatgccttttaaactggtggaaccattattatttctaaccgttatctatgttatataataaacaagcgtgtattcatgggacatcacgtttcaaaaatattactgcacaactatatttcgtcattatcgtattcatgttaggttgtgtgagcctctggcccattctaaatgaaaatgttcatggatggatcacctctcaaactacatcaatcatattaggttatataaacccatacatttagtgaagcctcatgtctcacccaattcatcctctaataaaccatgataatatatgcaattaaagaaaagaaaaacacattacttttactttcgttgacatattttctaaagaaaataagattatattcttttcaaaagatgaagaatattataaataattgcttatatatattatt

SEQ ID NO: 41941 - DNA, 785 bp, Oryza sativa
gactataataaagttaaatatctacttatttttatatattagactaaaaattatagttaaagatatattttgaagactataacgttgtctgaaacatcatagagccagagcgaatagtacctctgatatgggcactttattaaaaaatatgaagattggaagttatcctgaagtcgtgatatatcatagttgtcattgttaaaaaaaaagttaagaattgtagactgggtgaatagtatctcgtatatctgacactgccattgaaaagatgaatatttgaacttatcctgaagtcgtgatattatatcatagttcttcaacagattgatcgagtgattggtacctaaaacaatttccttttgttaaagcaatgccaacggctgacaaatctaccaaaatccgctggtaggaaatttgccgtatctgcataacatttaatttttaatatttaatacatccctataggcaattatttgtgcaaaagacatgtcaaacaaattaagcgtagattaaaagcaacgtattttcctaaaatatattaatgtaaatataaaatatatgatacatatataaagtagtttttatgataaatataatagtaattttgacttatgataatttcataatggagggagtaatttttttagaacatcacttatagttgggtttattttattttttatcatcatagatctaatttgattattatgaagtgatacactatggtaaaatctactactataccattattattttcatacttttttataattgcttgaatgtgt

SEQ ID NO: 41942 - DNA, 2891 bp, Oryza sativa
tccgcccgccggcgcgccgccgcgagtccgccggccgcccgatgggatgatggggagggaaggagaggagttagaggagaagttagagaggagaaagaggaagggatgatgggggagggaaggagaggagttagaggagaggaggaggaggaacaggaagagatgggatgaagagataaggtcagtggaggaagaggtgaagagataaggctgcccgtctcctcctccttgatctcgcagatggcaggtgcctcgtactctccgccacgatcttttgttttggttggtattaccaaccgggacttaaaaatagatctttagtcccggttggtgaaaccaaccgggactaaagatagtgggcatcttttttcccggttggtgttaccaaccgggactagaaatagatcacaccaactgggactaaagattaaaaagcagctctaaacttttaaaccgggactaaagataatctttaatcctggtttttattgcaaccgggactattgtggattttggctaaccgagtaaagatggtttctccaccagtgtcatgaatcctggaaggaatgcttgggatgaggagattgtcaaggtagcttacaacgatgatattgcaacagaagttttgctggttcctatatgccgtcatgggggagaggattttgtttcttggccacatgacaagaggggttgtttattgttcgctctgcttacaacttagtgacatcaaatttatttgtggtggcccagagctccaatgggagaggataacactgcagcgaatgtggactcgctgtttaggaaggcacgttggaaaatcaatgcaccgggtaaaatgttgatacatctatggaggtcagtacatgattgtcttcctacagggttccaactcaggagacgccatgttcctgctatggagggatgcatcttttgtggtcatgatgatagaattgagcatgtcttccttgtttgcccctatgctgcaactgtttggaaagccatcaaggagaagtttcagattaacttgtgcatacgagaattatgcaatacgaggcaatgggtgtttgatttcctaacccgtagctctctcattcagaagacagtcctggctgttactccgtgacacatatgggaagcgggaaatttttctaggaacaaccctgttacttcccacccgtgtcaagtgattcacaaaattgtgtcgtatgtagatatgaatgtgcagtactgctccaaggaaaggaatgcctctggtgtgatctctctcccttccagttacaaagtgcaaaccaccgccagcaagcatggtagtactacttaactcagatgctgcactcttccagcttctaatcagacgggtttggcctttgtaattcgagatcagagtgcctcctgcctgcttgctgcaaacaagaggataaccggattgctctctccagaactaactgaagctttggcgatccgtttcgccttggaacatgcaaaggcggaaggtttccagcaagtgttgatggcctccgattgcctttcagttatcaagagaataggcacgagatcgttcaagtgtcagcgttgttgtccgtgatatcaagaatttggagactgagttcctggaatgctcctttattcatgtcaatcatttaaccaatgttgcagctcataccgtagctcgttgttccgaatctgctacatgtaatatttttcgttctgtaatccaggatcatattcgggaggtacttaatgctgatgcaatttaatcgatgaggtgctgcctttgtctcaaaaaaaaattgctcaagaggctagccttttgcacggtgggcatgtacaagctactcctgtggttcctatgttaatttccaggtcacagcacaattctgatcgatatatcggtatatatacagctcctatgtaccaattgaatgcagataaggcaaattgaattgattgcagtgctcaccgtctgtaattgaaactcaatgttctgaaagatcatgccacttaggggtggacaaaaagtttgggctcgtgagctcggctcaagcttggttcgggctcacatagctcggctcggcacgaaagccaaacaagccaagccgaagcttcctagctcgtttccgaaacgagccaagaccgagctagctcacgagccattagcgagctcgtttggctcagtatattagggtcatatacaaaaattttgcaagttttctaactatttatttattgaaaaaacaattttgattatcatattatctatttatgtgttgtgatgatatattaaagaaaaatattactttattacacattctatgtagaaaattgttgatcgatttctcttacacctacttgagatttacttgataccaggctcgcgagccagctcgagcccattaacgagccgagccaagctgcatttttagctcattgtttgtagtgagccaagccaagccgagctttcttttcaccaagctttcacaagtcgagccaagtcggcttgtttccacccctaatgccacttaatatattacaaaaagtgatcttggaaaagcagcaactttaataactgaaacaatcaatcaatacaattacagtacttgatcaatggggtggatgtatatatgcatcgatcgtgcacgcactatttgttgcccaacaacgtagtgataactgatttctctatctgtcactagttttcttatcaagaggacaaagaaaataattagtgccacctacagcctacaacctttaagtttaatttttcacttaaatgatcgttgattattcattcctatgttcacatcattgattagttggccatcaaattaacagtttaaagaagaactagtagacgaggtgagctcaactggtgatatagaaggcgacactga

SEQ ID NO: 41943 - DNA, 3330 bp, Oryza sativa
agttttattatttaaaaaaacttaggataaacatgttcatttccacatggctactttttattaggaattactcatcgacagatcaaagctacaaaatgtattcatattgggattttctcctattattggagaggtatacatctcatacttgacatatatgtctccttttatcttacaggttggaataggatttagaaacttacttcgccatcgaaatataaatctatatatgtacaatattacatacaaatgtatctttcctgagatttcttggtgagattgttagcttgataataatttttcctgtgcaacaggcatccatacagtgtgatattccagcagtgagcaccattgcaatgtacccatagcgaggcaccattaacaccaataccgttatacaattttttcctaatgcctcttattactacagcattgtgttgatcgacattgtttttgaaccacgttgtttataggtatattttctctctgcaggggaagaagaaaggaattataacaacgatattaagaaggaatgagatgagaatatataagggagaagttataatagagaatagtagatatgtggaggttttgatcgatgcttttattacagctgacgtcaggaactgccttgattgttcagggagtagatgttgggttagaaatggtctttgtcactaaagaaaatgtatttactaaactacattcgcatgaaaaattggaagcaatgtctgaaaattttcttctcactgatcagcattgtggtctatgctcctgtataggggtaaaaacagtcacagaaattcccgattaaccgggcgttgtttccgtttaaggggtacattttccgaccgtaccgtttttgttatttttaaatttctttttgtctaatttctttctgcatcatattaatgtcgatactgagtagtttaaataataaatatggtcaattaccggccgatcgagcatcgtttccgaagagatactaccaattccgatcgttttcaccccctactcctgtatcattctcttccatctccggcgacctcgacaaactctgacataaaaggcagcatccccaagcagaaaggttttagggtaggtatcggaatgggataccgggtgagttcaccggtttagaggaaggccaacgggtggtagagagagcagcgacgaaggtagggaatcaaaaagagacagcaggatcggcttacatggtttttgccttttctttttttgacagcggatctgtaatagatgcagctgctgtggcaactgtaacgactctcctttttttcatccagggtgactagtccaatacaaaaggttgagaatcaagttttgaaagagtttgtgttgacatattatataaaaatgattacaaaacaaaagaattttttcaactatgtttgatgaaagtagcaaatctcaatcctctttaaattccaaacatcacgatgataacgcactccatgcatgaaatttgaagttaattatcatggtttaaattaaagtcatgttcacataacttcacctccaacctctaaattcaccagcaagctctagtgttcctgaaaaatacggaacttcaatgggcaaagaccaatacataattaaataaagggatgttcgtcctgagtgtctatcaacctcaactactttatttttggtggagtttgctctggcttatgatactgtcgtaaaaacttgctgtattgcaaaatccaaaccaagctggtgctccaaacatgctgtatagaccagaaaaaaagtattcagtatagttattacaagatatgtgcttcataatctttccttcgaaatgagaaatatttaaaggaaaaattaaaatacaaaatttaatggaagagaaactataaagcaacagtaattaaggtaatgtttacaataacttgaacttgtttttccttttttttttgggatccataaagaacttctaatcttctctgtgtagaaaaaccaccacacaaattaactctgatattgcggtttcacccttgcatccgggtcccaggtcattttataaaatttacaacattacaattttagagtttgatccgactaacatcacatcgaataaaattactctcactgttacgggccgatgggagcatatgcagaatagagcacagctaccttgctcaaagtttgcaagaaccaacgccaacgggtggcatgcgtgcagccattgtagcgaatctctgccaacccgtccctatgtgttctactactcggcaccagtacgtgcttggaatgaccgtctgttggtgtgatgggtggaggtacgcatggctgtcgtaaccatatcagcgagcttccatacatcggaggtgatgcttacaagccgattttctcagacaaatctgtcatatctgtgcatcaacgattcccggcgcacccatacgcaccgtgtatagcctgtatagtgacgaggtggagcacacgatttaatagagtatagcaagcatgcatcatcgttcccttgctttaatatatgcatattgtactatttatcagcattagtaattcactagtaacaacatgattgcacacaacgctccacgaatatacatgtatatattgccatccatgcatgttacttttctgaacatgaatatatatgcatatattcccttcttcttgttgaaagaaattttaaaaaaaagtataatagattttttatcagctcaattttgcacataagtctatggagtgttttcccaaaagtgagtttgggcagtgtcctagggctaaaaccatacataagcagtgtcctgtagcaaaatttgtctttttaatttttacgttggttacttcatttctaaactaactaatatagcaaataaatgagaatggactgagtatgtgtactaaattggtgtgacttgtttacttctttctttggagattttcagaaagatcacttcaatatgttactcttaacgtaaggtttccatggctttagtggcacaatgaacaccagtctcttaacataagttcaaactttcactatgacaagtttaattaagttccctttctacacatgggcctaattatttggtgtcttctcatacaccaaactgaaaaaaaatccactaatatacctagctttcagcacaaccgaaatccaaacatgcattcgaaattttaaatattttaacatgatttatttttcaaatattatttttaggtttcatgcaatgttcattacaatgtgttgccatgcacggacacacgtatagtttctcttcatatatctccaggtctttaaataggcgcaatgaatcaaagaaacaaattaaagccaac

SEQ ID NO: 41944 - DNA, 1835 bp, Oryza sativa
gagggtgtttctgcggagctaccctctccagtgggactgggcgtcgccggcgccgggggagaaggagaagcagcagcagcagcagcaggtgcagggcgtcgtcgccggcggcgacggggaggaggatgacgatgagtacggcggaggaggaggagacgagcgcggcgggaggaggtggcggcggcaggtggcggtggcggtggtggagtggggggaggagaagctgctcctgctccggcgggtcaagaagaggctggcgctctacctcatcggctgccactacgccggccaccgcgccgcgctgccgttcaagtctcctccgctctcctgcaccgccgccatgctcgcccctcccgctgatcgatcgatcggccgcgccatggcggacatgcccatacccaccagctagctttgcaatcatcggtcggtcgatctacacaggttaatttcgccatagctttcgaatctccacgtacggtgctctgattatgtgcatcgaggatatgcatgaggattcatcggtaggccagtgaacatctcaacatggcctgtctgtacgtgtatgttagtacaggtaattaattaatgtaataagaagttcagagcttgtaatgggtgctggttgtgtacatgtaaattcttcaggacaaatctttaacatagggagttggggattttgtatgtatgatgttgaattgcaacaggaaacgttgcagacagattaataggtgaaaatctagctttagatacttttgtgttaagaaacgtgaaaagttctttttttgagttttgagcatggcctgtctgtttgtgtatgttactacaggtaattaatgtaacaagaagttcagagcttgtaatggtgctggttgtgtacatgtaaattcttcaggaaatgttgccatagaaagttggggattttgtatatggtagtattgaattgcaacaggaaatgttgcagacagattaataggtgaaaattaagctatagctttagatacttttgtgtaaagaaatgtcaaaagttcttttgagttttgagcatactctgtaagagagaaaaaaagtggttttgagcaacttttacataataataaagtcggggacgggacatgtattggagagtctttgtataaatcaagtacgttgctatttctttttccggttgactgctaggacacttgaatccgtgcggtaccatatggtggccgttgatctggcttcatcggagggctaggaacgtttagtaccgcctggcaccgcatgccctgactgaggaggtaccgtgggtgggagggtagcttcgtactttcgcgttcgcatctctttcgcactgcatgctgtctcgggagaagtttcactcggcaagaaccgtatatccccgtagcatggttaggattggatcccggtcgcctgaaatcgattgggagctcgctgcaattttacatagtgcttgtttagtttctaactttttcttcaaacttataacttttctatcacatcaaaacttccctacacacgtaaacttccaactttttttttcaaactttcaattttaatcaaacttccaattttaatgtggaactaaacacagccataggatgatctgggtatgcacagaaagagagttctagtggttcaaagtgacacaaagataatatctagtccaaagaaaaatattggttaaaagtggcacaaactaaaatttaagtaataaaagatggaccaaactattattgtcctagttcctacagtgtataactattgaactgcaagaaacaatgttgtggatattaattagtaggtgaaaagccagtataacatgctgttcttaa

SEQ ID NO: 41945 - DNA, 2280 bp, Oryza sativa
cttttaagagtgtcatcccaaaagttactctgtgtagtgtcctacagctaattaaaaccgtgaagtcacgatgtcctgtagcaaaatttgcctatttggttttgttacacagaggatctccttatcttcacaatgttcagctcatgttttatgaagggagcaatatttttcaactccaagcattttcttcacatatcaacgcacgggtatattcctatagttctctcatttttttaggcttatctacttagaaatatatatcccacaaatataaagaagattaatggacaagaacaacacgactttgatcaaacttcaaacacccactatcatccgtcatccgtgcaacgcacgggcattatgctagtataattaaaaaatacacaaggtttccgtaaaaaaaattcgtccgtctttttttttctttttcgctgtttttttccttttttttttggtcagttttccttttttttcactccgtcgtaaaaaaacggctgcgaaaaaaactgatcagacgggaaaaaccgcgtgaaaaaaaccggggaaaaaatccgcgtgcagaaaagacgaaaaaacaaatcggatggagaaaaccggtaaaaaaaccgcgtattgggcttttttttatttccgtccttttcaccctttttcttttttcttttttttctgtttttttgtccatctttttttctgctttttttcatctgcttttcacttttttttctgggccttttttccaggctctttcatatgttttttcttcgttgttgtttttaagttgcatttttccgcacgcagtaaggatttgtgccatgcttttttcatcgcgcggccgaacactagcgttgccgcaacgttgatctacctctccatgtgttccctcctccaattgattgccaaaaatcaattccccattactcctcaccattttccttacgattttcccttttaactccgctttaattcattgaatttaatcgccttttaaaaattatcatttttatcctgagtttttgtcgctcctattttaataaaaatgaaaaggggaactagtgtatcaaaaaccctcaaccaattttaaagattgagaaagatttgactggatttgatgcggaggatttgaccagatttgatggggaggatcgaggacctacagctccacttgaagaaggaatgaaatgagcttttggtccaaaaccaaaaagtaaatgtatagcattccaaaaatatttctactcgttgcaacgcatgggcattttttctatatatataaaaaattagtgggtaagtcacggattgattcactggttacttattaatttgacctataagtgaattcacgggttgactcacttacatcttacatccctaggtgcagcaagccgagccatgacgcgggaactcatcggttacttatttgacatataaatgaatttgcgggtcagcccacttgaattccttttactgtctctaacatcctgcaggccgcatggacttagcaaacttccacaaagagtatacttcacggcgcgatcaaagctcttctgtccacatttcttcacagtatgtgacgatgtggaatagaagctacccgtttaagaaatcctggtgcctccatctcctagcacagtgaactgctttaatttttgcctcatgacctacctctcggattatttttgcccattccctcatacctctatctcagatatatttggcgagttttgtacgtatcatggtttctcagatttcaaccgtacgttggcaatttgactttttatttcgttatctctcgttttttctttgagctacccctagagttcctggaactagcaactatctaggcttaatttggttgtagcctccatggagactacagaagaagatgcttgatatttatcaccaggacaacacggtaaggatatgagcgcgttgaacaatgaatagcgatctgaccgagccatccaccaactgtccttcagaagtagcttgcgtaggtaaagttgttgttactatgtactcctatagtaatgttagtacaaaattagaacatatttggatctagcatacataattcccaccataattaaaatataaaaatatcaagggggtttgaggtctggagttaatctccctccaaccacttttatatgggattaagcgaacaaacccttactaggatatacggagagagatattggacgaaagatatatggacgatcaatttttacatttaccaccaagattttgattgccatggtataaagtttatcatcctgtctg

SEQ ID NO: 41946 - DNA, 3548 bp, Oryza sativa
acacgggggcgggcgcgtagcagcggctgcggaggacggcgtcgtcgacgagggatgacgacgggtcggtgagggtgtacgggtggttggcctcggagaagacgaggacggcgacggccgcaccggtgaggatggagagctccgaggccttcctgaacagcccggcccgcctcttggtgaaggtgacgtgccgccgggcttgtcctcgatgcggcggatcccgatcgcctgccgccccttgctcggcctcccgcgcggatgaaccatcgctcgccggcgcgcggcggcgctgcttcttccctaaactgaaggatgcggcgcggcggtgcggtgatagcggcggcggcggcgcgcaaggagtttatgaagtggaaagtgttgcaaaaaaaaaaaaggcgggagggagggagggagaggcggtgaaaacggacacggagaagatttgaattgagggggtgaaaacgaatcctcctcgtacaaggagaggttagattttggaaagttttcctagtcatccgtaattccgtacggccttgttagttttgggcggggtcaggcactcggctcggcttggattaaagcccggccaacaaaaaaattgcgttcagttaagcctgggaaggattggatccaggcctaccccggcctttcccctcattctgggccgggaaaaacatgtggaaaatatccacgagatggcgcaggatgcagcgcgtgcggcggcgggcgactcaaaggcgacggcgacggcgaggtggcgctctcccctccggtggccaccttatcaccggtgagtctctcttccttcccctctcctcttccatgtgggtggccatgacctagggttttcttcgagcttgtgttcctggctcaccccgacaaccatcctcgctgctcggtactgaggatgggccagtgccgctacctgagcctgtgttgattagtgaaaaatcaaaagtgggagaagataatttaattctaaacatattgcaatttaattctgcttcgttctccttagaaaatcatttggacgattactgaaagtatagtagcaatatagtgggagaagatttttaataagtatttgctgcagatttcttttaatactatggtgagacatcctcaaggtatgtctctgaactttggccacatttgctgacagtaaaagtgcaatcactatacaatttgggcaaatactcttttttatgtaattaaactgggtatatactaggagtggcaaaataagaatttaattagataattatactaaatttaccagattgtgtatgagtggaaataaggacattatgcatgtttataacttgtgagggctgatgtgttccaagcaacttcctaggatgtcagtgtggaatagaactttttttttgttttgatctgtctgatcttggatgttttattttattggctgtttcctaggtcacttaattgaagcatgggtttttcttgctcaagcacaattttatccaactgtttgtggtaagcatctagctgaccttgacaactaataagatctttgttcatgatccagatgaaacgggctattgtgaaggtgatggggtgagtgtactggcttgaggggtttgtgaggcttatgttcttggatgaccagacattctaattatgagaaacgtcaagggcctaattgtgagggtggcatcctcaccctgtggcattaattgatgctgctgctatatttttgcatgaattcagacatgtttgtgaaatcattatctttgagctctaggccttgatgatactacaatatcattgttttaatgattaatccatagtgcaattcttgcactgagacatcagacgtggttatgttagctgaattgatgcatgtgtgaaattgatgcatgtgccaaatccctgccaaaacgaacgcatggttttaagagaggggtttgaaaaatgcaatggattcaaaccccacagattggttaatatggaagggattcacctaattcctcccctgataggttctccttgggattatttcccaagcaaccgaacaaggcctacatggaaattgctctagctagtcacggtaattttttatttttatgttttacgcgtggaacgaaacggtgatgtgagtgagctgccatacacgtacgtacaagtgttctactccctccatccttaaaaaatatccttttatatcttttaatttactagaaaaaatacccgtgcgttgcaacgggtgaagtctattttattcttattattgtttcgttaatataaaattcactgtgagagttcgcttagatattcttagaaaatcatatgatgtagttatgagtccgatcgtctcaagttagcattcgagtttttttaaacagatttcttatatgattccttctgtattaccaaaaatgaacaatcttaaaaaccgactgaaatacggatatgtattttcaaaagcaaacgaacttaaaaaccgactcatacacggatgacgtaccaaaataccggcaaaaacatctttaatttttataatagtagagatctcacagagagtattttataagttataaggtctaatatcttaatactactacttaatatttttcttcttattttagccatccaaccatttaccctcttctcctccctttctcctcctcaaccatttactctcttctcctcgtgttgttaccctccttgtttttttctctctgtattaatggagagtatgttttttatttctcgtacttaattgcctataactttctaaaactacttctttttgagggaatataaattctacaatgttgctcatattattatgtattttctacttatatattttttgataaatacgatatatttacaggtttaagaaaattataacgtgtaaacttgtaagaaaaaaatgtaattttaagacatgttccttataacgtgtttttttccccactaactaccgcaatccacagaatgtaaaagcaatgcacgacgattggatacccaaatgggaaaaaaacgcaacgtgcgcgagaatggacggatgtaagcgacgacataccaaattataccatgaaaacaactttggtagagatacaatttttctaatagtaaagatatattatgtatcagcctattttattactaggtccgaacatattttgaaatttatagttaattttagaggattttttcatcgttattgttgccaacatctttcatgattgttaaaagaagttaataatctacctaaaatcattcttcaaaattcgaactaacaacttcaaagccactttgaattataatccacatttgaaccaagcacagccataaatgatgcacattagctcaattaaaagtacattaaaataaaatatttaccgtttaagataagattttatcaaactataaaactttggcaacctataatttctcaaataattagcataaaaaagtatccatatatttgcttgtttgagaagtactattataatatcataaacttgttctcatataaagttaacagttaacggtcaaagttttcaaaattttaatta

SEQ ID NO: 41947 - DNA, 590 bp, Oryza sativa
ttggttgatttggcgaaagagataccgcaccatggctgggtagctatgtcctgcacggaagaagaattaacattcctccatatttctgctgacgggtggggcctatctagccagctacatgcatgcgattcgccgaaatgtgggtctcgctgttggcgctatcctctgacctctcctgccggcttaatattcaagtcgtgtatcatgaactgtattttcacattagacaatctatgtaatttgttgcattttctagccatcaacccatgcatctgaatgtgctatatattttaaacaattaatataactgggatatatatattaatacggatattataagtataaaaacatgaaaaagaatattatatttagggagaatagctaatatggtccctaaagtttcgctcctgggttattttagtccttaatctttcatattgtccaaacaagtcctttaaatttgtcatgtgggctaatatagtccttggtccaaccaaaatcatcacatgggcatgccatgtcaccttcctacgcaaaatctatatgatttgtccaatttacccttacgcataggaaaataaaaaacaaaa

SEQ ID NO: 41948 - DNA, 2306 bp, Oryza sativa
gtaataaccctaatccagtttatatagattcactactaagaaaaccatctttcgtggcggccgttttaggttttcgctggcggaatttggagccactacaaagcaaaggccaacgaagatcaagatcttgggataattcattttcgctggcggctgtgttaaatcgaccgccagcgaaaatcaaacccatgcagctgccctagccgttagcgaagaggaaatttgaaaagcaaaaatgaatatgcccacaggtgtgaagaggaaatttgaaaataaaatatgtccacagaccaaacatcatttacacagatcgaaacatgtgcatcatctagaataacatgcacaaaaaaaaattcacatctagcagcacggtcggagaggagggagccgggtagcacagtcgacagtgtcaagctcagtgccggcctccccgtggtctggcggcggcggatccgccctccccgcccatgcccgagctcgttgccgccttcgcgagcgcactgctctgtcgcccgcgcctgtggatttggagggagagagggtttggagggagaaagggagtggagggaggaggaggagataggataaggacgaagcggagagaacagggttttcgctggtgcgggggcggtgcttttatagcatcaaattttatttcgctgacggtgttgttaccgccagggaaaatcggatgccaatgaaaacccgattttttatggcggacctcttagaaccaccgccagcgaaaatagagcttttttttggcgggcctcttagcgtggccgccagcgaaaactgattttcgctagcggtccgtaacccctcacccttcgttacatttttagtggcgttttttttgcatatgaccgccagcaaaaattatagggcgacgccataaaaatcattttttatactaataatggatggaaatagcaaaaggagtacaatagaaaacaagaagattgaactaacccaccgactagaagttgtcgagaatggcctgacaagatttattcgacgaatatggctctagctccctccagattgcttctccttgcgattctggctacggcttgtaactcgatacccctacctgaactagggggccgtatttataacatatattatcttcctttccaagtagaacttaaagatataaaacaaggtacaaccccaaggagaccttatctttcctaaataggaatctaacaccttctattccgggaagatgatttctttatttatttactgtattttcttaagtaaagaataccttcttgtatacaatcggtatatggtattagcgtgttccatgaattcatgtataggaggtataccttattcttgacactgaccattagaaaacctataattgaggagtcgaactgagtataactatgttgtatttattagttgagtgaagtgcaccaacggtccctaaacttgtgcgggtgtgtcatctaggtccctgaactctcaaaatgcatttttgggtccccgaacttgtcttgtgtgtcatataggtccatccgatgacgtggcatgccacagtgacgcctacgtgtcggtgaggaccccacatgtcagtcatatgtataaaaataaaattaaaaaccatattttctcctctctacctccgcgtcgaactccaccgcctccgctcaccggcatgcgcgtggcggcctacatgcgtaggctccgccggctccgccacactggcctcctcgccgcgggcgaagccgcacccgcctcgcccggccgggcagcctcagccgctctccgcgtcgagctctgccgcctccgcctccgcgccgcaagcgatgccgcactcgcctcgcccgaggccgcttcctcggcaccctccgcgccgcaagcgacgtcgcggcttctgttcaattagcccacatagttatggttgcatgcacgggcggcatgcattggattcccatgctgtgtgcatatgtagcatgcatgggcgcatgctacgcgtatggcggctagctccgcctagcactccgctggcttcagccgagtaacccgcatgccgctccacgacctccactctcgcctctcgcgatggccaacgccgtttcgccttagcttgagctccggctcgccgcaagcgccgtggagggaccacctccgcgcgggccacggcgtcacctccgcgtcggcaagcggctccgtcgcctccgcggccacgcgcgactctgccaacgccgaggggctccggccatcgtggttgtccgtctcggcgttgagccacggctccgtcacctccgcggccacgcccaactcctatgctg

SEQ ID NO: 41949 - DNA, 1612 bp, Oryza sativa
atgcgtacggtgtgagccccgaaaaatggacgacaaaagttgaaatcaaagtgaagaatgtttctgaacatgcaaaccatccatcaaagatggagactttggtgtcatctttctgcgatccacaggcctataggtttgacgcggcgaaaaatgaacattatgtttgtggttttgcaaaaagcgttgaatcaatcccaaggtctatatatctgaaactaaagtatgaaacagtcgatgtagtttgcatgaaatcgtttctggtaaacctggaggctcgcttgtacacagaggcagagggtgatattggtgctgaaggtaagatcaatgttatgccggaaagctagtgtgtggctaggtgaggctcatttgtgttttcttgtgtttctaaaacttatggatgaatgctgcagaaccagatcctgagatgtatgaggatccagatgtggtaagggaagcatttgaaatgcaagctaggcttcaacgtatcgcaggtagtattggttattttctttggttagtcgatcaatacatgaacacagaaaaattctgaccgccataccatctattgtctatgcatgtataagatggtgatgaaagcagcagctcagcaggaagctctttaggcatgagcgttgattctgattggagcctgaaatacagcggtcgttgaagaggggaagcatgctggtggcaagaaggtgtaaacgtatgaaatgagcagggatgaatgtgttagtaaactgtagggattatatcgtatggtgtatgctcctagtgtgttagctctgcgttgaatggtgacctgtacgctgtaggaaccatgtagtaggttcttggactgggttgtattatgtgcatggatgcgctagacagctagaaaacacatctgaatattatgtgggtattgccagctagttatctttggctgagagcgttgatgagctagattgttgttatggctggtggtaacctctctgttgacgctgggagaaccaacatagctatagcgtgaaatgggggacaatgtagcagctattgcagcagcgctgagaatggcggagacgacgagcgtagcgtgcgctgctgcataatggatgcggcagttgtcataggctgcagaaacagagctaaggaagatggctctacggctatcataccaatccgagagagaaattaagcgcaacatgtggcgcaagatgacctgctgatgatcccaacatgtaaacacatcatatagcataggtgtgagtggtaggggaacattgcatattacacaagagtgccatgttctggagtaacagtggattttcaaggtccaaagatagatatagacgaacagaaaaacgactgcaggaaacaaagactacttatgcaaattgataaggaagaggtcttgaacaaaaggcctggctagcagaggagtacatccgctggtgcaaacgatattgtagggggaaacaaaagtagcagcatactttttctttgattcactgcaaaaagaacagaggaaagggtatgtcagctgcattgagcgaagcatgtatacttatctgtggggaagcgagatgactacccaagtaattaccttgttgtcgcccttgctggggctatc

SEQ ID NO: 41950 - DNA, 1297 bp, Oryza sativa
tgagaatgtagatcattttgtaatgtaaaaatgatagttttaaatttgatttatatgtacaagttgaaaaaaacataatatgaaaaaaaagaatttaatttgtttttcttctaaatatgtatattaagtttaattaatttggaattgaaatttagtgatataatatattgctatcgtatcaatttttttttggagattttgaataactaactgattcatattatatttggtagacaaagtaggaacaaattaacaaggggatataccatacaaggaagcaccgttcctacaattccttcccctcctacaataaacgcaatcctatttcgcacatgtgaaatatggaaatctatagagttaagtctaggtgaaattattcaaaagaattttgagtacgatgttggcaattcattcaataaacacaaatttgatgattttcagagccatatgtagcaaacacacaaaggaaagttacaaaatctattattatatattaaaagtctattaaactttatataaacgctcccatatcgacacgtggcattcctatgaacgctcctaaatttcctatgaatgctcctaaattaccacatggcattccaataaattagtaaaaataaaaaacatactcccttgattttaagtaaattagtgggtccaatatcctaaaccatcatatctaccctataatgcaccgactcattttactcatctttcactcctacactattacatttatcactcaacggttcagatcgtccagtgtaaaatcgaaggatcgagatcaatcccacctccacctccctgaattgcgcactccccccctctctctttcttgccttccagatccgcgtctcctctccatcctcatcccacacgcacatccctctccccgcctctttctctcgcactgccccatctctagcatgtcgccgccgacgaatctcctcaccccgccatcgccccttccctttccccccaccgccgacgaaactcctcaccccgccgtcgccccttcccttcccttcccccccaccgttcatcggcgacgatcccaccttcggccctaccggatccctctccaccaacggtagagaccctcatgccctaccggattgatttgataactacaagctccatccacacccagtgctccactcaggtttgatcccaattcgctgcctgctccactcctttgatccctgttccccccttttgtccagataatcgcacacttgggcaaactcaaccaaatttcgattttcagatatattgtcatatagtgttacacaatgag

SEQ ID NO: 41951 - DNA, 1260 bp, Oryza sativa
agtacggggcacaatgcagcaggaaaatggcttactgaatgaaaagtatgaacataaattcatatcatgccaaaagcatatattcaagcctagctttcattaaaatacaaaagtactttcctctagaaaaacacgaaagtccttggatataacaatacacgtgcggtgtgtgtgaattaacatggtagatgtcatatcaattaactcatgtgtaatgtgttgcgatttaaaaaagccacttctgcatggttgaagcttttgtgatcttatatgcaaagagaaaggtaaaatgaaaatatcaaccttgctcacattattcatgtttgtgttgatcctttttctgagtgtattttaatttgatctttgtgtcaggttataggaaacaccatacctcttatgaacagttatgctacagaagtcctttttgggaatttaggttcaatcacacttggaattaatatggaaatttattttgctataaaatatgaacattgcggccacaaagagtgttaattttcttccagttgattaaaggaaattctccatgaacccaagtttaaccactttgttcctttgctatagggtacaattctttaatttactaggtgaaaccccgcgcattgttgcggaaatttagtatgataacaataaaaaaataacgtgtaagatagctaaataacatcagattaagtaaattaatgtgatttatgataatttaaatttaaatagtatgcagaatggtgattcaaacgtaaaaggtaaggtggtatgactttatggaagaagaaaagtagggagatagtttggaccatagattaatcatctaaattgtaaaaacaattgatgtgatatgacttaattagaggaaaaactgaaaaatataattcgaaccatagattaatcatttaagcactaactaagtgaggatgagctatataagtttataggatatcataaaacataataaagatatacattggaacattatgtaaattatgttggataataatttaacatgtttgtatttgaaaagctcttaaattataaaaactataaagatatagcatgtttgcttgatgtttaaatgtgatgattgttagtggatgatgatgtaccatcttgttagtggatgataatgtggcatctttgcatgttaagcttaaggagttagttggggataactttatagtaagataggattagtgtacagtgaatgatactgtgtaaatgtttcatctttacatgagggctgcaggaatt

SEQ ID NO: 41952 - DNA, 1909 bp, Oryza sativa
aatggggctataaatagccccctagggccatgtaatagggggatcccaaaaaatttggtcaaagtaatacaattgttcttttatttcccatccactgttgagagaaccacgtctttcgacgtgacgcagttgtctattcgacaacacatactttcaatatacttatctataatatactaagaaaacattaaaattcctagaaatgctctttagccatcacatgagacttctaaaaatgctcctataccaccatatggaggtaacatttagccctcgatttttacttaaataggtggtctattattattttagaccattaggttataataaaaaagaagttattcctccctctcatctcacccgcgtgtacatacgcctttcttattccgttcgtatgcatgtaacgtatatgtgccccactttttttactctccatttaaccttttctttatttagttttatcttgaataccctacaatacatttgtctcacctaagattttttatgctattgatatttgagcatatatttaatcattcattttagtataaaaattatgtaattataataggagatcctaaatactccgagaaaaatacaaaacattcgacccttgatttttactttaaatcgatagaccatttttttataccattagatcatatctattaggaaaataacacttaacaaaccgggaaaaaaaatgtcccatgtacgtataaatacatagtactgttcgctgggcaaaaatgccaaaaaaaaagattatcctgtgtacgtgtgtactcctactattcgccgaataaaaatagttttactatgtaagatgtgctttaataccccttattaaaaaccgcatgaattttaaagaagatgaatggactagatcagaaggcacctaacatcctaacactactacagaagatgccatatgtgccggttcgtaaaggatcgttcatccggtaccaatttatcggtaccaataccagcaaccaacacctatgaggaaaatagaaccgacatctttagctttgcacgagaagaaaaaaataaagctagctcgagtcgaaccgaactcgccaacaacgtaccatcgctgccatcatcctcctggatccaccgtcgtcgtcctcgagcccatttccctgctgctgaggccgatagggagaggaagatggggagggaaggttgttgccacaccgtcatcgttgtcaccacactgtacccctgccgtcgctgcaccgcgccccgacgaaacagcttcggtcgtgcccccgctgtcgttgcgccgtgccaagcaaacaactttcgtgctataccctcgccgtcgtcgctccgtgccacgaaacgtacagctgatgcaccatgctatcgagataggaaggggagggggagagggatgtcaccgctgattgggggagagagaaagcggaggggcagaagggattatgattcttaccaccgagatattttaagggattatatatgatacacattttatgactcacgtttctttacaatgaaatggccgaactatagaactcttttcccagctagattaatgactcgtgtatagagctgtttatgtcgaccaaattaaccaaaaatggactgcaaaatgattggagaaacggccaaacgggagagtaaaacttgtctggtagttcttggaaacaatcaatccccgactgttatggacacacgttatttccacgcgtatacgtccatggaacgccaagattgaacgactattattaatacggatacggatctagcttcttacataacctctgattcatacagatacttgttcaaggttgtctaactattaacaatcttgaccatcccacgtcattatgtaaacatcaggacaacaggactacctatatatatatagtccacccgttag

SEQ ID NO: 41953 - DNA, 1226 bp, Oryza sativa
atttttacaaattgaccataactagtggcgtctgcaaaaaatcgagctgcattttcacagacggctcctttaagacgcccatatggaaaaatcgattttcccatacgagcctcttaagaggtccgctcatttttgtcggacgaagaaatgatcaaacctaaactgtacgtgtgcgcggtgaagggccaccagctgactccacagctttttcaaaaacaatgttcaatttttttctcaaatttaaattagttgataattcgttcattagagggttattttcgttacacgcattttggacccatgtaaacttcatcttcattaaaaaaagtatgattgtactgtattacagtacttccaactattcaaattacactactacaaaagtgatttttctatacgaaaccccttgatttttacaaattgaccataactagtggcgtctgcaaaaaatcgagctgcattttcatagacggctcctttaagacgcccatatggaaaaatcgattttcccatacgagcctcttaagaggtccgctcatttttgcatacggctcacttaaacgcccgcatggaaaaatcgatttttccatgcgggcgtttcaaggagccgtatgagaaaataaaatacgaaaaatttcaagcagtgtgtctcactcatatgaacactaaattggatgattttttttcctaaatgtttctaaaatcatgctctatcatattattgtgttcttagtgctattattttgaccattttttcttgtgactttgttttatcaattaaaaatttgaatttctaaatttcaaataatattttgaagcagtaaatgatttcagttgaaaaagtcatcaacaacaaagttgtgtaactcatcaagatctataacttttactttggtcatttcttcatcagacaaagtgatagtaacatttttacaaaatttacatctcttttatagtttatgaaactatataagggatatgtacattttgtgaacaatcttacaaatcactttgtcggacgaagaaatgatcaaaatagaacttatagatcctgatgagttatataactttgttgttgatgacttttttaattaaaatcatttagtatttgaaaatattgttggaagttgtcataatttgaaattaaattcaaactgttcaaataaagtcatatagaaaatgaccaaaacaaaagttgaagatcttgataagttatacaactttgt

SEQ ID NO: 41954 - DNA, 1506 bp, Oryza sativa
gaaatttttaagcctaattaatccataactagcacatgtttactatagcatcacataggctaatcatggattaattagtctccatagattcgcctcgcgaattagtccaaagttatggaatgagttttgtcattagtctacatttgatacttctaattagcgtctaaatatccgatgtgattttagtccctgatccaaacagcccctggctggcaaattctatgaatgatgaagtaacaacacacaattcactatcaacgagcatatcgtctgccacttcattttaggtataatattcaaatttaattctatcataaaccttattaacgttgattgccttgctgaatctgattaatgtctttatgtttataataaactttattgatgctgattgcattgctagccctggctgagacagggtatatatatgaattgtctttatctgatctaacaaaatattaaacgatgaggttagtccatgcattttttatattaatttgtcctctcttcacaaagtaaataagctaatgctaacaatacatatcgatatatctcaattcatgcaaattaagatcgaaatatggcaatcgagttagctataattcccgttataaattccaacaagatactgtctccattccaaaataagtgcagccatgggtatccgtgtaccgtccatctgatttgaaaattttataattttttaaaaaaattagtcacacataaagtactattcatgttttataacctaatacaataaaaatactaatcatgaaaaaaattcaaataagacgaacggtcaaacgctggatatgaatttttataaaactacacttattttgggacgaagggagtacatatttttcctttgttaccgttagcacgtttttcaaactggtaaatggtgtcttcgagtgaaaactttcttcatagaagttgctatagaaaacaaataaatccatttattaagtttttaataattaaaattcaattaatcatgtgctaatgacttatctcgttttgtgtgtgtacttaatcttcatcttccatcagcttcaaacgggccttaaatctttttacatgagtttatttaatcctctagggttaatttaattttggtgacgtataataattgttttaatatttatgcctttaagggtcagcaaattaattttttcttgatctgaattagaataaatttaattttattagtccataaatttaggtttgaataacacataacgattgccatatatatttctgtgttatatctatgtttgcaaaatttggtctttaaaaaccttaattggatcattatttaattttaaactactaaatacactatttaaaaacgtgaaataaagtttattgatgcttttggggatatttaaaaattcagagaacgtaataatttctagagattgggcatgagtaaacaaatgtagtagtaggtttatatttcattaggtaaggacattccctgcgattgtttttctatggaactat

SEQ ID NO: 41955 - DNA, 1213 bp, Oryza sativa
ttttttatcattttcaaaaggacataaatgcccttggcttcgatagcatgtaagaatgtaaccccaaccagacccaatcatgtcgcacttgtcgttcaccccacatctgaaatctgcatccaacctaaccctaggtggctggtggtgacggtggtggcttcagcttcaaccgtgactagaggcggcggcttctgctttggctgtggcgggcgatgagcggtttcttctttgacggtggctggtggcggtggcgggtgagcgacttctgcttcgacggcctctggcgatagcagtagcagctttggcttcggctaggggtgaaaatggagcggattcagacggatagtggtcataccatatcctaaaccatattttttaagcggattcgaagtgggtgcggatagtgtgcggatgcggagtgaattgtttcggatgtcagaaatggtgtggagtcggtgcggaatcggttcggaaacggattaaatttatcggatgttacgtgcatatgcaatcaatgcaacatcgagttagcaatccaaagaacaataatacaataatcaataaatgacctctcataataattatatgattaagtgctaaacaacatgaatacatgatgtctataatataaaaaatatagatacgtgagggtgacatgaaacaataaaagccttagactaaaaaatctatgttaattgatgaattagggcattggatgtaccaacttatgttatatgcaatagatagagtggttatatatgttgataatttcagattatccggcaaacggcttatcggataatccgataaaaatgtcggataatccgcatccgccggattttatagataccatatccgcatccgcatccgcctcatactatccgcatccgcatccatcggatatctaaaagcccataccatatcctcgtttcggacggattcggagcggatcggatcggatattatccaatccgttttcacccctaggttcggctatggctgcggctggtggcggtggtggccgagcggcattgggaagtgatagtggtggtggtggtgttggtggagcaaagatggatggctcggcttcaacttcgttcttgcatcgccacaccggtggttggggttacatgctactgaggccgggggcatttatgtccttctgaaattaaagatcaaagagccgatcgactgacaagccaatgaagtaatt

SEQ ID NO: 41956 - DNA, 1976 bp, Oryza sativa
catcatccgcggcctcctgcttgcggccgccggcgtcaagggagtggagagagaatctgctgccgccgtcgctgcttcggactgagattgctcccccagcggaagcgtcgccgcctgcgctcccggccggccacatacggcactgccgcctccgctccgcatctcccggccacatccgccggcgtcttcttccttctcggcgaggagcgaatcagccgtcgccaccctgtgtccgaggctgccatctgctattgacgtcatcgaggttgccgtcgctagccgtcgccaccccgtgcccccgcctgcgccgatttgccgccccgcgtccgccacccagttgacgctattttctctgcttgtgtcgtgtgtgtgtgtggctagtttggagtttggatcaatttaaggtggttacttgtttttgatcgttctttttgcgaaaatgctcacacccgaacgactggcggggcagagaaaaatcggacgttgttttttgcctgccactgcagcatgcaaagaatcttttcttttcttatttcttcaaaagattttttttatcgtaaactatttatctaatctacgatataattgcaccactaaattcgttacaattaaatctttacaataagaccacacatgattatatttcaacaaaaaatattttagtttttttattgtttttttaatgttgcatgtggtctcttttgatgtttcaaccagtagttttacaatgttgcagctagtgtactcatgatgtttcactatgtatggatcaaatattgcagtggaacacgctgttgcaacaaatcacccatatattttggaaaccctctattaagagaatttggtttattttttgttccaccaaaaatgtttcacctagtgtactcataatgttccactatgtatagatctaatgttgtagtgaactaaaatatttcattgcaacaaaaaacccacatattttggaaacctcctaagggaattcgtttcgttttttgtttcacctagtgtacttataatgtttcactatgtataaatctaatgttgcaatgaactgaaacattctttcgctatttgctgaatcattgtttttatataaggtgaaacaacacccgatttaaatgagtgaaacattttcgatctacttagcgaaacaattccgatatacctggtggaacatcgtgcaacatttaaaaataattcaataataagctattttttttcatcggaatatatccatgtgtggtcttgttttgaaggtttaattgcaacgaatttaatggtataatcggatcatgatttggataagtaatttaaaagaaaaattagtttaaaagtagttttgcacgtaaatcgggtgccgacgtcatgctaacgtcaacgtctgatttttcccagaagcatcggtcgtccgacgcgtaggcccttccttcttgttgtagttgattgctggaagattcaagatttttgtgtgtataaattgtagtgctcttatcgttcttgccatggagaagttggtacccattttttatgcttgtttttctcggcggccatggagaagcggagaggggattctgcttgtgttgtgtgtgtgttggcatgtggccatggagaagtgattgggaggaagaagaaagggaggaatgagtgagaagcggagaggggattctgcttgtattgtgtgtgtgttggcatgtggccatggagaagtgattgggaggaagaagaaagggaggaatgagtgagagactgacatgtgggtcccactatcatagacttttaacggagagtatagatggagaggctgttggaatgaataacgagtttgacttgctaaattagttggagagctagctatatggatatttggagagttgaatttggccattctattagaaatgctcttagtagatcaaacttaactgatgtagcacaaagtatgaaaagaaacataatatctcgacactcaagccttt

SEQ ID NO: 41957 - DNA, 3006 bp, Oryza sativa
gaatagtgtacacacttgcttatagaaaatggtatactctatataattctaactgaatcaagtagttttgagacaagatcagaagaaaatatactagagcatggactagcaatttgtacaaaaaaaaaagatgtatgtagccatgaatagcaggagttagaaaatgatggtacatttcagaccgtgtctacaatctgaaccaactaaccagacctaagcaagcaaacatttcagaacatttttcagtccaacaaatatgaagcttcacctagcgcaaatcagatctaggtgcactaacagatgcatttagcaatagttgtgcaagctagtacagatatttcagaacatattgatacttgtcactgtgtaccttattcaacgaatcaaacagcatatttctttctcctcactgccactatgcttgtgggtgtgtgaggcggacaactcccagtgtgtgcgacagcaggcgtcgctctcagactctgggctggtgttcttgtcaaagacctcgagggcgatgttagcaaccttcttcactagaatcaaacaacagtagttctcaatacaacttggaagtgtttgactagaacaaggtttaataagaatggggatacaagctaatagaagagactggattgtcctagtagctgtagtagaggtagtagcaagagaggtagtagaggaagagaggaagatcgacaaggttcagcctgaaccaagttgtcgccgccgccgccgtggccgaacccgccgatgcatgtttgatctctgtactgttcgatccttgaagtccttgtactgctgccttttgtattcctcatccattgcttgattgggccttggcatggatcagcaattgagtcagcccatgtgcagcccaatgggttcctgacaggcgacgaagccgccgccgcagggaggtgctgccactgtggctgcgcctgcgacgagaaagacgatgcacctagaagccccaagctaacagtgagaagctgcagctagtactagtctctcatcctcatcatcacgcacgccggcaagcaggtgcgccatcactcatgccggcgagcaggtgcgccatcactcacagagcttctcgcatcaaccttaggtttgggaggaatgggggaaccagggaatggggattttggattggagctatggaggggatggacagggaggagaaaggatgggaattttagcctacaagcggggtaacgtacaaaatgcactgcggaggcggggagtaaactgcaaaatatattggctaggaagaacgaatgatctggatcgaacatttcgaatcggacggcccacaatcgaggccttgttgtttcacttagacatggggttccccacccgacactttccccatatattgtgcggtagtagcacatcggcttcagtatggaccaccaccagaccagtgctttatactataacttagacttttaagataaaccctagcttacgaacctgacacgtatatgtacaggttcgtagttaggattggggttttttttttatggagggggcatctattatgaaaatatttctcatggtggtcataaaaagataaagcttgtaatggtaacatatatgaatatatagaaatttaacgtcatgggatgatttaagttaaagaaaatatattataatatgctatagaaaaaaataattttattattagtaactgatttgcttatttaatattcaatttgtttgaagcaaatattttactatcctataatatcaagaaatattaataaattaaaagcaatagtggagtgcaaatttactttcaccacactactgaagcattttggaggaccatagataagaaaatgaatgtgaagtattatttgtcctattaatcacttcttatattttatttctatcttactctcaaccacccacccacctctaacaccattcattatgtaatggcatcacgagagtccgcctaaaaccttaatctatattaacaatatatatagaacttattttgaaacgaagggagtattaaaaagcttaccgtactactttcatgttgcaacacaatagtgtaatatgagaaggggtcaaactagaaattgaaaagagagttttaaatctagaagatctaatctgacgcgcctcaaatcacctctccttgctttgcttccttacaacttgctatcggctaccattgttcgcttgtagcccagctcgaactaccttgctttgcaacgctgcttgctgtgatcagggtcacaatttcggaacaaaatttttaaaatttctgaaattttggttctatcggaccccccgatacgatattattttggcccaaatttttattttttttccattaatcatgaatttggtattattttgttcacatttgatcaaattttattcaattttttttcggaaatttcggtatttcgaccaccactggtacaaaacactaaacctggttgttgtcgatgttgtccgccaatagccgccgctggccgcatgcgcccctgcaggtttgccgtccgtcgccgatcgattgatcgcctgacgtttgagagagccaggtgaccagggagtgcagatcctctgcagtactactggtgcagtagcagtggttgatgtgtaggccctgcagaggatccttgttggtgaccaggaagtcaggaaccctaggcagttacgatcgcgagaggcggactgtggagagggagtggaaaggtgacgcgacccttccttttatgatttcaaggctaggatttatagttttttttcttcttttcttattcttaccgtacacgcctacttggtccttgggctgggaaatttttgggttctccgggcatcaattaggcctggtttagttccccaattttttttcaaaaaacatcacatggaatctttgacatatgcatggagcattaaaatatagtttaaaaaaattaattgcacagttgaggggaaatcgcgagacgaatcttttgagcctaattagtccatgattagcaa

SEQ ID NO: 41958 - DNA, 1521 bp, Oryza sativa
ggcgggaagccgccagatacagtgaagacggcagggcgggggcactcgtgccgtccgttggggaagagaggaggaggccggccggggaggggggaggaggggggctcaccagcgtcgttgacccctttcggccagccgacgagtccgggcggcggcggagtcagccgcacacgagaggatgctgcggcggcctggaatgacgaggggagagataggggtttagggttagaactgcctgcacgaatcttaaagcgatccaacggtctagaatttgtatgatttgtgaggtgtttttctgtcaaatgccacttgttctttttacatatagtatatatgtattaggagttcagattaattgctcagccgttatggtgaggcgctggagattatttctgtttggcaatacataatggatcggtgacaagggatctctttgctgtatgcctagctattccatgattgaaaactgatatctcgcaatgagccagaactgagattaattacgacagaaataaaaatatccagttgtaccatctttgcctgaagttacagccaattccactgaatcgtaagttttaattataagtgtccagcctcatgaaaaagtgccagctcgatctttcttagtttttgcagaattttcacgaaaaatgaaattctcatgaaacacccccatattcttgatgattgaaggcactaggctctttgagtctatatatcccctgggatggatatattgtttcctttttgaaagtagcaaaatatttgccaactttaaaagatggcagagttccaaattaaaaaaaaatctatgagtttaagtccacccgtcacaaaaaatacatttttccgtaggttgcttacaggaccaacagaaaataccacggctcacagggaagctgagtctagtaatgacgactctacagctgtgactaatagtacagcatctttcataaaatttgcgaacattttatagaaacccatcgagaaataatattctacaatatatatgccatcgacaagaggtcaattttccgattttccatctacagatacgagttctacaatattccacctacttcccccttttcccatttccattagttaatatccattagctgtttggaattttattcacagtgctcaaagtactctcgagagagaagaaattaaaaggcacttatacggtggcatagtagaattcagtttcgttgatggagaaaacatagaattgaggatttgtcaatggctttttgtcatatagtttctcaaacattgatccagcaatgaaactgacttgggactttgtctctcttgtttaatttggcgtggaaaattttgatgtcagcatccccacactggtggagaaaccatctttgatcggtcgacccaaatctacaatagtcccagttccatttaaaaccgggactaaaaacgatttttagtcccggtttataagaacaacaggactagatgatctttattcccggtttgtatgaccaaccgggactaaagatcatc

SEQ ID NO: 41959 - DNA, 3815 bp, Oryza sativa
ttcctgcagcccattgcatgatcctgtgatgtatttgatttgtgtgtgatgtgaacttgtgatgtatttgcgatgaattttgtagaacttgtgatgtaatttgatttgtgtaattttttttaggatttgtgatgtatttgatttatgtgtataagtaacttaaagatttgtgatgtggatttgggatgttactttgatttgggatttggggatatgcatcccacttgattcgggagaaaataaaaaagaaaaaagaggaccatctgtactgctgttattccctctttttaccaaccgggactaaagataaagtatctttagtcccggttggtgttaccaaccgggactagagatcgatttttactcccggttatttcacccgggactaaagatagcgatctttagtcccggattcgtagtcccgattgaaaaaccgggactaaaggggggttacgaaccgggagtaaaaaccacttctccaccagtgccatctcatccaagttagacatggctagtccaaacgaagggattccatttattatcagctcagcccttctggagaaagctagttggcattcttcttgtgcagcctgtatcctgaaaatgacttgattagcaatgttcatggacagttttatgtgtcaggccttaccttaatttgtggcatttgatcatagctttattagcaagtctgcttaagtaaccgagacgaggggaaaggagaaatttgagaatggtgagccgttagcgcataagtaactgagtattaattattttaaacttgcaaaattgattgatatgattgaaaaaaataacttaatttttctatagaaattttttgaaaaaacatattgtttagctgttcgagtagcgcgtgtacaaagaacgagggatttttcttccgtctgtgcttggaatgaacgcaaacttagattaatatatatgaagtgacttggtgtggttattgttgatgtgctgtttgcaactcattttgcctactgttgaaattataagcacataatgatttaatttattccataaataaatcatgacattgcaatataaactagcataaacgcatcattggatctacatatgtaaattaagcagtaaaacatgaacggatcaaatatacacaacatgttgaacatgtaccgaggttgcggaacaaccggttgctcgacaggaatcactcgcggttgcgggcgtcgacgaaggcgcgcagcacgtgagtgaacaggaagacgagctgtcgcggacgaacagggagcagtcgcgctaagcgcttcccaaaaaccttattgccgccttctcccagttgtagacccccgtttttataacagaaatcattcgtgtaaacagtaccatttccctggatcaagtagtctggtacacacgagttcatagctgaaataccaaatgcacatacacgagagtctagtactaattattacaccataagcccttaggcattgtcttaaatcatcggaccgagcggttcggaatacatccaaaagcagaaatagataaggcagcggaatttaggcagtggcatgccattgccacaggcaacgaccgtactaagacctactgagcgccatcgtcttcatctccctcctggtagtaggcatagggatcctctgaagcttcatctcccgcttctgattattttataattgcaagggtgagtaccaaccgtactcagcaagccaccacagcaacaatgcatatgaaaggggtatttcaaaggatggctatggctcttttgcgtaaagccaattttgtaattcttttcacaagcctcagacctagcattgactgatcaaattttagtaccagtgtttgtattcaaacaacaacggttctgtccaccatccattgtgatcccaaggatagcttcccgccattgaatcgttatggttttctgaggacacccactttccccctcctcaggaagtggctctaacagcatataaattcatcatgcaactacccatcccacacaagttaataatttagagactagccaagtctaatacatgtcccggtgctcaataaccgcgagcacggctattcgaatagatttggtttactcacactgcagtggatgtacactttacccacactccatgactgcccaacacatgagcctcgtcccaacacatgagacgcgtcacggcaaagcttttcgataacctcgcattggcagtacccgctccatgaactttacatcctcttgcactctaggcgtacacggtttctagtagtgagagaagttctggcgcacccgggaaagaaagactcacacatacattaagttataattatgtttaaattctctcatggcagtcctaccgatggcgacaccactgtagacacccgcctcgcggttctaccaatggctgccccaccgtagagcccctgcctcacacatcaagaaaccactatgcatggatactgcctccgctcagctatctattccgctaggtctatacccatacgagaagtgcggttgtacaagggtcgtttcatgcttaactttatggctcggtccttaattgaccagggacggcactagcctttttccggataccacccaaatcctccatccgccccagtcgaaaacatttgtttagtttcattttcctttcacaaatcatgtcatcaatatcatggcaatgtggcgctcatgtctccacatgccgcatctcaattaccttcccaaaggtaattgcctaagcatatagcatttgataaatatgagtatgcataaatctagagtaacatttctaagcatttgtcatagttgactagggacttttacgtaaatcatcgttacaaggatttaagggtaaacaataatcaaggcatggcataatcacaaataggatgttcatcattgcatgcaattttatttgtaaacaaaacaattttgcaattggtatcaacatgttcaaggaatagtgatgacttgccttgctctaggtcttgtgggtcttggtcttcacccggatccgcggctccctcggtctctatagttacgtgcgtaagaacaatttgaattcgattagaattcaaacaaaatccaaataatgaccgaattgagaaacgagcgcgggaggtgaattctatataggctactttattcgcgaagtggaattattcttctacctaaaatatttgtgtttcttaagaaattttgtgatttaaagtcatgtcctaagactttatctaattatctagtgcttaattacatctagatcactaccgcgaattaatctcttatagagtttactaaaaataatctataataatctgtaagaattcatctaattgtttagttcttaaataattgatcctataattaaatgctagtattttaggtatttaaatagcaagaatttatctagctatattttcattaagcctatgattaaattctaatatttttaaatattttaaatttccccctaaatttttcctttccttttctttctctccctctttcttttcttttcttttctcttttcccttttcctttctttttctctctctctccctttttcttctcctctctttctttttctctctctctccctttttcttctcctctctttctttttccctctcttctctccctcccggctcctttctccctctctctctcggcttcttgctctcccgggcggcgacgacgatggacgcaagggggggggcggcttaccgacggcggcgatggcgacggtggcgacgtcggcgcaaggcgcggcgtggcgcggcggcttcgtggctgcggcgcggcggctctatgcgac

SEQ ID NO: 41960 - DNA, 2664 bp, Oryza sativa
ccgttttctaattaacccgattttggcccatttattatttaaatttgattctttaattcccaaattttgcataaatgaagtatactcaatttttgtgccattccaatccatagattcattctagattaatttattccatgttttatatattattattgtaatttacttgaatttaattagagttaattctcattccattgtttttttttaaatttgatggatataaatatggtcataataataatattttactcatttctatcctcaccaaatcttattttaaattgcactttaattatttactttgtcaatttactttttagggtttattcctaactaattatccattattcgcgatttataaactccgaaatcaaaatccaataaaataatcgaataaaatcggcatgatgcaaaaagttttttgaaggcccatatttttggaaattttgatttttgttggtcgaattttcagggtgttacaccagtgcaggacgacctgctctcccgaacgccggtgagttgagacattgacgtgtaaccgaaccggacaaaccggacaagtcacaaaaaccttattgccgccttctcccagtgtaggacgacctgctctcccgatcgccggtgagttgagacattgacgtgtaaccgaaccggacaagtcgcgcgtaacttatccggactcctcggaatgtttccaaaacaaggcgaggcaagtgagcgcgtgcttgtgttccccctcttctctccatctcacatgattcaagtggctagaagggtatcctcccttttaaggaggtctccctctcctaaaataaacaaggtggtactaaactccccatgcatgccatcctatgaggttgtcttttgtgacttttcaaagaattaatcttcaaatgggctaaagcctatctattaattccaacacctacatcctaggctatgacccatgtgaaacctgtaatgttaacacataggcttattgccagaaagggaaaaacaaaaactttgatgaaaatttcttttattgtcagaaagggaggatattaatttggttcatatctctctctataacttgcactaattttgcaacactgttatatatatctctctatatattaattaatggaagttaatttgctcctgtctgatgatatgaactctttgaaattaatttttttaggcatgtatttaattagaataacagtgtcgaataatagataataacaaaatgtcagaacaaatatgttcataaaatcatgtgttttagaaaatttcagtgtggagtttagctttaaaactctttctttttttacggttaaaaactctttcgaaaacctttttcttgttgctgttaaaaaaaaaaggatatttgctgagtcaaccactgctgccaaactgcagaacaattgttgtgaattatgactccaaaggaaagaagattattcttggacaaaggaaggcacagcgggttttgtgaactgaccggcagcaattcaagggggaaggggtttcatgtaaaagtgttaatgttgacaaatttattcagctgcaaagcacatcaatctatactctaattatttgtgcattctactctatcttcctgatcacataaagatttagaatgattaacagtgggaaaaagcaataataatgaataacatatatacatgatgatcatttagatcaatcgaataatggccagcttcaccatgttcttcattcacttactggacttcttcagcctgactttgatcacctgttcttcggcatgcttgctatatagacttcttcatcttgcacagaagcttgctaaggtcaggtactcaggtacgacctcttcctctcagggttcaattttccgttttcagcatttactagcaaaatgcccgtgtgttgcaccgggtattagcggggtgactgaagtttgatattaatgatttaccaaaacaccatagtataattattagcatcggttatatgtacagtgataaaaaaaagccatgtttgttttttactattaatctcaatctctactacatcatccgtgtatgagtcagtttttctaagttcgttcgttttttaaaatacaacaaggactcctaattgcacgtcataattttctaaaaacgtccaataaacgaccaatgaaaccacacacaatcctaaaaaagtaaaacaaagcaacaatcaattcaaagtatatatgccattaattagatcttgatttcaaagagattatggaagttgaacggagtcaaacagagttatgcttcacaagatatggatttccgaagtttgaaggatttataaaccgaggggaagagtgtctcggtgaggagatgatttagacttccagaggggtctttgggttaaagagggatgtaacatggactttagcggacaaagaggacttcacacagactcctttagagggatccatctctcgggatcggccgaggcaaaaaaagggagccaacacagacttgtacaaggaatcgacctcatgggcttggacagagaagtagggggagatgatatagacttttagagtgagagagttcagagaggaagagtctagactgtgggtcccaccccctttctctttctcttttcctttcctagactgtgggtcccaccccctttctctttctcttttccttt

SEQ ID NO: 41961 - DNA, 870 bp, Oryza sativa
ttactaattaagctacctttgttaatattattttatattcctaaattaccctttaggaatcaatggtggatattaattggtttaggaggtacttggggtacctctcaagcaccgtaaaagatctcaatattgtatggggtccaatagaacagaagttttggaaatttagttttggaattttgaaccctgcttcctctacctcttcaagtactggaaaatttagatcgatatcatgttgtgatgattggcgatggcagatgtgtttcgtgattgcctcgtgatagaaaatgtgttgttgatctaaatgcgatggtaaatttgccttgttatggcagatgaagtaatgtttttttttcctcttcttttcagcagcagagcggtatatatagcctgccagtgcttcatttttttttctgctaattcaaaatcgaactggaggtaaaaaatttgggctaatgaaaaatttggaattatggatgcaagttcattccagccgatttgattgcttcggcttctgcttatagcgcagggagcaagcgatcgtgcgcggcgcgctggatagggacagttaatgaacggcattttaatcttttttatctcattccttagttgtcttgtgaagtctgtgaattgaaataattgagaaaatcccttctatatccttgaaattttagttaatcccttctatgcacatgaattttgcttacttctttatataccccaaaatttgattttgatcccttccatacctcttccgtcagttgaccgtaattggccatctaatttctataaaaatgaccattttactctttggatgaacatagaaattcgtgaattatattattaaaaatgtaaaagtttgtcgcataa

SEQ ID NO: 41962 - DNA, 922 bp, Oryza sativa
taaagacattgttatacctgccaaggttgaagatctgtctaaagagcacaaggcagagatggagcagaagatgcaacaactgaaggaagcatatcttaattctttttcagtgactcagcaaggaaaagtgattcaaaaatacaagttccaaatgctagaaggagaaggatcatctggtgccaaaggagagcagaaagaagatgatgataataaaaattagttgatgactttacaagatcgtcttgattcagctgtgcatcatgctttcatctactaatctggaatcttggtcaacacgttgtaaaatctgatcaagtaagtggttgatgggttaattgctgaggagaagacaagaggaccagtatatttaccaagtggtgtttttcccaaatatagagaaatcaagactagtcttgggagtggtcaacctcaaggaaatctcatgtcggcattaggatcagcacaaccaaagcaacagccaacgtcaggagctctgggatcaagcaccatgacacctgagtagctggctcaattattcaaaacaatgcaaatttctgaaagttcacagccatcggccacacagccaacggcaagccagctgccagtaattccttctcagttaactcagccatcttcaggacagccgattgagaatccatcaatcgaaccacaatattgcaaagtggaccctaatgttctacaatatcaacaaattccagggttcaactttaatcagtttcaacctccatcacctctacagtatcggcaggatacacctcttttgtccaagctccagacaaccaatgtacaatcaatatgaacaacaaaatcaagggggagttcaacaacaacctttagccgatataattgcagatgtggtgaggcaacagtttggaatcaaacctaaagacaatgggatcat

SEQ ID NO: 41963 - DNA, 507 bp, Oryza sativa
atagatcagtaatagtactagatagattaagattaaaaccatttgcagttccatggaaatcaagtatactacagaaaaaaaaatgcttttaatgaagatcaactattttatgctcctacaattatcaagaaaagcataaacacataaattccagtgacattattaatgtatatatatgttgtgacaacaatatgccatcagtgatacaaatatgataggtcactgataaagacagaaaagaaaaaggaaatcatggtataccaatgataggcataggctgatttgaaaataacacaaaaaattattaatcacataaaatgacaggtcaggatgttctgatcacaaccaacaggtaaacaaaataggtaacaagtgaattgttatactgacggacagaaattgcacaatttaacaggttcaacaaaacaaactactgcagcttgaaagcctttgtacctttctatgtcataaactcggattgtggcattatgtatctccccaatagca

SEQ ID NO: 41964 - DNA, 709 bp, Oryza sativa
ccagggttataccctgtgaaagtctctccaatggattgtgaggcagaactacctccattggtgtatcgatcggtgcaccagctcccgggcagacatgggtgatgcagacgaacaatcgaaaacgaacagaggacgaggagcagtcgtgcagaagcactccccaaaacccgcctacccggtacagatctcaggcgaaggtgtagttccggaggccctgctcgttccgatctcttgtgcgcgcaagcgatcagaaccggtgaagcagtagcagcacaggcagcggcgcgaggaggaggaagaaccagtgtttggaaagtaaccaacctcggcccggccggccagctcggctcggcgcgcgcgcgtggctttctgatccccacctcaaccggtaaacagggagcctccaataactccctatttaagttgagatactcctcttttaattcccagggtggtattattatccttaacatttattatggccccttgagatttaatagaaaaatcgggcctagcccatttattctaacaattattcactaaattatagctatggacaatctatttggatattgagataaattaaacattttgagaaacaaacttaatagatagtttgaatgatgtggccagaaaagagatgtatagacagtcccaaagacggaattgcttgagaaaccgttcttttgatagcatggagcaaataatc

SEQ ID NO: 41965 - DNA, 653 bp, Oryza sativa
ccgtgtagttaaggcttgtttagtttcctaaaactttttttcaaaaatatcacatcgaatatttggacacatatattgagtactaaaaatagataaaaagaaaaactaattgcacaattgggaggaaaattgcaagacgaatcttttgagcctaattagtccatggttagccataagtgctataataatccacatgtactaatgacggattaattaggctcaaaaattcgtctcgtggtttccaggcgagttatgaaattagttttttcatttgtgtccgaaaaccccttccgacatccagtcaaacgtccaatataacatccaaaaattttcatttcaccaactaaacagggcctaaattaaatggccgtgattattgtttgtgacagtttttaagaatctttaagaatgcaatactgagagagagggaaaatactctctcgccacacacatctcacaaatttttgttgttttccatgccattttacggggaaacgattccaaactcttgattgaatattttccattttttgcatgtcgtttatatatttataaatatataaaaaatttaacaaaatagattaatacgtgaaagatcgttccacaaatatgtagggtaaaatttaacttctaagtaaaaaaataaatttaat

SEQ ID NO: 41966 - DNA, 697 bp, Oryza sativa
caaaattacatatgtaagtcccaaaattacatagtaattatatatgtaagtggtgtgtaagtgggatgtaagtggggtgtaaatttgtataaagtatagtatgcatacgtgtaaaaccttgaactaataaagacgttaagctttaattaatcatatggacagccgcaacgttagcctgccatagcaatatgcacggacaggatcgtattggcacgggacaaagaaaatcggactaagaaaatgtgtcgacacaattctagcgattccgtaaataaatcccttcgaaagcccacaagttcttccagtggagcgatgcccagtctaaatcgtgcatgtgttttattaatttttccacttgattcccgaatttgcattagtttttctacaggaaattcccaaccccgtggactacaactaattcaggatatgaccatatcactcatgctagcaaaataaacaaattaactagatgacattatcccattgttacagggtaaattgatccacatataaatttgattctaaataatggtttagtcttcctaactctttagttaatcgattttgctaccccatccctacaaaagaaaaaaaaatattgaagatagcttctacgcatctttttctccgtaacaacatgggaaatttgaaagcaaggaatcggagtgtagtagcagaagccaacatctcgcaaaac

SEQ ID NO: 41967 - DNA, 535 bp, Oryza sativa
aaacattacattgcgagtggagtggaggggcttggatattggattattacccggacgatgctccccccccccccccccccatatccgatccgctgtcagtttgtgtccagcaggcgtagcgaagcagcgctggcgtagtggttgggttgtgggttggtatattaaaatccggcgttcggttagtgggccgaagtggggggcagcaggtcgatcggtcgatggactaccgatgcatcgaccacgacgaccaggaggaggatcatatcacgccgcggccgcggccgcgcgctctcgctcgctcgcgtgaggtcctcgtctttacagcctgtgctgccggagagggaaagaggaggtggatgccgtttaccaccagagacttgtgtatactatattaccacgtgcccgcgcgaccacgttgcctgcgggcacgcgcggggggcgcacggcgggtgaccgcgacaccctcggtccacggggggcagaccggcagatgggatcacacgtatgtatgtacgccgtacgcgcgcgcgggggg

SEQ ID NO: 41968 - DNA, 662 bp, Oryza sativa
tttctaggtacatatcgtcttcaggtagcacgtaggaaattggttggtttctttcactctctcgatctcccttttgtctctctcactagcacgtccactttggtttttaaaaatggtggattaggtcgtagtgcatcaactaatgaaagcagcgtgtgtgtcgttttattttgcatatctcctgatcaatggagctagcactgcatgcttctgaatggtcatgcacctgtcgatattagcccgcacgatgatccatcaccatcttcttcagagtttattcagacctaccacatcttataaatctctagtacattagtatgtacatatcaggtgtccgacacaattaattcgacggggaactggttatactatggatttcaacacagagatatatctctgatatatacacacacacagtacgtaactagctaactgaaactcttgcaaaaagaaaaaaaaacagaaagaaagaaagaaaaggtagctagcgaactgaaacaataatcggaatgcagcaaaatacggccctatatatgctcgtttttcctctttaatttactagtgctttgtactgtataattcgctcatatatacagcttgatttctagctctatctagctagtgttagtaccacactctcgacgcagcaagttaaacaatgg

SEQ ID NO: 41969 - DNA, 3271 bp, Oryza sativa
tctacatatacgatactcgatactccctccgtttcaggttacaagatgttttgactttggtcaaagttaaactattttaagtttggctaagtttgtagaaaaaaatagtacaccacccattttaggtaattagacgttttgactttggtcaaagtcaaacttttttaaatttaactaagtttataaataaatatagtaatatttataatactaaattagtttcatcaaatcaataattaaatatattttcctaataaatttgtcttggggtgaaaatgctactattttttctacaaacttggttaaacttaaaacagtttaactttgaccacagtgacgacgtgctataacccgaaacggagggagtcgcatttgcaacccaagacaaatttattatgaaaatatttttcaattatggatttgatgaaactaatttagtattataaatattagtatatttgcctataaacttagttaaatttgaaacagtaagttaaaacgttttataatctaaaacggagggagtagtatatatatttgatatatctcttgtcgtcttgtcgaaatggctcggcatagcagaaaccaagagtgacatgccacttgcacctccatgaatgtacgatgacatccatgatgcgctaacagctaccacagctgatatagatgcaaatttatgcacccatatgcatctgcatgcatgcatgggtaagttgaaatgtcatttggtaattaaagaaaaatgcatgcaaagttcttgcatctacctaccgttgttaaactcgtcgatctgtgttcacagaacgaaaagaaaagaagccagataatcttttcgtggtgatgcttacatgctaccagttcagagtgtaatgcttgtcttaacaaagcaaaatgagacatcacatcacttatggcaagcaaccgcgttctctttagctagctagtcactattattacatgcatgctaaacggtactttatccaaccatatgtaactaacaagagcactgcatatttttggagcagatcgcgatcgagatattaagctagctcttgccatatattctaactagcatggtggcccacgcaaattacgcgtctagcattattatatttttctctcatataatagtatatatatatattttctcattatattatttaaatatattaaaatgataacataattttaaattttgcaataagtttacaaaactactaatgtgtaatattcatattatattttatatatgtgttagttattaattatttttaaaatcaaattttagttattcgtatatatcctatatgtactctagactcgtctttttaatatttctttttttcaattccgaattttctgtaaattgtatttctatatagactctatactcttcttttaatattatttatttttatttctgaatttacatattatattttatatacgtgttagttattaattatttttaatatcaaattttagttatttttaaattatatatattcctatatggactctagactcatcttttaatatttctttttaaaattttgaattttaatattctttaatttttaattttgaatttcagttacttctaaattgtatttctatattgaccttaaactcttcttcccatgtttttcttaattttgaattttagttatttgtaaattgtatttttatacggattctaaactctaattttaattttattatgtttattccaaattttagttagttttaaattcctatatggactctatactctacttctaatattccttatttttttaattccgaatttctatttttttcttaattgtatttctatatggactctatactctacttctaatattccatttttaattccaaatatatattatttcctaattgtatttctatatggactctatactctacttctaatattccttatttttaattctgaattttagttatttcttaattgtatttctatatggactctataatctacttctaatattccttatttttattccgaatttcaattatttccatattgtatttctatatggactccagtctcctcttctaatatttcttattttttaattctgaatttcagttatttcctaattgtatttctatggactctagtctcctcttctaatattccttattttttaattccgaatttcagttatttcctaattgtatttctatatggactccagtctcgtcttctaatattccttattttttattccgaatttaagctatttctaaattgtatttctatatggactctgtcttttttttttctccgattaatgtgagaatttctaggccatgagagcgaatgtattggctcttttttttattcctttaattatataatagatagattgctggacgtgacaaatgcccagtccaaaactgattttaagtgtcacgacttccgtacaaataaggtaccaaccctaactacatgatttgcccccacgtaactacgtactagtaagagtatatggcgagagctagctagctagctgtctggactatagttggccatatgggccgcccggcacggcacggcccaggcacgaccgggcctaggccgaggtcagtcgggccggcacggcccgacgaacaagctgtgccgtgccgtgccgtgccagcccacgggctacaaccacggcccaggcacggcccaagtagcctccggccatgccgggctggcccgacggcccggctagcccatcgtgcccgtgccggcccaagcacgccctggcaaaataccccttcaaaggttcaattgaatacaacaaattgacataacacatcaaattcatgaaattcacatgtaattcatcaaataagtcaaagaatcacaaacaattcatcaagtcaccagtttatcaaatcatgcatacatcaagtcacagatttacaaacaaatgaacaattcttcaagtcaccaatttatcaagtcacagtctcacagatttacaatcagttcaaatcaattcatcaaatgcatacatcaagtcatctactattttccatcaagtccatctcagaatcacaaacctcagaaagttagaatataaaaggggtttatataagctgtgattgtgcaatggctgcctcattaaaaacctttataggtaaaaactcacacctcgtgagaaaaccctagaaaggaaaagagtacgcccatagctaaaatgttcatatcaattacaatcatccagttcaagggtttacatcaatttcatca

SEQ ID NO: 41970 - DNA, 2425 bp, Oryza sativa
  unsure (1)..(2425): unsure at all n locations
tcactaagtaagaaaaacgttaggtgattagcatttattctagatttttactttaacagcattatcatgcaggaatataatggcccttttgaacaaatttagcatcctttgtactactggttgtagtttgaagaataaagagaaaattccttatgtgcctgtgatttttcttaaccccttctgtacatctttgaattttgcctcatccccaaatacctatgggtttttagtttgatctatttgtacccatccagttagttgaccgttggattttttaaaaatttactatattttcctacacaattatatgctacttacttcaaaaacactaatttaaatgtggaaaacttaatttgtaaaaaaaaattatttgaatatgtcattaaaagggacaaatttatttgatgccaaatttgaaaaaagaaaaaaattcaaacaaattttgaaaaaacaaatgattgaatccatacaagaatttcaccgataaattaattcaggcaaaatattctttttatttgggtttaaatgttggtgaaaatgttgtctgcatttaatcaaatttgacacaaaattatttaaaacttttaaatttcagttctaactttatgttcaaatagttctatctccttgtttttttaagtaaagtgcataggtagtccttaaatttgtagggttgtgtcatctagatcttcaaacactcaaaatgtagatttaggtcccataatttgttaaagtgtatcatctaagtcccaaatcgacacaacccctctaggattttacgtggcgttgatgtggcatgccacatggacgtgacatgtctttttctttttttcttcatttcttttgcttttttttcttttcttttttgttttcttctcattcttcttttttttttcctttcttcttctcgggtcacagagaaaggaggagaaagaaaaaaaagaaggaaagaaggaaaaaagaaaaattttaaatgggtcccatttgtcagtcaaaatgatgccatgtcatgttcgtgtggcatgccacatcagcgccacgtaggatcctaaaggggctgtggtgatttgggatctagatgatacactatgacaagttctcggatttggatatgcattttgagagtttaggcaggggcgaagccaggatttatgattagggaggtgtgggcagggcgaacaaatcataagtcagagtaagcaatgccgatgataaaataacatatcatgtgttctgccattaaaaaagcttgaatttagctcttaagttgtatcattggatgtttgacagtttgagacttgagacatagtgagacacaatgggagaacggagagacgtgtgaagccgaagcaatgaagacgaggagttgatttgcgttgtctctccatctctttattattaattaattttctatatcatgtttattgataatgtactaactaacatgctaatgcgctagttagtacagcagggagggggtcggatagggggttgttggccccctccggcgagatctanatgacacatccctacaagttaaaggatagctcatgcaatttactctttttttttctaacaaatgaatcttattttcatgttggtatctgtgttttttcctcaataagcttgcccataagtattagagggacaatttagtcattctgaaaaaagaataaggtcaacttgcagaatggtacagtgaggattaaaacgaaaactcaaaagcatacagggacgagaaaaaaatcagtgacataggattgataaaaactcaagagcacgtaaagttttttctaaacatgacatgacatggcttgttttttttattcttatttggtttgtagataaacgggagtttgttcgtttcgttgataagagtctgtttggtacagctcccagctccatccctcctggagctggagctcagccaaacaatttcagctccatcaaaactaggagtggagttgggtggagctctctcacaaaataaactagagttgtgcagctgggtttaggcagctccataattccactctagacccaactcctgaagctaaatttaaaagttgaaactgtaccaaacatgctatttaggttgtttagcatcgattaagtttgtaggttattcctgatctctctaccttaattatctacaccacgtacgtctcgatcggtacgtggccataagtttccgttcataacgccacgacatacgtacgtacgtacgtactcattactgcagcgctggtagtactgtactgtgtgtttttttgttgtaacttgcaaagtcaaacaagacgaactttgacactacgtacgtactcctgtacaaatacacgagagaagtagagaacaatgtgccgcgcctccctcacgctgtcacgccccaggtcaagcggtagagtacgtagtacacgtacagcta

SEQ ID NO: 41971 - DNA, 2624 bp, Oryza sativa
cccatcttccttggccaatcccgcgatggctcgtgcttcttgtctccagccagtcggatccaccagcaaagaagttagggccactggatccgacgatcctgtctttctcgctaatagatgtgatggcatctggttgagggagcatgacgacactcagtagcagcggcaagggggtggtggcaaccagcgggcgaccccggctagaacaggatgtaggggaggagacggggtggagggaagagatggccgggagaaaataaattgatcaatatattaatataggaagggtgtagctatatttatggcaccatatttttcaccaaaaaatagtcggtatgtatttacattgtaaatccttaaattacatatgtaattttagtatatttataatataagtctcaaaattacatatgtacgtcctaaaattacatatgtaaattcaaaaattacatattaattaatatgtaggtagggtgtaagtgtggtataagtgaggtgtaatttctgtgtaagtggcttaaaaaaatcgattatagcatgtgtctacataattttagctaacctgatccggggtcgtgcttgattcatatcatgtaaactatcacggcacgaatctttgtggggatcgagtgatccagaaatcgcctgtaatgaagcaaaaaatgtggcgacagtagtttagcaaatccgtataggaaatacttattttaaaataatttgtataaaaacataattttatttttagaaacatatgttatatattagacctaactcgactttgaaaaagtctagcactatatatactaaattacacgggtaaatcttctattacctccaatcccccattcagcaaattaaaggatgtcgttttagcccgtattgcacataccaatgcaagtgttaaatgcagcaaaatggcctctttgcgcctttaggcatcattaattctagctccaatcaccctgttcggcactgcatgcaaaatatattttcgcgggttgctacgcagagccatgagcttaattaagcgccaactggatttgtttaggggcaacatgagaaaattttgcctacaaaacataaaatgacatctatttgagaaaaacaaaatgctaaaacgacatctatttgggagtagaggtaattttcgggctagtttggtttggttctaaaatgtgccctaccaattcactgtcaattttcaatagtatttcttgtcgtttaggttggtgccaaattttaacaacacatcttttagatagtaaaaattttacccatctaaatttggtagtgtcaaaagttgcccaaactttggcactaccaagattttggtatggaagcaaaccaaattggcccttcgtacagatagctcaacctgtcatccatcgaaaaaattgctcgacactaacgactctcatgctcttgttattctactaagacagttttaaattattgctcatcccgacctcaaaattcttttctttaatgaagtccgacactccgatcgacctcaaattcttaaagcaatccaaccaaagatttgttgagtgtttcatttagctttcatcctttacctgcctttgacaaagcctctgcagacttagcgggcgacacgcacgcataagagcactgataagtcggtcgaacgctcttctcgcgcgcacagtattttatcctctggctcatgtgcttgcgccactgcctacgtcaaatgcaccagctgatgaatcgcgtgcgctgatgcacaaacccagcacgatgacacctcgctgcaagcaaaaaacttatactaacaaagcagcagcagcacgcgctgcattattacttgtatattaaacgaaagttagttcctcttagatttgggaaaacccggatgctgtgcggcgttcatcagcgaaccaaatgatagaggcttaatcttctaggctacagctttcaaatggccacgtcactttcttccacgattgctccggggaatcaagccttctcacgtacagtggaattttaattttctgaaactcccatcaaaatcgtagcgcggatcaaagaaaaacgcagtgtgatagtggcaaaatcgcggtggtgatagaggaacagcccaatgccaatccgagatcagtaggctggaggcccatacaaatatagcccaataccaatcgctgtggtaattgtcctgggccgaccacggctatactggagcccatgtgctcaggtaaggccatgacgcttctagcatattcttccggaaatttctggagatctcgaccatctcccacaagccgaacgcaatctgctcgttcgttcctcgcttctgggactacggaactcggaattgaggcatcctgcgcaacttgatacaagtttcaatcaagagattcaaggtacggtttcgtttctgtttctctcccgcgatttgccctgcaatcctgctttccttgtgtcaaaggtacagaatttctcacatcgatcgtagcagatgtgtgttttcctaccggaactcgttacctccagtctccgctattctttgatcgcttgtttctgggcgcctcgttttgaggcaacaaggtggaatatgactttgagtgtgggtacaccttagagatcaggaatctgacgcgtaggaa

SEQ ID NO: 41972 - DNA, 684 bp, Oryza sativa
gtcttcagcataacttttggtctgtacttaccaacatcacagcgtcatgtttggtccatccaaattggtagtcgtctgttgctgttctagagatagggctgcaataaaattgaggttacctaaatgtgataattccatcggaatcaacacctttagcataccataaattgatggtgttcttattcttacaggatttacgtccattgtgtaatgttgagtccgttcaacttatgagaacttgtttactaagtaggagagcagccaaaattacctatcgctgactctctatgattcgtcataattctttgtgtattacagacaaaggatgagtggctgtctacaacacaaggcattcttctggaggctgctaagattatcaagttacatggcgttgaactgggaagcaccacgcagtgctgctgattacggtgcttttggaagttctaagtaggtaagtgcaattaatttagctgttgggccatgcagataatactttccaaaacacagttccggctgttataagttcacatcgaaactgctactatgttaaaaacacgtagttgttcccactgtagttgttccacttctgttcccacattacgttcttccattccatttgtcatttagcatccggcagtttcaaaacgagtttttacatttgagtgcatatttgttcccaagttt

SEQ ID NO: 41973 - DNA, 641 bp, Oryza sativa
ctcggcgagttcgcccgccgcctcgcctgcgtcgatctccatcgccgccggcgtctgctgcttccgccgcatcctcgctcgctggtgagcaatccatctgttacgcgcatcctctttctcatctctctctagccacacttttacttgcgttagccgttagccctaccttcacttcacttctagatccggaagcctttttgtcttaaccctagtaccagtaacagcttagtttgttcgcaagaaaatttggggggttcaactaagccctcatgcccccacgttaggtcctcccctggcttgattttttttttttagataatggataatctggattgtgcagagtgttgagaagttctgtggctctgatggtgaggctatgtgatatcgaatggttttgtattatttttgtcttttcaatgaaatttgttttataagcaagcagactgctcaagaatggccctcagtgtctatgcaccaccagcagctgcaatgcagaggcttgctctaggcatatagttatcatatttcgtgcttacaacccctaattgctttgttacattagcttttttaatcttttgctccaccctattgcttagtacataagaacatcctctaccacagattaaatagccaccttttcg

SEQ ID NO: 41974 - DNA, 1841 bp, Oryza sativa
tgctatagttgccatttttttgatattttgttcagatctgagtgctatatgttgtatgtctcaatatatgtgtgtatgaatgttcagatatactagtcattaagtcagcgcaatgagtagcgcatctatgattattttttttctatatctcatgatatatatctatttttttgttttatacaagtgaagtgtttgcaatttgattattacactcggtgtagcttggtcaaaattatacatagcttcaacttacccatatggatagaagtgaaaaactactgaaatatatctccactttttaatataaggaaaaaattatcacgattattgtttgcaagagttgatatcataagtagaaactgaaaattagatagtggaactataataaaacactggtaggtctggtgtcatcccatcccaatattgacaatataggctaagtacgcatagaagaaaaaacaaagacatccttctacatttttatattggcatttcttaaacaaattctgaaaccaattaaaaaatagaaggcacgtcacacctacagtttttcttgcattcagtaaatacattggataaaaacttttgcaggatcagtaattttgcctcatgaaagtatgtcctataattcaagaggctaacaataatttcctatggtgaaccgtgtcctatcatttacttagtaggagctgcagagagtgaccatgagtatccaccagtaaaaaattacttttgtataaacctgtactagccacctgtgattactctttttatcataatatacattgcattttatttataaatagaagattataaaacttgatggaagcgttaaccacagcaccaaagctggtctccaaagcatgcacagagaagctagcaaagctatttaggttgcaggtaaaatgacttgctttgattcttcagcatcattgatacttctagttaaaaaagtggtcattaatgcatcacctaattatgttctgaactcagaatttctttactatcttgttggaataaactactccctccatttttatttacatgacattaaaaaaacagaggtagtttttccaaacagccatactatcattgtcttcatcatatttcagacattcttagattgctattcatgaaaaaccagagcatgatagaaacacaaccattaaaatctagaaatgtgaaaggattacctttccaccttgttaaaatctggaaatgagaagggattacctttccaccgtgttcttcagttcaacacgcattcaagctatcctatatttcagttctcaatccacatggaacaacaaatatgtgcttcttatagatacagtataaccattttcgtaaaaaaaatcgatcttcaattgacatggttcataaatcatgtttgattactttattatttgcttcgtatatcctcacaattcattcttcagtcagtgaacacacccttttttaagtctattaggcaaagcaaccaccaaatcctagagaacttatggctcacagcaaagcagaggctaaatggctaattatagagtaaaatacatttgatctttagtattcaaattctattcccggttaagcaagttcctactcctctatgtgctgttattacacacatatacatctagaaatacattagtttggtctcttcaattgataatagtgtttaagggcactgataggtgtaatgctgaagttattcattggacatagaaaaggaagctattgattccttgctgtacaaaagatcgctgaatttatgatatgatcaacatataaaaatgaataatacagtacaaatacgtcagcataacaatatcaaatactatcat

SEQ ID NO: 41975 - DNA, 2455 bp, Oryza sativa
tatttctttcattactttagatatggtttgctgatgtagcatcaggactaaactagtgtttgtcttttaatcacaagataactaaaagtgggaatttgtaatacaactttcgatgatactagaaaacactcgagctagtcagtgttagaatatcaatcctggatagaacccatctaaaacaagtgcagccgacaatgacaactttgagagcataacataagttacttagcggtggagattgagcaatagcagaacataggctagtgttatgggttagggttcataggggataaacaccgtcgggaggatagccgggtggcgacgactgctagggatgagagggggacttaggttggggaagactaattctgattcattgcttaattagaatgacgatacaatccatccttatatagatggggggaggacccaatctaatcctatccaaccgactctatccttatccctagggcctcgacccctcggcccactacctatgacacctagattgatttggacatagaaaagaaaaagacttacctcacaatagtaatttttgagagattaatcattttagaccaaagaaagattagagatttaaactaggtttgagggttagagtttggctagactagtaatttagggtgtttactgtttagggagagtatttgatctccctaaaataaaagctctcatattcagagcgaagggtcttaagcgtagaaattcatcatcacctctttcagctactgatgttagtacactaaaatcataaatatctcggagctccttttatattggatgtatagtggtacccaaaaaccaaaggtagttttgtgtagcaagaaaagatttttcatattattggcacaaccagctctctattgtttttcttcaaattcagtttgtttgagtctctcgctctactatttaatactgtataatgtaattaggggtggacagaaagctcgtggctcgttagctcgctcggctcgtgacaagctcggcttggctcggctcggctcgtttcatttttctaacgagccgagctaggatttgagctcgttagagataacgagccggctcgagctggctcgcgagccgctcacgagccttaacgagctaagccttggtaagttagcaggttgcagcccacaaccgaaggccacagcccattaggcccacaacatgaaaaccctagcttcctagcctcccacaggacagcatcttctttcttcacgcgtgcgcgtctctccactctccacgccgctccgccgtcactcgccaagtcgtcgtccatcgctcgcatcgatgttccccctcgcaggctagccgctcacgtcactcgccacccgccgccgcctctatggcagcgccgtgcgtcctcgtccgcgtcggcagtgggctccaagcatgatgtcgtctgcatcggcagcggcaatggcacaatccgcacgagcaggagcatgcaaatccactgttggcgccacgagatccaaatcgagagcaaaagttcaagcttgtcctcatcgccgtcagcaagttgatatgtttaattttggttggtcctaattcactaggaatctaggtctgcttggtttttggtttggttccaatgaaacgaggctttcagatctacgagcttggttctgttgatgggtacaatatttcaaattgatgtgtacaaaaattttgtgcaagactttgtgatttgtcgaatgtttgtgttgaatagtcacacattggttgtggaagtgcaaaggacctaagatataagtgggggagcccctcacctcaatggctagcttttggggtgggaaaggccctttacgatcctacagtttgatctgttatgcaattgaaaaattattgttggcagccacaatcttcgatttttctttgaagcgaaagatttttgatgggtcactggtgtattgactcgcgagctaaacgagctagctcgagctgccaaccgagccgagctagctcggtatccacccctaaatgtcataggcagagtaggaaattgacggatgtaagtaagcaaacagacggatgtaaagcagtaagcaagcatcagatccataataataaactttggcccacaccatacatgagaatgagatgtagaaatctccaaaagatagataacgatgagcaagtctctagatgagtttacctttggcgtggaggagggagagctgttaggggggtgcgtggcgatggcggatgagtctggagtagaggaggaagaaggatcaacgtcctctgttcctcccactcccactcctagtgggccaacgtcaccaataggccgtgctgggctagactcaactgtaagccggcccgatgaacaagggcgatgaggaatcttctggaaggtgtggtgccactccggcagtcgcagcctcctcaacatgggaatggcgacagttgggttgaggaggctagaggt

SEQ ID NO: 41976 - DNA, 860 bp, Oryza sativa
tggtcattgaattatctgttaaaatcttttgtctgtactaagtgacaatgacattttgcatgctcactgtaatgcagaatacattgttcagaagtacaacccaacgcacacctttcagttgtattaagaggatcatcttgttcacttatattagtcctaatcatggaacagcggtaggaaaacttgcatgtcaaactgcagttaaggagtacaccgacatggttgtttccgtggagcccttttgagtggattccatgaactatttagaaatattgtttatgcttgtaattttttcagtcttcaaaatgatttatataaactatacatttttcttgatgaaatggatatttctgttatacaactatattttaaaactaaatattaaatattttggaattggagtatatatatgcctttttgggagcaagtccttttctatttacaaatcaatttcatatggtctctgaagtctgaacagaaatggcacctcaaacagtgtgaacgactgctaagtaacacctaatccatcaacctatatccatctatagtataatcaactcaagatcttgggtattaagcattaagaactaacttaagaaatatgtgaacacagacacttcacaacaactctaaatcaccttacatcattagaataacttaaatctgattcttccgagaataagaaatgtacaaaatattaatttgtttatctttgtttatgcttgtcgtttccttgtgtgaggtcagcactatgtcttttccatgctacttcccagagttgcaaccagctaaagtcaatcccagtgggacatctgctggtggactcccatatattcagggattcagggcagagagcagta

SEQ ID NO: 41977 - DNA, 1950 bp, Oryza sativa
agcatgtgacagaacctcatttagcaaattagcagactgatcctccagaaatgtcattattagacagctaaattcagaattagtaagaattaagggaggagcagtctaagaatgttctaaaaatgcaggcttgcaacaacgtgaggaggacaagaaagtgcaatatatcgctgattaccaatctgggattttctgtattactaatgatgtaatagtagctactgacgtgtggacctggacccatatgtcagtgactgttactacaccaacaatactggagaggatgatatatgccgctaactacttttaggatacttgcatgtcccatttgatagatgaagacaagatgaagagctttttttcttgtgatgtatattagctatggtggttcatctccctcatgggcacattggcagtggttcagacaccattgcctcctttgagccagcactttcacaccaaactgtaacaaccaagaacatgaaggtgagcctccagatcagtgaaaaagaacaagaagaagtgagtgctaacctctgaagtttctttcctaaatttcccctttttgatcacttgcaggttctcttcaaaggtagaagcaccaaaataggcttaggaaaaacaaagaagatgggagaaacaagctgcatatatgtgtggggcccacaagcaagagagaaagagagagtagaaaaagaaaaggaaaggaagaaaaggctaatatgctcatcttttttcatagattatactccatatcagtagtatattgtgtcataaagaataaaagagatatcagactgccccccctctctctctcccctttctcttgcacacaatatcatgatcacactatatttttagtcataggaagagatatttgagaattttgacagcttcctgatcttaggtttctttattgaactgatcttcttttatcagtgggataaaatgttgccctatagctatatttacaaggacaaaccaaatgttttagtatataccagaatcaaacatgcaacaattaattaagtattatagaactaaaaccactttgttaaaagcaaggtctaaattatctggagaaagtaagaagcaacatgtgatatattataatattgtctagtttttgtactaaggtgtgtgttgcaattgatgcaagtggggtgtagcataatccatacaagtaagatgccaagaatggggaggagagactgtgattatggcaggaacatgctcttaatcagtatacagaagtactactactaactacttgcaattactccaatctctctcttttctcattaactgcaatgcataatccgtactatcccgtgcaagtaactcaaaacttaaggcctcggttagggctactaaatgaactatctgcaaatcccgttgttctcccgttgacaatcatatacttagcatattactcattgcttgtttgttagcttatcaagcacatcaaaaaaataaaatttttaaacttagttttaagttatcttgaatcatcgtttattgtcaatattatctttttgaaccgtcaataaaaaatataaaaaattatctatgaactttcctttttctgcttcattcttttttatggcttatcagccatagttcaaacgatccaccgtagctcaaatatcctactactaattatttttcagctaaaaaagttagcttccattttccaaccttacaatcaagctaacacagtcactgtcatataaatagtatactcaccctaatcaagctaaatcttttattttcctaatgactgaactccgaaataatattaaattagaaatctaatgatctagaagatgaaaaccacctcttttctaatcaagctctcttttgtaaccacccaccaccacagccatcaacaccaccaacagtccaacactgcccaattgcccatgctccagacttctttctactcctaca

SEQ ID NO: 41978 - DNA, 707 bp, Oryza sativa
ttcctgcacccctgtttgacttagtgcttatactcatataagtcaaaatttaaattttacagcttaatctgaatttgagcttttggttttctggtcgtagtttattttaccgtatctgtcttttagacactaatgacacgtatataaaaacttcacccacaataatcttttatatcgggtgtgtttagttcacgcaaaaattgaaagtttgattgaaattgaaacaatgtgatggaaaagttgaaagtttgtatgtgtaggaaagttttgatgtgatggaaaagttggaaatttaaataaaaagtttgaaactaaggctgtgtttagatccaaagtttttcagtcctttttccatcacaatgatcacatcaacctgtcatacacacaatttttcagtcacatcatctctaattttaaaaaaatctaaactttacgctgaattaaacacagcctaaactcggccatgataataaacgattgggataaacatataaataagaaacaacgagactcttgatgtaccaagccgagtctgaagaagagaaaagagagagagttcagaaaaaggaaacgaccctattctgatcagaaaaattcaatctttctctctctttctctcagaaaaggtcgagagagaaagtggatgtcttcatgtgaagaccagagagaagacgagaggcgatcgcagtggagtggagtgaagtact

SEQ ID NO: 41979 - DNA, 886 bp, Oryza sativa
aggattgggttctctagctttttctctgcaggaactttgccaacgcatcacgataatcaaggttgattaaaatcacgatcaagatccccaatcggaatcggaggtctctaaagtaggatcgcaatcatataatcgtaaaaatcatagattctatacctactagaatcgtagaaccagacccccttaattaagatctcaaagttgtaaaatccgtacgatagaacagggttcactttctctgtttgggacttttgattgggggtcaccgaaatttcggaaatttcggtccgaaatttccgaaattttgagcaaaatttaattgaatttgaacaaatattatccaaattcatgaaaactttgaaaaattgaaaaaattcggccaaactaatatcatatcggtcggtccgaaatttcggtccgaaatttccaacactgcgatagaatcgagatttcatcgacacacccctaataattattcagtatggctctaccaccttgatgtgtaatcgtctgagttcaataaaagcttccgttatctaaaaacaatccctgataattgttctttatgggattcacagcactaaaagtctgaaactgaatcatctgggcactgaaaaaagaagaaaacttttttttggtttgcattgcaggtgtgtttgcagggacagtgaggacagaaggctgcggcgacaccttcttcagcaggacgtacaagtcgctgttctgcaggaaagggccgtgcagggagcactgcgacaacgagggcgccgatggtggctattgcatcttcttctacctcttcgtccgctgcatctgcaacgagaaatgcagctcaaaatagtggatcctcctcatcctcctcctgctgctgctggtgatgatgata

SEQ ID NO: 41980 - DNA, 2414 bp, Oryza sativa
ctaccatgagaagaaaacacaccagattctgaagctgatacaacactgtaaatagtactgagttcatctcgcagtgcggcaatcttagatatcttttccttccagtttttgttcaaggtactaatgcagttctgattctcccataactttgtctcgaactctcgacgcatgctagtaatgtagctctggatcatgatgttggagacctccttctgcagctcatactccaactggtgaaagattgcaaaaccatacaaattaaagttagtctaacttatgggattgttttccacaatgcaaactccaagagagtttttttttagataatgtcgaagagataattatagtgaagtcaaaatgttgccattcaacactccaaattccagaagaaaatgcgcataaaagtcaagaacttctcttagcacgtgcatcaaacctaatgcacgtgcatccaaactgtttaaagactgactaaaagatgagattttctcataaaactaggagaattggagaaatttgacgatgccaactgatattcaccagagattcagttgaccttttattctttgctttaagtaaattgcacgctaaaagtctacaaatttgtcgactatatatctacatatagtacatactcaacgaatttccccaagtttaaaaacttcatatctactgcataatctgctcaagaaaaagaaaaaaaaactgcacacgcatatctgcaagacaaccacctggcaggaagacaaactaagaactactacagctataaataactgaactgaatcgaatcaattacaccgtatcagactcagaactgaaccagaaattcaaaacttaaaccaaccaaccgacctgaaagaaccaagaaacgaataaagaagaaatgcacgatattcccaatgggttcacgaggaaggaacactcacggattcggccgcctccatggcggctcgccgccggcaagaacacggcaaaatctttccctcctccgcgcgcgggaaaccaaaacgcggagaggagaaagccacacgcacgaaattgaaatgggagcggaggaagaagcgaaaaaaggagcagctttttccactaaaggcgcctcctttttccacccccactactatctctcaatcaatcacttaatttctcacgctaaatttcgcacgctccctgcggttaattagcggaaaaccaagagagagagagagagagatagagaggaggttgcagtgacatctgtgtggagattggagagaagcggttgggaatggaagattggaagttggcaagaactgtagagagagagagagagagagagagagagaaacaatggaggtggttgctgcatagagagagagggtgataatgagaggaggcaggaagcgtgtttgcagggacagagagcgtattagcgaggggaggggggattagttgcattggggctgaaagggcttgtagaatagtggttacaatgacccgagtagtatcccaagattctgaattcaaatctcctatggagcgaattttagattgggttgtttgcagggctaagttctctacttcagtatatatccggttggatgtagaggccgggtaaaaaaatacccttctcttaaaaaataaaaaaaaaagttgcatttgggctttgtcggggatgtcacgggccacccgctccactgctttgagattcgtgctgcttccacttttttttctttttcttgctggaactcaactttttattatttatttttatttttctcgcttgtgttatttttgcgctcccagctcctcatgcaggatgtcatgtgaaaataatcgtactacgtcctttttaaaatgtatataggttattcgtcttatttaaaattttaatataaatatataaaagtataagttaagattatattttatttgatgataaaacaagtcataactaaataaatgatgtttatatcattttatgaaagaaaaaaaagaagagtaaagtccatcaccagtccctaaacttgtatcgctgtgtcatcccggtccctaaactcgcaaatcgaccgtttagatcctcaaacttgttcgactgtgtcatcccggtccctaaacttgcagatcactcgtttaagtcctccaacttattcagttgtgtcacccggttcctaaacaggacggtctaaaactttatatcaaaaaataattcataacttttcatgtgaactctaatgaacaaactttatatcaaaattgtagccctcgacgcgacctacaactttgtagttgtaaagtttttgaactaaaactgtttagggtcccaaaatattgttgcatgtttatagattttaaaattttaattttaaaattatattttgggacaaaaatgacttaaaataaaaaaaaaatcaactacaaagttgtagatcgcg

SEQ ID NO: 41981 - DNA, 726 bp, Oryza sativa
tcgtatacactcataaatgtgacttttagtatttcaccgtaaaaaggtacttcctgtggacaaaattaattgatgtttaggacaaccaagtcagtactcctggtacctagcactgtaaatctagagagagggtataatcttatacacccttcgtcccattttaaatgtaattgtagattttttttattcgtcttatttgattttttttattattaatatttttgttgctattagataataaaatatgaataatactttatacgtgacttattttttaaaaatatttttataaattttttaaataagacggacagtcaaacgttggacacgaaaactcacaactagtaagttactactccctccgttcaataatataaaggaataatatatgggattttggagggatgtgacatttccgacggagggagtacattttaagataaatggtgctaaattgcaaagaaaataagataaaacatgtgccggaaatgacaaataaaattgagtggactatatagtactgtcttttttccccttttcctgaattagatccaaaattggcctttttctcattttattctgaaaaaacatactagtgttcataagtatgtgtcattgactcattttctataataactcattaacatgtgtacttaacaaatgtttgctcatagatgctctaatggctatcaatctaaactcaagaatggtatcggggcgcaggaa

SEQ ID NO: 41982 - DNA, 590 bp, Oryza sativa
cctgggtgtttgagaggcagaggtggatttcgacatcggtggcagccctgtaggtggcggaggcataggaatccagtgaagtggaagcggatcctttagctcgcgtctggttggctagttctgattggatgatgacagatgaggtgggcttactagcggaacgtggcatcaactcacttgaagcggatgaagatgacaccagcggagttttgtagcgacaacgcacaagctacatgacctccactcatcgaatataatcgtttcaattgaggatgtcaagaaatagggatgtgtcaagatcgtctttttttttgtgtgtgttctcctctttaatgaggcatgagtctaagcgctcttgtatcattctggttatgtatatccctcgtgaatatagaggccggattaatgaaaatccattatctaaaaaaacaaaaataaattaagccaaagcatgcacagtccacttggcgatagccctggccgccggtgccattctcacccttcgcgttctgcacgcggggatttgcacattttgtgtcgctagaaaaaaaaaggcaacaaattattttttgtaaaaaaaatactaccat

SEQ ID NO: 41983 - DNA, 626 bp, Oryza sativa
cccaatccaatctccgccacgcctctccacctagcatcatccgtggcatcggccccaaaccgacaaggcttgttggatcatgttacttcccttttcattctcctgtgatctttaccgatcctctacattgtcccatccgctgtatcaattccgtctttggtaacttgcccctgctatcagctccgcccttgctaactaccttctctaccggtatgttcttactatgcttcccgcatactcctctctccactccctcacctatccttgaattttaattcggacttcaccaagctcatcaatgatgaatgagaaggttgatcgggtagaaaacatggagcggattgataagtcaaaatatcgcaaatattttgtttttgaatcccatttgtgtgtggttaggaaacttgcacattaaattatcatagtagtatttcacatgttacacattttgtccgagacattcacatgtttcatgtaattaggcatcactgtaaaatatgtgctaacttgggtaatgtacatacctatcattctgatgcttgctgtgtttgttggcaatgattggtccacgtgtcagttctctattggtagataaatctagattattcatttgaggaaacaaaaca

SEQ ID NO: 41984 - DNA, 1665 bp, Oryza sativa
attattgggctatcactaggaagtcatctcaatcgggacaaaaaaaagtgcccgattaagatatagtcacgtaaacatattagatgggtataaaactcagacccatcacggatgacatctatcgggccgtagtttaggaccgattgagatagcattccatatctcaatcgggccccaagtttacgcctatcacggatgacaatcatccgtgacgggcgccaacttaggcccgattgagataacaactaggcccgttacagatgactcattcgtgacgtgctgtatactaatgcccgattgagatgacttaatctctatcgggcccatcaccgatgagtatttttctatttttcatatgaaatgtttatatttgtaagttgacctgtagtaaaataattaactacagtataataatttattttatttgtcaaaataattttttgggtagtaaataatttcaaatggaaaaattatcaaccacaaggttatataacttatcaagatttacaacttttagtttggtcatttttctatataatttttttaacagtttgaatttgaatttgaaaatatgacaacttcaaaacaacattttcaaatataaatgatttcaaatggaaaaattgtcaacaacaaacttatataccttatcaagatttacaacttttagtttggtcatttttctatataacttttttttgaacagattgaatttgaatttgaaaatacgactaattcaaaataacattttcaaatactaaatgatttcaactaaaaaagtcatgaacaataaagttgtataactcgtcaagatctgtaacttttatttttgtaatttcttcatccgataaagtgttggtaacattgttcacaaaatttacatatatgtgttatagtttataaaactagatgaaaaatatgtgaattttgtgaacaatattattatcactttgttggatgaagaaatgaccaaaatgaaagttataggtcttgatgaattatataactttgttgttgatgactttttttgttcaaatcatttagtatttaaaaatgttgtttgaagtactcatattttcaaattcaaattcaaactattcaaaaaatgttatatagaaaaatgaccaaaataaaagttgtaaatcttgataagctatacaagtttgttgttgacaatttttccattttaaatcatttactacccgaaaaattatttgaatttcttatattttaaaattcaaattctatgtaattcaatcaaacccgaatagagaaatgaccaaaataaaattggcaaatcttaatgagttctacaactttatttttgacaactttttcatacgagttcatttagtatcataaagttcaatttgaaattcatttttgcctaaaagtctgatttacctcctcttccctctccaccacttcaaaatttcagcaaccttatcttctcttctcactcagtcctctctcaatctccaccttatcttctcctcttccctctctcactcaggcggtggccgggcggtggtttggcaggcgacggcgagacggcaagagcggcggcggcagcagagaggcttggcagcagtggggagggtcggcgacgctggcctcagggcggtcggatccggggttggtggccctggagccgccagatccgat

SEQ ID NO: 41985 - DNA, 666 bp, Oryza sativa
aatgtttcactatatatggatcaaatgttgcagtgaactgaaacattttttcgttatttgctgaaacattatttttatataaggtgaaacaacacctgatttaaatgagtgaaacattttcgatgaaaccattccgatatacctagtggaacatcgtgcaatatttaaaaataattcaataataagctaaatttttttcgtcagaatatatccatgtgtggtcttgttttgaagatttaattgtaatgaatttaatggtgcaatcagatcatgatttggataagtaatttaagagaaaaatcagtttaaagtagttttgcacgtaaatcggctgctgacgtcatgctgacatcagcgcccgattttaacctcttcccatcgggcgcctgagccggagtcgcgtccttgtaagctggtagtaattcttttacagccatctaggaatggtgccgtatgatgtgagtaaatttattacttttgaagggggtatttatgtgagtaaatttgtcacttttaaatgagcagatgtgggagtctgggagtagatggaaaactctgggccagagtaaattcgttagttttgaaatgtggggagactgtaaaaacagaaaactcggaaagaaaaactaacagcaaatattttactaaacacaaaaacagaaaaac

SEQ ID NO: 41986 - DNA, 575 bp, Oryza sativa
ctaacggtgagtttcctttgctgtgcacacaagatgacgaaatctgccgctgcaagtcaagttcactttgtgttcgtcctttccagattgtttatgtcacttgtagcttaataatacgagtacaaaatgaaatataatatttttgtacgtacgagaatatgaagtactttagtactagtatcctaccaagtcctaccatataaaatgcgctatttcataccaatttaggtatgacttgtgatcttgctctgtcggacttgttttccagaatatttgagaaacccagatcatgaatcaaaataaaaatcaatgttatttaaaatcatgtttgttacattatgatgctactttaaatcacattaaattctaaacttcaaaattgattgagtacttgttcactattgtttgcaattttcttttaaacaaaacacacatatatcaaacatcaaaacatcaatagtagatgaagacataagaaacttgtctgttggattgtggatgatccaatcgttggcgttggctttagggtttaaagatttgtcaaagaactaaagatggtgtctaatactacatgt

SEQ ID NO: 41987 - DNA, 2319 bp, Oryza sativa
tctaccataagaaaacataatcgttcaatataaaagaaccttgttaaaagaagaatccaaatgtttttcctcaaaatgtagtactactaaggtgtgttcgggaaggctgggtctcaactccctccgcctcgttttctacgcgtacgctttccaaactgcttaacgatacgtttctttttaaaagtttttatacaaaagtgctgagaaaatcatattggttcattttgaaaaaaaatagctaatactccctccattcaataatataaagcacaaccacttttttatatctttcataatataaggcatgcatgcatgccattacctatgatatattctccattcaattactactttttaaatcctttactttcatattctctaactctattggatacatgcattgtatttattaggatgatccaaactacaagatgataataattatttcttgttttttggttaagagtggttgtgccttatactccttccatcccaaaataaatgcagccatgattttccgcgcccaactttaaccattcgtcttatttgaaaattttttgaaaaaaataaaacgtaagtcacgaataaagtattattcatgttttatcatctcataacaacaaaaatgttaaatactcccttcatctatttttgatagtcatattttatcttggcacacagaccaaggataagtaattctacttatcatccatttaaatatgctactagtcattcctcgtaaacaagcgttttattaatatttacatttctcgatgcacatgtagccaatcttgtgtggatgaatggagagtcacacattaaatccgagaaagtcattaagatgataagttgttggattgaaatatgcctatcaaaaataaattttttagatttggaaatatgactattaaaagtagatggagggagtacaaaaatttttttaataagacggacgatcaaagttggacacgaaaactcacagctgcgcttattttaggacggagatggtattttagaatagagagagtatttaattaatcatacggtaacgagtcgctatatttttcgtgagtgcggttggttggcaacactggctgccgaacatgttatctttacccattccctacgatttattacacacccccgcatgctcctctctctctctcataaactcgcatctcccgagtccccacctcaccgacctccaccacacctcgccatcctcctcccttgtcgcgcacacttccccactcgcctccgcctcgcccccccatggcgatcgccggcggcacgggctgccgccgcggcctcctcctcccgcccctcctcttcgcggcggccctcctgctctccgccgcctcccccgcccgcgccttctacctccccggcgtcgccccgcgcgacttccagaaggtgatccgattccgaacctaccctctctcctctctcctccccctcctcctcggatctagcgttaggaggcccctcccgcccgtcggtggcggcggatctggccgtacggggaggcgctggtcccagatctgggctcggctcgatgccttcgtccccccctgcatttctggaggattgttcgcgcgtggtttagggttttatgggagtggcgagtggaatggtgaatatccggacgaatggatgggtttaggttcgcgtgtttttttatttttctgggctacgatacgaggggttaagggagagcatttcgcgggaggcaatgcctatctcgccttcgattgcctgtgacttatactttggtgagatagcttgtattggtgttggaataatctgtcgtactgtatttttgctttttggtggtaggatcatctgtgtttagtttagtgtagactgtagagcgcacaaagaatccagagggagcaattttcatgtaggatgacctaacgtagagttttccattttgaattcatgtagaggcacggatacgttatgggcgttgtttggttggtgcttgatttttccattttgtcgtgttgggattttgtatttactggtcctataactacgtttgtgtttaggttgcggatacgacaaaatcaccagtaattgtttatgttggctgattgggtaatatagttattactgagtgtaatattaataaaatggaataacaaaaactggagaaacagacctgagctgaagcatattaaggagttaacttttggtagtgtgattgaagtgcccttgataatatctcaaaacatgtataatgtgagaaaagtgggtggtgatgggtagagttggtagggtcaaaggtgccaactattagtaaacgctgtaccttat

SEQ ID NO: 41988 - DNA, 627 bp, Oryza sativa
tctaacgaaagctaaaaacaattcacaggatggtatcacaaagcaaattattgtggtgccactcattgcaaaataaaagaaatactgaaggcaagacacaagtcattggtgtcctgtgaggctgtgacaccaatgtttgtacattggatccgctccaaattaaggaatactccttccggctaaaaaatttgatcctaaaaacacaaggcaaatttagaactagtagtaagagaataaaataaaatgccctttagttaaagtgcacctaatcattatcacttacccaattagccaataaagtaatacgtataagattcttatcggtattaattgcaccatatacaaaatacatagatatccaccaaggcgacaaattatttgaaacaagcaggagattgaactgctacttaattagcgccaaacaatacaaatctcatcatacaccagtacaccacgccctatagaactttgaaatgaaccagaacacaaatacactttccacttcatgagtctgcaacaagcacatccattgatcaattatggctctaaatataaatataccaccagatgggggagttgaagaggctttacctgagacctcaacaagtggctgaagaaaaaatgaaa

SEQ ID NO: 41989 - DNA, 1091 bp, Oryza sativa
taggtggtttttgtgttccgagaaataaattcttggtattcgtgtcggatatatttgatgattatttgcattagagataattcttatttgttttcatatccgacctattcggttttgtatctggaaaaaaaaatacaaagatgaatacggtatgacccttatctgcataaattataaaaatacaaaatcaaaattatcttcataaattatacaaaaaaatagaaaaatgtttgtagcaacaaaatcacaattatatgcatgtaaattcaaatataaattcaatgatattatttttgtcaaataagacataatttataataaagtattattggtcaaaatttaaagaactgaatcttaaattgagtgcacaacttactaagtgggacagagggagtactacactagcttacccccacggtgtaaatattttttcatcttcgtttttattaaactgacaacttaaaataatgcaccacttttgttatagaggctataaacttctatattaattgaagaaaaagaaaaataagttcaaatacagaaataacataaatttgaaattaaaacaagaaattttcaaagaaaagtctatctaaacataacatgagattaattaaaattgagaataaacaaataaaagagttcaaataaaaatataatttgggaataactaaaactcgtaaaaaagaagtactaaaaagaggagtcaacctgtaacacaacacgagattagttatattcaaaataaaaaaaatataataaactatattacaatactaattccaaataaaatttaaaagaatcatgaaaatttgggaaaaaaataaaaataagtaagacaacataccaagaggagtccatagaatatataataattaaatattcaaagtatgatttaaaaatatagaaataacacgtataaaataacatttgtggggaaaaagaaaaaagagagtccattcggaaatacattttatatataactaaaattggatgtaaaagttatggaatattgagagaagtgttggtctaaaacataacacgagattaattatggttcgagatgaaactatatttatctataatattat

SEQ ID NO: 41990 - DNA, 1096 bp, Oryza sativa
ctcctgaaccatgtaactaagtactagtcactgcagtatagtgcactgaatgaggcgaagtggtggtaacaagaagtgctcctgctcactgttgattcatgcggcggagcccgggcagctgcccatgctagccgggcgctggctccgccgctgcatctgctaattccttttcgagaaaagatgcgatgtttttgttaacatttgcaacgaaagatttgcctgagttttctttccacaattgaggaacaaaagggatgcatggtggtttacaaagagattttttgtttttagagcgtgacaaaaatttgccaaattccattgtcaatatttttgggtcaaagagaggacatatgggagggttcatgttttggactgagttttgggctgcttgaccctggcccagacattctttctgctataggctgggcctgaattcaatggctatcaggtctcaaactcttgaatcgatatcttgggcaaaattcattgaaataagaccacttttaactccctcaactttccatcgtgtttaaatctcatccctaaactgcaatagcaaaaatcttgaccccctcaacttaaaaaactggtgcaaaagaaatcctgatactaagaatccctaaacattatttttaaaaaatcaaaatgtttcactctataaattacttacacttatattgagttgcaccgtaaatttaaaacttacactgcaaatacattgtatgtttgaatatttatattgtaattttttttgttatacaatgtaataaagaactagaattaaggggttgttcaaattgtagacaaaataaaccttatcaaattttgacaatggcaaaattttagtaagttggcaatattacaaaattttgacatgatttcttatgcatttaccaatgtttggcaaaaaactaaatgtatgcatatctttggcaactttaccaaaaaatggtatgtaccaaaaaataatatgatttgaaatgacatcaatttaaacaggccgtaaaagtaatttattatgtatttggaagaagagatagtagagatataacttacatataaaagagagagaaatcacataaggaaaaaaatgaac

SEQ ID NO: 41991 - DNA, 2579 bp, Oryza sativa
agtatgccccgcgatgggggcgtcagccacggcggcaaagacgaggcggccgtcgtcggagaggtcggctacgtgagggagaccaaagagaacggaaagccaccgaggaacggtggatcgccagcgcggcggcggcggcgcctcgcgtcgccggcgagctcggcgtcctactcttggcagccgagccttcacagcataaccgaagagtaaccatggtgcacgagatttaactttaacacatacttatgaaaacgagcgttatatgagtggtctcactaaaattctgttgaaagtccaaccatatgtatgtaatattcgtgaatataagtatttgaattcaggtgatgctttcccgaattcttttgtattctgtttggctgtctattctattttactccggcgagatcgcccagcctaatttagtttcagatcgttacaaattgcagtcaatggttttgggggaaaaaacgaatttgttcgctaatttcggactccgctgtcaattttgtgctgaatatgcccaacttagcataaacgcttggtcaaactctgggcatcatgtcaaagtaattttgtcattttaacaaagttttttttacaaagaaagtataatttctagcatttgcatcaaccaaggacgcacgcacccataacaaaatttgcaatctcattttaggctgttttggatcagaatttagttgaaacaaggcccgcctggcactcccctaggtcatatgttcagcataagatttagtccaactttcaaaactataaccatcaatttatattggaataagtttacatgtaaacttgtcaatcttaagatagagtgaagtgtacaaacaatgatagagtgaattgtgtggtgtgtcatctaggagtctcaactcccaaaatgtatttcttggtctcttaactagctaatacatgatgggtgtcatatacatccaaacaggtttcaaccaactccatgcgcatacgtggaatatcatagtggtgtctgagtattagtgggacccatatgccaataacatagaaataacaaaatatttaaaaaaatattttgtccactctctcatctctccctccctaaaatctccagtgtcagagaggagcaacggcgcagccttcatggggctcggtgacctctacgctagagagcaacgacgacctctgcgtcgaacacaagcacgcctgtcgtgcttctcaccattgtatttgtcctcgtcattgagctcatatgtccatatctccttctttagcggcgatagctgacctcgtcctcgagctcctccaagaaggaggatgtggttctagggcagggacagtcgctggctctgcccatcgtgactcatgtagttgcggcaaattagatagggttgggtggagaggacgaccaacgatgtggcctctagatccggaggcacgtagctatgggagttgtctaacagcgacatcgtggagcaagacgtcgaggtcagctcttagacgaggacgtggtcgctgccagcggcgaggtagccagataggcgcgctaggatagggcatcccaacgacagtggtggcaatggtttgacggcgggataaagcatggctgaagcagagggtggcgcccgtggtctttctagagagtcttgcaggccctctgcgtgtcgtcctcctccacctctatctccttctctagccttcgcctcgccctttgcctgttcctcgttagtggcatcacgggagtcgggcattgctccctacccatgtctcaccaccgtctctaggctctcctccaacccagctcctgccatgctccactgccatgacctattgcggcgcaccgaccgaatgatgaggacacacagagttcaggacgagctcctagagggagcattcggaaagctacagcggcgaggccgctgacgaggcatgtacgacgacctatggaccccgccccggcgcgcggacttcggcatgcctctgttgctcctcctctgcgccaccttggacttagttgccgagtcctccttcgaccggcaagttgtaagagagacatggggagagagggggggggggagaaaggtgtgagggagaggctgacatgtggccccatctttgcatgggatacaccacagcatgctatatcagcgcatggagcagcttggagccaatttggacctgtatgacaacataaagttcgaggatctgaaaatgcattgagagttgagggatctagatggcacactttcacaagttcagaaatcgcccgtgcacttcactcctgaagatacgtcggcctaatattttgtaagtgtttataggggtaggggtgtgcgtttgtgtattcataggtgtgagtgtgcacatttgtgagtgcatgcatttataccgtgtttctaaataaagtatacatgtaacttttccttaaaacaacggtgcatatagcatttgggccagtgccattggatcgatgtgttcatgctaggatccattcgtgcaaaggaaaatgacattggctcttctatgcctcccatgataatgtgttgacgagtgaaggcagtagggacagtgtctttcggcaccatggtgtg

SEQ ID NO: 41992 - DNA, 1162 bp, Oryza sativa
tattggataatgatggtatgcccttttgttgtaagtcttggaataagagttcaaatatgcttatatcagtcggcaaaatgtattgttttattgttgttgtggtctaatagacacatagtgtgacaacgaggctgagagcctgagactatgcctgtggtatggatcaagataggtaagatatgctagcaatgcagattgaggataaggacatccatagagaggttgactcgatgttttagtccgatagtagtggagcaaccaataggctggtgatcaggagggtggtgccacgacgagttcgagaagatgttgagccaagaggtggtgaggaaaccaagcctaatggcgatggtgtggtggagtacggagtggtgctagctagcaagcttagcttgagaagatgttgagccaggaggctgcagtgaggtggagaagggattggtgctgggatgctggtgagcttgagaggaagcggggcctggtagaggtagataggctagagaggaggtcagtgccagtgtggagtagatgcaggtctcactaggctgtgccgaggctcatgcatgagtaataaagagcaaagcccaacttctgttggattttttgcatggtaggttatagagagaaggcatgctcgatacccttgctacgtatgttagtgagcttctttttaaaagattatggatatattattcatatgaacaaaattactaagctatgaaaaatgcacttctgatcccttggacaaacaataacaaaatttatttccactacaaaataatataactgcataagttcatctactataacacggcctatatacgtcggtttgcatcatattgtttgttggcgatagaagtcaatataagccactatgtaaaagatgtatcaagccattgttcatcgccgtatagtacatataccatccctcaattgcacgatccaatgtcatctatacctaattaaaaataagtaaggtttctggtttttttgtccgtcgtttagttttccgattttgtcaaaaaaaatcgcctgtctccgattgatcgtagcgcaagaaaaaaaaagaaaccccaccgtgtcgcacttcgacgatcacgacgaccacaagccatagctcgattagttcaaagatgagattaggagttgtatgcgtgtgatg

SEQ ID NO: 41993 - DNA, 1557 bp, Oryza sativa
tgagctacgtagcagcagtaacccattaattttgctccgtgtccatcataaatactatatcgatttatataattttcggaatccctagttgtagatccgaaaattatattaccttcttttctttgtgatttgtgaaaaaatagatataattttatcgattctctcttaaaaatgcattatatgaaaatatatatgtccagatgtacgtatatactagttatacgttccctaaagctcatgttattagtgatttattttttagatgatgtggcaaattataaaggattgcttatatggattaattaatattgtatactcctttcgtttcatattgtactcctccataaacaaaacacttatcattttgaataactttaaagtttaaaaagtttgactataaatagtttctaatatactccaaatcaacctgttacgctagccgagaacttgaccatccccattaacacatcagctagcccgtccggatgcagacgagtggttgggtcaaatgagatcgacaatagccaacgttgacactgcattcaaagcggttgtggcataagagcaggtataatagcaggctataagacaaaggtataaacatattttaaaagataaaggaagagagatataagtagcgggctacagatttatagccagcggcagcacggactctaagacgtactgtgtgtataataggtaggaccagatattaatagtacagtaaacaactattatatgaattagctattacattggctatagatggtctgtagctaataattagctatactattaagcgtgtctcctaccagggaccgcgaggtagaagctaagccgaaaatcgtcccaataagaacaaatctccgcctcgacaacaaattaagacactccccaaacgatgccgacgatctccgacagcccatcgatcgaggggttggagggatcattgtcaagacaattgcgataactgcatgccgggctccagaccaagatgacaatcgtggccattgcgaggatcgagaatgaagagactctctcggtcaccccggcggcaagatgacaataattgttgttctcggaccattgctcctgatcacggtgacccttcctctttgtccttgtcctcctcaaacaagtagtacaaaactttccctttctttgttcaaacttcaatgattgactgcaaaattctaatcattattagaattaatagatgggtcttagcccattcaaaaattaatctttacaaaatcataaaagcccacctcataaaatgacatgcatggagaattcagcaccatcttatttattctatgagagggggacctccttataagggaggatgtaatcctagccacttaagcatgtgaggtggagagaagaaggggaacacacgcgcgtgcttgcctcgccttgtatggcatgtcatggcggtgcgcgtgcacgatggtacgtgtcgaatgttccgctaaaattggctcctcacccttgcgcatatgcaaaaatttagaaacactccgcgtggtacgtgtcgaatggcaaaacctctaatgg

SEQ ID NO: 41994 - DNA, 813 bp, Oryza sativa
tacgcggaaaggagatcgtgtaggcgtcctgatatctctatataagctgagccgccgcctccacgcaaaaaaaaaaagaaatcaatctagggtctgcctcctctctgtactgcgtcgtcgcttataatctactccatcccactcatcggcgtgcactggcgatcaggagagcaggtctctggaatctctgcctttgatgtcctgtaccgggagaaggcggcagtaagtcttaagctcccccaaacagacccatagattgatttggaagcaaagatccagctgatggagcatttaggcctatgactgatggggccattgcatcccctgtaggtagctttgctgcagcataaacgattggttggccattttttctaacagttggaggaggctggctgatatcctaaaaggcaaaatgattgttgaatttatcagcacataataatttaatttattccataaataaatcatgatattgcagatgtaaactagcatgaaccatcattagatctatatatgtaaactagatagtaaagcatgaatagatcaaatatgtgtaacatgttgaacacataccgagggtaccagaagattggctgctcagcaggaattactggcggttgcgggcgttgacgatggcgcgcagcacacaagcgaactagaagacgagccattgtggtcgaataaggagcagtcgcgtgaagagcttcccaaaaaccttactgagaagcagctagttggtagccagcttctgagaatatggaaaagctgtgtttcccaactactggcttctagttcattttctggattctacaa

SEQ ID NO: 41995 - DNA, 1160 bp, Oryza sativa
gatcacacgctgtgcgcgcgctcgccgccgtcgccctcgtccgcttcactcgatcgtggagttggggaggaaaagcgacaactcgcgtcgcgcggttgcgatgcgagactaagccatatatagaacgagattcgtttttttttaaaaaaaaaaaactgccattaatctttttttttcgttatcccgacaaaaaggaggtgttttgacacgttcttttttctttcttttttagaacaatttgacacgtcccgaaatggcatctactacaagagcttagggaatattgttagtactattttgttttctttctttatgctaatagaagaatatacataaatgattgctctgtttttattaatataggacgttgtttcgttttggatggtgacgtttaaccattcgtgctagaataaagtttaatgtgcatataaaaatatgtaagtcataattaaagtactcatgcggttccatgaaacaaatcacaataaaaacaaggttactagtagttactataaaggagattggtgtatatattaagtttttattgtataattacttcttatatggtcaatgctcttcacaattttctttttaaaaacaaaaaaggttactagaaggagattggtacatatgggaagttaaaaaaaaaaaacttgcttcgagagcaatgaattctatcgtctttgtctcaattctaataaggccttgtcgccttgaagttatttttaaagagtgtcatgtagattttcataataatatggaggagatgagctacccttgtataagacgcacactctacaagatacaagagacgaaagaaaattttcataataatatggaagagatgagctaccctcatataagacgcacactctacaagatacaagagatgaaagaaaaggaccaataaattaagagtaaataagttaggtatttgggcagatatactacatgaaatatgttgtgtgtgtcctgattaatgagcactacactactactagatgatgccgctggaaaatcctagtgcacaaaatgatattttcacaagctttgaacgtacttctccgtgcgctaatatagattagtgcaaatgatattttcactagtttacgtaaacttgatgcagaaaatgtacgcagagagctgtgacaatgggcctg

SEQ ID NO: 41996 - DNA, 527 bp, Oryza sativa
tggttgcaaatgtcttttatatacttgataatttaggtttgaatatacgcttgaaaacgattgaaaattttgtttgagtgcaaaatatgtgcattttatgaaattaatgagattaaataattagtgtagaaaattttgacataaattttgaaaataaaacagatgtaataatttaaattcttatttgaaattttaataggataatagaatggaagcattcataaaaaaatatcatgagcattagtagtctatctttgtatgaatgctcctcattttttatagctttttaaaaaataaaataaatacattttctatttcattatctaaaattattttttcataaataatgtatcgcacaacaaactcataactataatagtctcatgcgataaacttttacattttcaataatataattcataaatttctatgtttatccaaagggtaaaatggtcatttttatagaaattagacggtcaactagaaagaggggtatggaagggatccaaattaaattttaggggcat

SEQ ID NO: 41997 - DNA, 533 bp, Oryza sativa
tgactatcagagtgcagtgttggtttttactatttttgttcgtgtatggatagtaccgaaatttcagaaattacggtagttttgttcttaaatattttttttaaaaaaaaatagtttaaaattgaatattttttaccaaataaatccaaaattttgggtaaaataatttcttatcagggatctgatagacccaaaattcccaaattttcgctctgtagtttcaaaccatgctcatgatattggtaaaaaaacgtttgtttgactagctttggtgagccaaccagctgctggtattttcggaaaccatgctcaattacatcttctaacatgaaaacggagggagtatatcgatttatataattttcggaatccctgagatccgaaaattatgttaccttctttaaaaaaatagatataattttcggtggcgctaatacacgctgcgcgcggaatattagttcgagcgccgcacaatgctccctcctttcggttttacccttttttggcacccacctttcctctgcatgccacct

SEQ ID NO: 41998 - DNA, 1540 bp, Oryza sativa
ctagctagtcaaacaactacatgcatcgtgcatggatattacttcccgacgacaactattgtaaaagtctgatcttaagttcaaaccacgtgagctgaccgcatgatcaacgcattatgcggataccttaattaagttcccaagtcaatcaaattgagggtacaagacgaaattgattcccccacacacttgctccttcttccacttccatcctgccctatataatatatatatatatatatatatatatatatatatatatatatatacttagtactgtacgtactaaaccggggattgatcaggagagtgcagtgcaaactcgcagtgaacctgtgtgatcgatcggccatggagtcgctgctcgcagccggtgcgggagggatcggcgtggctgcggcggccgccgtcgtggcggcgaccctcgccgtggtgccgcccaaggaccgcggcaacaacccgcctccaggtaaccggcccgtttcgtcgatcgttcgatcattcagatcaattgccgtgttttgccatccgcttccctgtggttatctacctactccctccattataaaatatagagatttttagagtttgatacagatattaaaaaagtaagttgaattaaatgggagaaggttgtggttggttgagaagtggaagtagatgagaaaattaaatggtggagagatgtgattggttgaaaagagaatgttagtggagaaattgttatatattgggacaaacttttaagagttaaaagttattatagttaaaagttattatattttgggacggagggagtatatatctatcttcattgaattgttggagatggcatgtagccgatgaccttagttagccatgaaaaatattagctagccatgaaaatggagggatagtttcggtttgctatagagaaaaacgaatactgatatagttcaaaacggataattattgaatagttagaaacatttttttcctcggatgtgaatacgaatattgtatagaattttagacggataagatattcagtgaacagtgatattcgcatattcgctcaagacataaaacatacaccatttctctctaactcaccttcaatatacctctttagattttaattgtagcacatctcatgacacaagtctacacaactaatattatttaaattttaaaatatttttataaaatatgctatattttatatattataatatcagttatatatgtatttttaccaatgttgttattcatgcatgtcgaacttaattagcaatatttaatctatgatcaacctttttataaaaaataactaattatgtgtgatggtgtttgtttctattaaaagtagtttaggtggtttttgtgtttccagaaatatttgttttgtattcgtgtctgtttatatttgatccttatttgcattagagataattttgtttttctttcatatccaacctattcggttttgtatatggtaaaaaaataaaaaaatggtatgagcattttccgttcatatccgctctattttcatcccaaaatt

SEQ ID NO: 41999 - DNA, 1051 bp, Oryza sativa
attatattcaaaacaaaaaatataataaattagattgcaatactaattccaaataaaatttaaaaaaatcatgaaaatttggaataaaacataatataaataagacaacataccaagaggaatccatagagattaatgatgattcgaaatagaaactttttatctattatatacgataatcttgaaagaagataccatggttgctttggagaccagagtttaccacgtttgacaaaatctacaccgttagatcgtggtggacccatattataatgtattataatggttgagatatagttgaatctatgaacaaatttgactagttatctgctttccaatttgaatacaaggcatagtactaaactatctatatataccatctagtctagaatagaaaattcgtttgctatccacgtaagacaaagacaaaagtatatatgtctgtgttaataaagttagagtagaaataaattttgaatagaagaaacgctggttgcacaggaaagtgaccaggtctgcatcttgctcaatctggtatcaaataaggtgttgtttgaatctcttgaagatgaagataaaaattaagtgttttacataaaacgatgtggtaatcatatgtgattaattaagttttaattattacaaacttgaaaattggattaatctgatattttagaacaactttcatatataaagttttcacacaaaacatatagtttagcagtttgaaaagcgtgacactttaatccaaaattttatccacgatttttattggattcgaacggacctagtctgcatcttgctcaatcatccttgaatggagactagattgtaggaagtgagaatcaaataagagaaacttcggtagtgtgtgattgtgtaaatagatagaaatgcacattatcaactaggaaatagttacagaaatgtgcggggctaccctaacgaactataaatggaggtgtggttggtggtagctactagcttggacttttgtagactagaattcggaacagagacaattttttagtatgcagagggctgcaggaat

SEQ ID NO: 42000 - DNA, 1442 bp, Oryza sativa
aaatatatgattttattgaagtactttttaagactaatatatatatatatatatatatatatatatatatatggttttcattttttaagataaatattttagaaattatttatagtcaaagattttaaggtttgattttatccttatttaaagcgactaatatcatcagctcggagggagtatgtaattttcaaaaatccctaggtgatgtgctacttatgtgaaaacggaggtaatggtactgaatcgcctcacatgtgagtgggttgtgattttttcctacatcccttgcgaattttaaagcaaatcgaacggttcaaatttatatcgtagttatatgtaagttacaatgtaattacactacaattatactatatttacatctgccaaaaccactaaccacctcctccatttatattactccctctgtcccaaaatataagcatttttagaacagtgctaagtcaaactttttaaaaaagattaatcatgtaaatttaattttattatatttatcattaaacgaactatcataatatgcaactctttttatttaagacattttacttttgtagatattgttgattaaagtatcatctcggagatcgtgtacatgtaaaaaaaatacttatgttttagaacggcggagtacttgtttgtgcacaataggtgtgctgtcgcagccgtgagtgctgttatagctcaaatcctgttatctacgccaaactgatcattcatgctcatttctaattgttgcgacaccagaaattaccattccatcaaaaaaaaaaagcttacgcactagctgaaacagagaaaattcgacatattttccgacgaacaaactaaccacatacactgccatctccaacagagatcaatcaatggagagagtacgacgaacaccgagacacagcagcagtgaggatcaaaccaattggagaagatcatttgatcgatcgaaacgaacacggcgagctggattaattaattacctggaggcgggttggcgcggttcttgcgcggcggcggcgccgcgacgagcttgtcggcgagcgcggccgccgcgacgaggcccccgacggccgccaccgccgccgcgcccgctccggctacgagcatcgactccatggcacacgatctgatcacacgcactctttaattaatcccggctttcttatttatagaggccgcagcacgtcgaagagcgaggaaataagaaagggcggcgtcgtcgctgtaccaacttgaagtcttttttgttgctttttggctgcgttcgaccgtttgttgctagaagaaagagagaggtttcgctccctttccacgtgagtactcccttaaacaacctctgatagattttttattggacggagggagtagtaatcatcatttttcttttataattttttctataaataaattacactaattttgttttt

SEQ ID NO: 42001 - DNA, 1844 bp, Oryza sativa
gtcattgtttggtagggccatgtacacatacgcttgcacattcattaatttgcgtttaatttcttctgtactccttgggagccacatgtagtaggtaggtattcatcgcgcggtcagctcacgtgctttgaaattaagaccagcctttatgccaagtaatacccatatgcaagtacacctgattttcgagtttcgactaattacttttgctgttctcctcgttattaatacccacttggtaattgctaaatatcgacttaaaagatttttcaatgtaactgtggtgtaatattgatatcacgacagtgtaattacactataactatatacctttatatatatataacttactataaagtgacatgcattttaatacttatatatatacaagttacataaaatttttagtgtagttatagtatagttatattggaattacactatagtagttatatttgaaagttttcactcaaagaatttacgtcagttctttatctagtgtcgaccatattagtttgccttaaaaaataaacacagaagttataaattagtccgaccatgatagttttcattaaggcccgatcaatttttaataataaaaacagtatctctgtcaatataaacacggtcaagaattttaaaaagataataaaaagatacgaagttatgtgacaaatccttatctccttcctgacaacaatatgcagactaaaataccgaatagaaaacacatatattttataataatattatataggaactacgccattcaaaataaaactaagatatgaccattggaacgggttaattaaaagttatataactgtaaagtgagcataactcaattgtttagatttcttatggtgaaacttgcctacccaaattcaagttttagacgtggcacatgtgctcgtattaatggctaatagcatagtatcgataaagtttcctggtcctcctcctcctcttgcctagggtcatggcgagggaggaagcggtcattgcgatcaaaatcagaacttcatagttcacacaatatgggggaatttgaaactccgttacttgtcttcgttgcttgtccgtggtggatttgaaaccccgagatccttggccatcggatttggcaccgcttgagcgcttcctcgtcaccgtcccgaagtgggaggaatgacactgatgaccatctccatcctttctttatctccgctctctcaactccgatatgatagtgggatagcagatgatgtcccttttcttttatttattcataatcagtactggcgtcttaaaaagtgaaaaaaaaacttcgcaacataaatttccaatcagagaactaagatttttagtatttgtccgattttttctagaattttctatggcatttgctatttgatatgcatggagtgtgtacgagaagtttatgtacataggatatatatttccttctaatcatccttttcgcgaactaaacacacccttagccaatagccaaatagccaaatagccaaaaggctgagaaagatattccttctaatcatccttagtttatcttaattagcgcaagatcgtacagtggacaatatgcggaggcttctttgcaaaaaaggctgacatgaagcggtgaatttccagcgatctacgcggtgtttaattagagaggttaatattcagttaccggtcatggtaaaaccgcaatgcttaattttttttggggagaataaccactatggtccctgaagtttcgctttaagatcattttagtcctttacctttcaaattgtccaagcaagcccttaaactttatcatgtagacatatacagtccttagcccatcaaaaattgcc

SEQ ID NO: 42002 - DNA, 729 bp, Oryza sativa
gccatatgccggtttctgtccatggcgtgaagaatatttgtccaaatttggagatgagtgtctagctatctaactgcacgatccggtggagtccaaatggccggcacatgtacagattgatctgttagtcataggctcataaccaccatgcacgtactccctgctggtgtattattgttcaaagttcaaaccatgtgtgttgctgctcgggacaaagttcagaaacatgtgtacatgtgcgctaaagcttgaatcatcttggattggaagttgaaattacgtacttctgtggaattttagaataatatagttgttttgtcatcaggtagtgttagcagttgagtttcatgagaagggtgtggaaaacataccaagcaaagtagaaaagttcctgactggctaggcacctgtgaggttgatattttggcattagcggtaagtcactagcacggatcctgacatctggccatctgttaaaggccaaagagagctgttacatatgaccgtatttataacgggtaatcttgacagccgttacagatagccaagtcgactaagagccattactgatacatatgtaacagctcattaaaaaaaaaaagcttttacatatcttcatttaatcatctgcaacggctcacaatttagaaccgtttcagatgatttggatatttgtaacgactcataatttagagccattaataagatgtctatctagtgatgtataat

SEQ ID NO: 42003 - DNA, 826 bp, Oryza sativa
agaaacaaaaaataatatcatattagctctagagttcatgttgtaggttaatttcatttctgatctgaattaattgtaattatgatattcacatttaatttatcaagagaaatgtccacttacaattctaaacttttgcacaagtaaaaaaatcaactgtaaactaagtaaccggataggatagcatttgaaattgtcaaaaccatgcaatttacatacacatcatactaaaagcacctctattttgcatgtgtaaggataatttgaaaagcgtaaaaacaatggtacaactgtaaccacgtgtgcttccttgtccttaactaccccttcattcgtgttttagcattttagagcaatttttttcgagttgatcaatctgaaaccttgcctatttattctaaatttcatcagtttgaattcatcttttttaaaaaaaaaaacatcacatatttgtactcttttgaattccttgctcttcagagttttatctgtttgaatagaaattcaaaagagtctaaagatagattaagtgaaaattttgaaaaaaaaggggaaaactaagattaaattttgaaccatataagtctatgtttgtttctattgaattagttattactttatttgttagagtttgtgtcgaatatgtgtataaagtcggttataatttaagacttggagttgtaatgtcggataggttgattttataacagtatgcggtcaccagagttacaattatgtaagaatacatgcattgcttgatgcaacagtcatgataattttattttatttcctaacaaagatggaccaccagcacccttagctcgag

SEQ ID NO: 42004 - DNA, 592 bp, Oryza sativa
aaaaaaaaaaaagataaaataaatggctcatctttattaatatagtctaattgattgacaacaaagtcctttaattaggaaatggatcctcatcattagaatgggttaagaggtgcacagttttcttaattcttttggaccaagtaaaacgattgattgagtttgctgtggtacttccgtggaatgttcttgtgctatgcctggaatccagtactttggtcacacctgcatgaaattgatcaattttcttttggtacctgcaagcaggggctactgtaaattttccccatggcattgacttgagtttgcttttgtgatttcaagttgcatgcaggcggattaaggaagaaatggttaattgctcctcttttcatagtttcagatatcctctctccggctcagttaatttttgatacacgtttgactattcgtcttatttaaaaattttgggtaagtgaataagatatgaattatgcttaaaatatttctaataataaaataactcaaaaaataaataataattatataaattctataaataagatggatgagtaaacatattttcaaatgttaagggcattatctattacaa

SEQ ID NO: 42005 - DNA, 610 bp, Oryza sativa
caatctatatagtagatgacagatacttcctttgcaaagtggcattgaataatgagatatgttctacatcatgtctaaagctaaattttgcatggccactcatttatcagtatattcgatctcatcttcccaagagggcaataaacatggcaccgataaatcccaaataatctaatgaaaattcctagcaaaaaaatggcttaacaaagtcataccgtgaaatccaacttgtaacgaaaagttcataagcatgtttaccaagggaaaaattcagtatgaaaggatggaccagtaacaaattccaaaacaatcatgtgcaagatgcttgcctgaaaaagataatagcagtcccacacatggcacatattgtgtaaaattgattaaatttgaggcagagatttgaaagaacagacatctcacatgccaaaagataccgaggtagaccaagcacaaaatataattatacaaataggtggacataaatggcaatttgtatttgagtaaaggaacgctacagtggaaaaccgttgtttgaaatcttgacatatcttatagaagaaaaatgcttttcccttgtaagaatccaacaacttttactatgcttcttttg

SEQ ID NO: 42006 - DNA, 820 bp, Oryza sativa
catttaatatcctttctcatctttctgtgattgccaatcagatttatctttagcaaaaaattagagtctgataacctgtaacatcaagagcgacatgcataagagctacatgtaatcctactgccattgagtgctacaaaattttcaagaaactcactcagttattgagttcgtcgccatgccgggctgtctggccgcaccatcctgggggttgctgcccgtgcctacctgggtactggccatcagcgtggccgtgggctggctgcccatgccgccggggctggctaactgcgcccgcctaggactagccggccgagcaagcctggagctggccactcgtgctggcagggtgctggcctcctgcgacggcctggcctcccgtgccgccggtccatgtcctcctgcgggcctgagggctggccatctgggggcacccgccagcgccactcccttcaggggcgcgcctggggcagccgtgccacctggagggatggcatccgtgccgcctgaggattcgtcgtcctcgccgcccgggggtcaccatccacgctgccggccataggggcggcgatctagggtttgcagcggcgtggagtcgaggcacgggtcagggatacgaagcacggggagagggtagttttgtcttccttccgtggggccatgtttgtttttacagtagagactaatgggagtaacaaaaaatttgagggttgtatagttagggaacttttgaagtttgggtgctagagagggaagagtatttttttttatgctacatagggaattttctcattttccgaagggcaagcaaacaagtcac

SEQ ID NO: 42007 - DNA, 878 bp, Oryza sativa
ttttgggataagtttttctaggggtctacttgcgaaataagtttttcaaaaggactaaaatgtgaaaaatccagatggtctctaatcattaatgtattcaaatactttttcttactcttctttccttcctttcaccaccatgcaacaaaatttactctaataaatgctaagagtcaactctgagcccgttgtcatgcataacaaccatacttctttctctttcttccatatcatcaaatttacttgtatgacaatagagagagaccactaataaataccattgtacatgctctagttgcctgggaagacagttaatcggtggattttaccgcatacaaatcgctgcgccttgatgggtcgagcgcttgacacccgggcagccgcgtgctgccccaggaggtaaatcctccactgatccctgctcgtattataagatgtttgatttttttttcctaatcaaactttcttaagtttcatcaaatttataaaaaaatttaacagcatacactagtggagaaatgctttgtagtcccggttggtaacatcctgtagtcccggttttttaaccgggactacgaatctgggactaaagatcgctatctttagtcccggttcaaatactcaggactaaaaatatggtcccagttgttgttaccgaccgggactttttttcttttcttttcatccggttggtatttttccttttttttttctttcgcccaaatcttcgcggatcgaacgaataaaatcaacaaaaagcctaaatcatagatcgaataaataaaatcaacaacaaagcatccatattcttttacacttattcacatctacaacaaagcatccatgttcttttacacttattcacagtacaacatctt

SEQ ID NO: 42008 - DNA, 521 bp, Oryza sativa
gtcaccacgtcatctgaaggatggaattgaaggacgacatgggacatgggcctgcatacaatcgatctggtcttgggcctacatgcaatagatccgggaactggaacgcgttgcatccgggaactggaacgcgtgggaaggaaatcgcacggaaaaaaaaatcaatcccgtaaaagaaatcgaacggccatatacacgcacacggggtaaaaaaaaaggacgagaaataactgcgggtggatagagtcggacaatgtacgaaaaaattttgacaaaaatactttaattttttataatagtagaaaatttttataatagtggatagagtcagacaatgtacggaaaaacttgttttttataaaaatattttaaatttttataatagtagagaatttttataatagtaaagatagagatagagatagagatttcattccttactcacttaccgagcccacgagcagacgagccatcaagccgagccagccaccaccacctggctcgatcccttttctcttcag

SEQ ID NO: 42009 - DNA, 1107 bp, Oryza sativa
ctcgctcagtcagtgagcgatagcgactgcctctgccgattgaataaggttaattagtgattaattaatcgctaattagaataattaatcactaattattgttaatgaatcattaattagggtaattaatgactaattaagtagctccgttggacatgacatttggtctcgctgattctttatacgagactgttcggtctcgatgcttcatcacacgataccgtgcggtcttgcgctcctaccacgcgacactggtatattttcgctaaaaagtatatatcacgaatatttctacgaaaaaccaaattaatagtatatttttaaatttaattcgagaactaagacccaaaactaaaaacggaaggcacaataggcttaatatctaaagctaaatcgattagaactaggtgtaatcatattctacgagtcgtcgtgattggccgtttgttcgtattctgctatccatcttctacagttctacgagtcatatcacgttgatcgtgataacatgttaagttttaaggccccattacaccttacgcaccataacctctaattccttctacggccctctaattccaccaaccacacctccatttatagttcgtttaaataaaatagtagggtggtccgcacatttgcaacttgattttttttaaagttttaatatctaacaatattactcaaaaacaaatattcacatatttgcatgttgataatgtgcatttttatctatttacacaatcacacactaccaaagtttctcttatattcaaccatcaataccagtctgcatcatgctcaatcacagttactatttgatactccctacaatctagtctctattctaggatgattgagcaagatgcagactaggtctgcttctcacttattcatacttaattatttgatagtaccagattgagcaggatgcagacctggtcactttcctgtgcgacaagtgttgtttctattcaaaatttctttctactctaattttaccaacacagacatacttttgtctttgtcttacgtggatagaaatggaattttctattctaggggtgtttagatccatcggtgtaaagttattatatagggtgttgc

SEQ ID NO: 42010 - DNA, 777 bp, Oryza sativa
tcgatcgatcacacaggctcactgcgagagtttgcacttgcactgcattctcttgatgatcaatccccggtttagtactagtattatatatagggctgcggctgtgttcgccattgctggtccccaatgggaacagtacgcacggaaaacatagcaatccattagtgtgtgattaattaagtattagctaatattttttaaaaataaattaatttgatttgttaagcaactttcttatagaaactttttttaaaaaacacaccgtttagcagtttaaaaaacgtatacgcgaaaaacgagggagagggggctgggaaaaggggcagccgaacagaggcgccttcgctgtccgaacccgcatatatgttcatgcatggcgcttaatttcttttaccctcaatttgattgacttgggaacttaggtcgataaaattatgctgcgctcctagtattctgagcaccaaacatgtatcagcccaggtctacctcgccccacgtccctttatcccactcccaccgttatcgaagtaaacgatttatttcgataaaaacaactttccagtttccacatcccatcatcccgctcccatcgttattgaagcaaatgatttatttcgataaaatcaacttccctacttctggtatatattatatttttccatgtacccaactaaccactctcacccccacttcattttttcctctttttttttggatctaaatcgattcaccatcctagcccatagatctgtgacgcaccatggaggaggacgacgg

SEQ ID NO: 42011 - DNA, 683 bp, Oryza sativa
gacatttgcatgagacatgttatatttgtaaacttggtttctactccctccgtcccaaaacagtaacttggtgcacaatatagtaatgtgaatttggatggaatgttcttcacatcccatatctagattcatagtattatgttgtgtctaatatatgactaggttttctatatttgggaaggaggaagtacattattcttcttactttctacccttgcattattcattgattttttatgccttctaaaaaaagacatggctatgcggcgtccttgtcacatactcccactgttcaccggcgtccttgtcacatacttccactgttcacgtttgatcgacgcctaagtaaaacgaaatagtcaaaattgatcagcacattatcctcggtggacgcatggttgtttggtttccatgctaatttgttggccattcaattcgcatgcaaagaggctggtttgaataaaaatgggatgctcacatacaatttttttcttactaaattgttattactaacaattatctcaaccgtttgatttaggtagatgggagttatgaaaaatctagatacactcgtagcataacacatcagtgttagtaaaaatttagtaaaaaaaagttagtacatatagtcttttcctttattttgcatgtaagaaactgcagcaaatacgggctgcaggaat

SEQ ID NO: 42012 - DNA, 617 bp, Oryza sativa
cagcctcagccacatcccgtccaccaagtgcgttgtcaagtgcaagaaatgcgtgcccacctgctagattttcctcccttgtaccgagattccattccgcgggttgccccggggcctcacctcacgatcgatacccattcctgttcctcgtcgtgatgttaactctccacaatttactttcctatatatatagattcagttgaataagcaggcaagtctcatgcacgaggtagataggcaggagttatagaatttgctaagtcggatataatttttcgccctcgtactatgtttcttccacgtgaatgatcgatgaactgcacgagctactactataccagtacttttagtactacccctatatgtactgatccgtcatccgtgtacttaatggtagtagtgcagttgtaggggatcgatggcactttcaggtttttgcgatagacgagagacaccatccaacaaactactgttaatctctacgtacagaatcatcacgtatgtggcttggatggtgaacttcaccgcaactatataggagtaagtacgccagtttggacctaacatcatcatatcacatcctagataggtggtactattaagctagctagtatggg

SEQ ID NO: 42013 - DNA, 834 bp, Oryza sativa
attcctgcagccctgcaaaatttgtgatatgccaccctgacccacatgttattgactcatgtgggtcctaaatgtcattgagatacgggtggcatgtctcaaattttgtaaatatagggtggcatggttacaacaaaccgaaaaaagagaccgggcgaaagataaaaaaagcgaaaaaaataaaaaaaaatccgacccctatccgattccctctcagaaacgaaaaaaaagtccgactatagatccggttcccccttaaaaacgaaaaataaaaggcgccactccttttgagtccgagatacgagcgactactcctctcagtttcaatctatatcgtgatatctcacacatcttggtgaaacaaaatgatgttccggattgaaaatctgtttaaaaaacggaacctacaggtcgagagcattccatttttatatgattttaatttttgggtttgtacttttacatttgagtccctataatcttgcaataagctacttgaggtcgtttttgttaaaaataataataaaagagagagaacaaaagcagaaaggtgcataaaaagagaaaagagtaaattgcatcttagaccatatttttttaccatggtttcactttgggatactcttaacataatgttttcactttaggcctgattttattaccaaaacctttcactttgggccattggcccataatcagtctctcaaagcctatctctcatcactatctacctggtcatcttcgactcttttcgtccatggctctatagatcacaaagggcctatttagattgttaccctaccaattttttggtagtgccaaaatataggcaag

SEQ ID NO: 42014 - DNA, 597 bp, Oryza sativa
atccgaaggttaaatcacacatcggctggaggtccgatgtcatgaaatccacaagattagattaaacaatgaaacatttgttgtcatcggctaaatccaacttatatgtacatgcaatccttatgagccgatgcaacatccagataactcaccggctgaaactccgatgaaacccttattggcaatcaagaagcaagctagagattatgattctaagcatgacttagtagatcaaactcaactgatgcagcactaagtatgaaaagaaacataatatctagacaatcaagccgttgactgagttttcagggtggtagatgtctaagctaatctaatctagcaaggcgatttagccgatactggcagaaaccctaaaacgagaagcagccgatagagctaaattgatatgctgacactagattaacagagatatatgataaataggtaggcaaatatatcatccaaaccagagcaatccaagaggtcgaatgtactgatgcagccttgaacgacgccgacgtaaacgatacaattgcctggactggcggaacattggacttatcccttcgccggagatcgaagacgatgcataggaca

SEQ ID NO: 42015 - DNA, 617 bp, Oryza sativa
ccaaccacttatatcagatgcaaccctgcaagtggtagtccgacactccgactgataagaacgtgcgctgccatatgccgccatgtatatgtaaccgtgaacttaacttacgtgcctttagtgtgtacgtgcagggaaacacgcgagtctccgatcgaccaatcgacgacctcagagcatctccaacagtctccccatctcactctccaagctaaattttagctattctagcaaaaaaaaaaaaacgtgctccaacagcctctctaaccctaaaccctatccggctggccaaaacctcccctccactagccaaatttggctagccacaaatcacttgccaatcgtgggccccacacagattctccaccaccccccatctccttcgtctctccagcggtccagccacgactcgacgccgccgccgccgtgcacagccacgatctcaacgccaccgccggcgcagccacgacctcctcgatgcggcgcataagggcgggccggcggcggagagaacaacggcgcgcgtcttgaacccacgccaaagcgccaccatcgtcgtcgaggtcgccagccgctgtcgccgtcgtctgcaccgtcgccagtcgtcgccatccacc

SEQ ID NO: 42016 - DNA, 685 bp, Oryza sativa
gatctagatttgaaaacttcaagtcaaatttgaaaactttcaacacaagattgaaaactttcaacttgaaatttaaatttttcgaaatcaaattttgaaaactttccacttttcatctcaaatttgaaaaactttcaactcaaatttaaaactttcaatccatatttgaaaactttcaacccagatttgaaaactttcaagtcaaatttgaaaactttcaattctatatttgtaaagaggtatgcgaaagattgaaaaaaataggaagaaatgaaaaaacgcgtcgagaaaaattacaaaaaaagaaaaaaaaagggcgcgtgggggcccagctgacgcgcgcaccagctaaattgctggcgcgtacgcgcgcgctaggagccccccttctccagagtcctgaacctactccgttgcgtctgttgtctcgtccacgatttcgggggttcacgtgttgtcatcatcgtagaccactcgtgtaacaaatgtatccaaaatctgtctatactaacttataataaattagtagaaaaatgagcctccatgttcactctcacgatatagaaaatcccacattaatcgaaagaaaatatgaaaaaaaaatgacaatgaaagtgtattaggattaggttgtgtaaacggacaagaaaattttaagtggaaacggacaagggggctgcaggaa

SEQ ID NO: 42017 - DNA, 717 bp, Oryza sativa
ccataatacaaaccacttcaaaagtatatattttatgtttcggcctctggttatatatatgtgtcggtcgttatgtagtatatcttattattattattactattttagaccttataaaaagaacatagatagccctaaccttcacatggacccactatcagcctctccctatcttttttttctcttccctaccgcactctcccacgacgcctcctattccacacgagaccgaagcgtcgtgcgtcgcctctccccctccacttctctgtgaatgacggtggaggatttcatggcaacaacggatcccaacgggggtggtatatctccgcaagctcgccggcctctccccctcctcttctcggcgagcgccggcagcggatctccaacaacgatggatctagccggaagctcatcggcatgtccccctccccttccctgtgacgccagcgacggatcttgtcaggagctcatcagcttctcccctttcccttatccgcgagcggtagtggcggatttggccgtgagctcgccggcctctcccttccccttctcctcgagcgatagcggcgcccccactctcctctccccacttcgaaatggtcagcaagctccgcagaggctgatggtggtggtggggccctcccgacgacgagacgaggtacatcctctctcccactttctcttcagatggcaatcgattgggcttggtcacttgga

SEQ ID NO: 42018 - DNA, 609 bp, Oryza sativa
cgacaatgtggaccctgaaatagaagccgagcccaaaccggatgctaattttggcgtcgaagccgacgtcgacaaagggttatttttctttccctttcttgttttcacagcaacaacctcctcctcatcgtcttcttcatcatccagctccacctcctccgaatcattctctgccgcagcatcattcttccagtcctcgtcctcctcctcagcggaatccgcagtctcatccccacccccaccaccatccaccgcaccaggtgacttggccgttgcggcatccgacatccgccggagccgccgcagcttcctcgacggctgcggggtcacctcctcctcatcggcggcggcggcccactcgtacctctcgctcgcgaggtccaccacctcctcctcgccgtcgtcgtacctgacgcggtgccgcctggaccccacgtcgtagccctccaccctcccctcgtaccacgcgtcgtccagcggccagtacacccgcagccgcctccccaccgccgtctcctcctcctgcggcggggatggcgggttgggagggggaggggaggggacggcgagagggggcttcgtcgccctaaggttcagcggcgagggcga

SEQ ID NO: 42019 - DNA, 2114 bp, Oryza sativa
ggatgatgtggcgtctacgtggcagtcttgaccgagtttttatcctacgtggcgcttacgtggcattataataaaaaaaagaaatatgtaggacccatatatcattccacaaataaagtattatggaacccactgaagcacggcgagtgggtcccataatacttaccttcttcctcctccctcccttcccttcccttctctctccttcccttcttcctcctccctccctctctctcccttatctctctcccccggcctttctcctcaccttggccagagtggcggtggggagcggcggcggcagcgggtaggagtggtggcggtggcggtggggacagcggtagggagcggcggtggcggatttggttcctaattgtcggaatttgctcgctgtgctcgaatctgcgttgtgtggattttttccccagtgatttgtgggtgttcgaatcgcatgcatttggtgtgaatggcttgaaattttgttggtgattgttgttctgctgaaatttgttggtccgtttcagttggaactcgcatgcgctgctgatgttcacggaggggttagatcgagacgccctcaagtgggttcgtgaggtgagagttcgagctcgccgtgctcctcccgaagtgggtcccataatactttatttgtgtgactgacatatgggtcccacatatttctttttatttttttttattctaatgccacgtaagcgccatgtaggataaagactcagtcaagactgccacgtaggcgccacgtcatccaaaaccacctccaaaatcaccaagggacattgtttgcacaggttttgatagttagaggagtcgatatacccggttttgtggtgggaggatatgaatcatactcggccgatagttgagggagtcgaagtatactttttcctactactaagtacagaagatagctaatgggccggatagttgttctgtggactgggccttgtgatcacagtggattatgcggcccattagtcggaaacggctgattaatcgggaaatgacggtaattaggagttcacaaacgactaatgaacaccgttttgtaaaaacatgacggacaactcaccgtctccgattgaacggccgtatcaaccgttttccacaatactggttgacgctgaccatcccaccaacgtggcagccgagccgatcccctagtctatgtggcaggggctcagcgccaagccactaatgttagtaccagagcaattggccctgagctttgggacttagttgctcgcggccaaaccgctgagccggcaaacctcagcgctacagtatttggcgttgaccctaaaggatggttgccgatcgaagcttggaccactttttttctcctataatcactgcttttcccagcaaaccactatgacatctgcaggtgactctgacacaaataaagctcctctcgaacctccgccgtggcatccgagcctagttagaggctagaaccataggcttgagaccacacgttggatcccatcacttccctgctagaaacattggagtactatcttgaagtcatactgtagttttttttattagatacatacgttcggtgaacacaggtgagttagttcatttcccggttcaaagtttcttgcatatgagataccgagaaacctcttattgcgttcgggatggtggaaagaactgagggcttattcggatggaaaaaacgcagctgatttgcattcatatggattaatttctatgaataccattcggactgtaagaatgaagtataggaaaatcaaaataacttttccttttctacaagttgtacagagaaaacatagaaattttttcattcattctaaacctcttgaaaaaaattatatggattggtgtatgcatacattcctattcctccacttttcctatttctatgggttaaaattcctacaactcgaataaggcctaaacttatgttggcacgaaaaataggacaatagtatataatgtaataaattaaatattaacaaaatatattgtttagctgtttagcaaacatgctcaacgaaaacaagtactccctctatcccaaaatataaatctaggactggatggggcatttcctaatacaacaa

SEQ ID NO: 42020 - DNA, 1381 bp, Oryza sativa
cctttttaactttgtttatttcttttcaattattatttgtgctctgaaaattccactaaaatttatttaagcattttaggcttttaggaaatatacaaaaatcctccaagcctcatttgacttttatctttgcacattttaattgttgggggctttcacatgaatttttacttattctttgcacaatttcgaggatagattttagagtcgatttgggacgcgacacgagatctttcggtttgcccaacacctccatgtcaaatatcccgcttcctaggcatcttgcatttagataggttgcaaaccgccttgaatcaaaagcacaactgcgctagcctccttgtttcagccgctggacctattcaaagagttagccaaagaaatatttatgtacgtagctccctattcggcgtgcccttcagtaaaacgggcatgaatttttcatccgaattctttttaggacttacgacaacccgccatgtctttttttccgccataagtaccatatgagcggctaaaactagaacaagagcatcatacccggcgccgtccaagtgcaaagcacttcctatctcaaatacgactgcttcgtcgtaacccttagcgagtaacgtggcatattcaccatagatgtccacgacatttacttctcgtttgctctatacgctctaaggctgcctttttggcatccggagaaaaaaatccctccttcgccgcgcgcacgcttctcgaactgctaaacggtgtgtttttcgcaagacaattcaacacaaaagttggttaaaaaatcctactaatccatttttaaggtataaaataattaacactcaactaatcatacgctgatgactgtcgcgtcccaaaacgactctaaaatacatcctcgaaattgtgcatagaataattaaaatccatgtgaaagcctccaacaattaaaatgtgcaaagttaaaagtcaaataaggcttggaggatttttgtatatttcctaaaagcctaaaatgcgtaaataaattttagcggaattttcagagcacaaataataattgagaagaaataaacaaagttaaaaaggttttataaaaagaaaaaccctaaaagtcttcttttccccccttcccttcttgggccggctcggcccacttccctccctctctctctctctcccccgcggcccaatcggccccctccccgcgcgcgcgccgctgacgggcgggcccgcccgccaccctcgctgacgggtggggcccacccgtcatcccctacctcgcgccgctcccgccgcccgcccgtgccctagcgccaccgccgccgccgaattcgccgcatcccgccgttcccgcgcgccataaagagggggaaatcactcccgtgattccctc

SEQ ID NO: 42021 - DNA, 1368 bp, Oryza sativa
ccacagtctggtgcgatccaactccaacctgagtgatcgccatcgccatcagtttggtgttgctaccacgtggacggtggatctcctcgccgtcatcgtccgcacctcctcctactcgtcgattcgatgaggtgcggcgagcgaagccctcttggcatggacgaaggccacagcgccacccatcaactagagaacgaggctcccacgtacgcggcacgcgcgactgattcctcttctcgttttacttttttttattctccttttttttttcctgtattgattatcgtagcaaccaatcagaggcgagcaactgcaccagatggacgtggtaccttacagcgtccttgtctgagacgctcttttttacttagcgtccatcctattcttgtaattctactctatgattttactggatatttaattcatttgttaataattattatacaaaaaaaattcggtgaataatgtagaggcatgtgaaaaaatttgttaagcatgctgccagtagcagatggaatgtgaaaaaaatgctgtccgaaaaaaaaaaggaggaaatattacactatacaaattagtatcgatctacggtacgatttagtaacgggtgattgtttacctctgccagctcaaccatcggtgccctaggaagtaggaacatcataattacattatactaaggatagagttacgtgcaaggggttatccacatacccagcaaaacgaacatttagtcaaaaatcgttaattttccaattaactgaaagcaaagataaaatagtaagtttccgaggtaaaattcaacggcagcaacaataaagaaaactgtaataagctagcattggtcagcagcagcacatccacaaggaccacatcacagcaagcatgaagcagagcaaagcagtacagcacagagggaccgaggaggattattgcctcgaggcgaccgagttgtccatgaagtctgggatagcatccatgtagatttaatctgcctagcttaccaactatttttttttttaaagcagcttaccaactatttaattcaggcgccattgatctgcaggcaacggtagggtaagtaatgcattaagtcccccaagcaaatagacatcggaaatcgcttatatggctcgagatgagcgcacaaccattgtagcaggaatacagccaacaaaaaaaaaacagatgggaggagagagaactctaaacaaaataccaaaatgcaattaggatagcaaccttaggtggagaaaactctaaaccctaaacccttcgtagttctgatatgggagccaatacggctgccgccggtgtgaagcgcctctaccagcgccttgcacccacacaccatgcccggcggcggtggcc

SEQ ID NO: 42022 - DNA, 605 bp, Oryza sativa
gtcagtactcgactattggtttatcagttattactttatcaaacaggcaaaacatagccataagtgataactagcaaaatatctaggatttcagcctgaacatctggctctcctaatatagctgcaaatgatgagcacttctatcaatctatagttaacacagatttgttcttagtcaactatggctgagcttgaagggtagcttttacaagttcagagctactagatttaactccatgtatctttgtcatctgttattgtcttgtagaatcattacttcctcttgagttaatctgaatgaggaagagctctatatgctgtatcattttaccaccatgtgaaatgctatccttttgttttcttgagtgtttattttatagtgtttcctcatggtatgtttctctactgagattatagatatctaaccatttattatttgccaggctccccctactcaaacagtgcctgcagctcctgcatctcaagcaccagttgcaccagcaactacgtgagttaactcagatttttatttttgcttcctttttaactctttaacatagcagatgcaattattatttgaagatgtattgctttatcaggttagt

SEQ ID NO: 42023 - DNA, 603 bp, Oryza sativa
attttaatcttttgtttaaatcttaaacagatgtgcacgcttgaagttcttttagtagatgtacaactaactatttatgcattatgaacgttatggatgtcctatttaaacattatttgtaggaatatggtcaaacgtatgttgttgtatgcatttacatcttaaaaaggcaaactattatcaactacatacatatgtttacataacgttaaatatgcgtcaaattctaataaatcatccgtattccgattaattgtttggcggtacccctccgtccgtcacccgtattccgtcttccacgacactggtgtcaactagcttggtattgagaagtttaatctcagcgcaataatggttggcgctgagttggcggtttattgttagttgtttttcttcttttttttttttgcacgatttagtttcgaaaaagaatcaatttgtaaaaaaaaaaaaaaagttggttgggtgggttagtagtggtctccattgggttcgtgacccccacctgtcagcgagccatgcctcgccgcctcgcctcttcccctttcccgccacatctccgcgccattttcccccatccctcgccgtcgccgcgaacaaatc

SEQ ID NO: 42024 - DNA, 564 bp, Oryza sativa
cgcgtgtaaacgggcgaagcgggcatgggtagtgactacccatgcccgtgcccgtgtgcccgttgggtatatgttttgacccaaaaaaatacccatgggtactaaatgaagaacaaacccagctctattagggtttttacccgcgggtaaacgggtaaatgggcaaaactgccatctctacttcctcttctcctatgggcgtgcgtggcgcacgcacgcgcaatcgccgccgtcgttgtgatttgcgccgccgtcgcccacagttttgtgcgccgtcgccgctgccttgccgtcgccgccaagtcgcgccgccaccgtagccgtgccgtgttcatctaccgccgccgcccaaccataccgcggccaccacgtgtaagcgccgccgtcgccgaccaatgagagaacaaagccggcgccgtcttctcttgctccacgccattgccgccgtgaccgagtcgacgaccacctctgcaaccgccttacgctaccgcccctcgccgtctatataaaggaacgaacccctctattttttccccacatccgagctctctgagctcttcttct

SEQ ID NO: 42025 - DNA, 730 bp, Oryza sativa
gacgatcctgagcgttggatttacacagagatgatctataccgttccacgaggaatgaaagaatgagtgaaacaacttatttaagtatagggtaggtagatagaagatagatggagaggcagcgtgcgaaatcttacctccattaatcttcttgttagtggagtgggcgcacgtgctggctgagcagggcccaggtggcttccgcggcccagaagccgcgtggcccgtcagtggagccggcccgatgcggagagaatccgagtcgtccgaatgatggacggctcagattgttcctgttctggtaaaagtcgccgacggggaaggggtaaacctaatcctcctcttctccggcgagccagaggggcgagagcggcggcggggtcgtaggcggcggtgtgtggcgatccggcgaagggaatctcgcacggcggcgcggctgctgagggggaacaccctaatccccttctctccccgacccctctcccggcgacgcgagtgagtggctggcggcaagcgccgagcggctccagcttcactggctggggggcgcacccgaagacggcgccaagccatcggcggtccggcaaagcaccgagccgacgggggagggggggaggtgccaaaagtggcagcccaagccgatgcttcccgtctccggtgaggcggcgacggtggggaagctccaagacggcgcgagcggtggtgaaccggcgcgaccccgaggacgccg

SEQ ID NO: 42026 - DNA, 1431 bp, Oryza sativa
aatattggcaccagtttctagtgttagtatagatctacaaacaagactataatagattagcaacaactcaaattagtcggcacaaatttgcatcaagtagattaaagccgcatcaactaccacagctaaccgcaacacggctaaccgcgagcagaagccaacgctgcaacagcgagagaactaactccaattcttttcggcttattcaccgaaatattaaaacaaaacaaattatttgctctatgcttcagaaaaatatatttttcacacaaaaaaaactttatactggtgtgttgtttggatcactgattttattttaagctatttgtttagtttatttcttaaaatacttaatctatcactataatcaattagataatctacaacaataattcattcgcttgtggtagaatcagtccacctagtttaaattctagacttgacatgggtgtttatttttacggctaattattttttttaaaggtaagtcggtctagtctttcaagtgtgctcataaggatagggtatttgtaggggtgctcattcttaggatagggtgtaattgtgtgcatttgtatggatgctcattctttcggatacgtccgtccagtttttttagaggtgctcataagaatacaatgtacttatgtgcatttgtaaggtgagtatgtacgttatggatgcctacatttatactgtttttctaaataataataataataataataattcgctcaataatctaaagcaaattgggctggttcagctcgctcaataatctaaagcaaattattagcagtgttcacagaagactatattcacgcaagccgggctgctcaggatgttgcagcaaaagccagaacccagaagctctattactagcacagtgttcacagaagactatattgaaattgcattttacatatcataattcagaggtttgtgcccaagatataagagtctacttctgagatcctgctgggactataagaatttatgctactgtggttcgaacatgagttgcaaaatttgcaatcctatgctcataagcagctactgttctatattaggcactatgcaaaaacaatgtcaatttccaaaatgatgcgagcctaacaccaatagtttgttagcatccagtatgttgttcatccatcgaaagcattgcctgttgcaggatcaatgccaattcgaaaataaaatcagtcatcatctgaaatatcaattatgccagaagtaatggttggatcatcagttaaaccgggtggatctgctgactgaagtggaaccatatcatgagcagcgtcgaaaggaacgatcgccaagtatggagctggtgactgggactggcatccgggggattgatttaccacctgctcagaaggggtgctaacaacaatctccaagcatggagctgcagcttttgcttga

SEQ ID NO: 42027 - DNA, 707 bp, Oryza sativa
acgacttataatatgaaatgaatgggtcctttcaaaaaaaatatgaaacgaatggggtagaaaagagagaaatatatgaagcacaggagctgatcttggcttccatactcttcaacggttagttcactgctgataaacagaaggagataccatgtaaatttgaaaattaccttgaacattgttttgaacttctgccgatgttgatgtgcccatctttgtgtatgtgccaccacagttcatcttgtggctgcagaaaatagcatattgagtcaataacagatctttgcaatcaactgctgcaaacatttgctgaaaataaaagttatttagaatgctcaagcatagatgatttgttatatttagaatgctcaaacatagatgattttgatatattcacaataacacgcatcaggtatgtgcatttagtgatcagttttgagttgaaatttccaaaatcaaatatgcatccagtttccccagttttattgatctgcttttcacttgtgatttcttaagagagaacaaaacgaagaatgaacagtgcacatatatttttcaaacgagactcaaatagattgagctcatacttttgtctgtgcattgttttggtactattctatattctaaaactattgagtcttacttatgccagtggcaaagcatgttgccacaggttgagcagttgtcaacattctcaatgcagcagg

SEQ ID NO: 42028 - DNA, 1996 bp, Oryza sativa
ttcctgcagccctgccagtttcacacaaaataacaaaaaatagtgggacccacgtgggacccacatgtcatccttacatgtctcttctctctatctccccactgcactgcagtctgcaaggagaaggcgggagtggcggtgcgcgaaaccaacgccgaagcggcagaaatctgccgccgacaccgatctccacagcggaggtgtgcatcctcctcaaacccgtcaccatcagcggtggtggggaagggggggggggggagcaagtggggaaccaggagctcgccctccgccacccatggcgaggtcgccgtcgaggtcggagggtggcgcagaggacggtggaaccgggggcgggggccgcggtggtgaggtgcgcgccctcctcctcgaacccgtcgccgtcgccgtcgtcttcgatgacggagacgacggcgggagaggaagcaaagggagccgggcggaaaggacacgcgagcggcggcaagccggagagcaacaggcgattgtggtggcgcttatcccacgcttgtcccatagccctcgctcgttgcacgagttcctctcgcagatgcggtacacggcaaggacaaggagatcgacgacgcgcgtcagagtccgttagatcagattcgcacgaggccattgatccatcctttgctttgctccttgtgcgttgcttagcagtaacacagggcaagcggaaaacgtagtactactatcctaaggtggctcgcaaggctttggagactgaggaagagctgggcaacggccgagcgcgacctctgcgccaccgccccgccagctttgcgcgccatcgctccggccttctccttgcagactacagtgcaggggggagagaaatgagatagagagaagagagaggagtaaggatgacatgtggagcccacatgggtctgaccatttttttttattattttgtgtgtgaaactgacatctgggttccacgggttttatttttttaatcaaatttccacgtccatgccccgtgggacaaagacctagtcaaaggagcgcgccacgtcagccaaaaccaggcacaatactgccgagggatctcgtttgcacggttttataagttgaaggatgtgttgtactcggttttgtactcagcgacaaatttcggactcggcgacaaattgagagacctaagatgaacttattccctctcacttctctctttttctctatgtgtggccggactgccggaggcacggcgaggcggagggtgcgcgaccgctcgccgctagggtttggggcaagttgggcgatagggatgaggaggaaggaggaagggatgagggagtgattctcaggttgcttgtttcttcaccgattctcaggtatgggtcgtttgtgggattggatcccttgctggtatgatgagataattgaaatgtttcagtttgtggagagtttgtggtagttgtatgtcctcaattagtcttagatgtacaaaagaaaaaatattctaatttctagattgtgcaagtttaagcaatatctcgtgcaacttcacttatttagttgtaagttttttgggactaaaaatttgatgttctttgtcacgctatcagcatgaaaggcggtagcccggccaacttagatttaaggttttgatcttatctttgcattttcgctgttgattaatgttttatgtaaaaactccaatccatgtcttgtggggagtgtgggctaattgaaaccatgggaacatgccttttcttcctttttttttttggacttttaagtctgtgtgaattagtctgtactctgtgaagttgtgcacggttttgaaacctatcagtctgaactttaagcgctctgtatctctaacacagtccagtgcttttgaaatctctgtgtgcgtgcactttttttgttatgctatgagatgaatacaaagttgttttgacggggataaagttgtgtttggtagactgtacatatactagcaatttttactgggaatgaacac

SEQ ID NO: 42029 - DNA, 620 bp, Oryza sativa
aaaaagataataaaggttttgttgaatgtatcctttttttttttactgtaagccacctatacttgcatcatatggaaagtgcaacttattgttactttgttttttatttaactcaatcaatctagatgtatttatatgcttatatagaccatgcttttatgaatttggaagagtaggacactattattttttttatcactttgcctctcttgctgttgcttccatccgatttgcaatggcatgaaatggcttgtactggaaaattatgatacgtgagtatgtagcaagtgttactaggccgtgtgcctgaaaaaaatgctaggactagacaaattgataaggaaagtccatgtgtatctgtgattctgtgtatgcgatctaaccctcagtatgcgttgaattctgtgcggttcagagaacatgtttttcttttcgattaagtgcatttatatgttagttgcagtattggctcagtacgggattgcttgtgatgtaaacattgaaaatctagagctagcataataaaaacacacatctttgtttttctatttgtgtagcggtgatcgggtttttcttagtttttcacattacctaatccattccaacaaatgggattcttt

SEQ ID NO: 42030 - DNA, 1810 bp, Oryza sativa
cagatttcaccaaggccaaactgaataagtcttctattaggttttgcccattgaaagccaggaggttttacaacataacagtggatgtttctggatattaaattcaaacaactaagtaactgaccattatggttccataattcaaatcaacactgccagttgtatttgagcagcacagagttcaacgtatttgggagaacggacatgtgaagcaacaacaacttatcaatctcatagcaggagcagagctatacattcagcccaaatactggagtagcaagcaggaggaaagatcgggtgaactcacatggagtcggcctcgagcaccttgatgaaagctttaccacggtcggctcggacggctgggtgtcctcacctgcatccatgctgccattgctctgggatgtgccatagagctttgaagctggctttcttggagctttgaagctggctttctgaagggagacgaggagaggagtaggaggaggaagcggcggcaacgtggggctaggggtggaggaaagggacgaggaggtgcaggcggcgcgacggtaccggtggggactaggaggaagaggcggtggcggggggctggaggtggagggcagggacgaggaggaggaagcggcgccagtggcggggtctaggaagaggtgatagtggagagcaggcgacggcacggcggggaagaggtggcagtgggcaggcggcggcggcggtgacgacgaggagatgaggcgcgagggcgattcggcttcgggagcggatgcggcgcgagcgtgacaactgacaaggagaagacgacacaaaggggaatcgcgatttcatcgtagggacgtggaaggacctctctgcaaaaaggagtttctcagagtatcacgaggaggttacaccaagtgaaggatcgaacggctcatgttgtctcgaggggaaatcggacggtccatatattttagatgacgtggcccaaccagattgcaagaaactttagttctttcaatactttagatatgtttatagctggcttatagcctgctattgtacctgctctaacatcttcttctgctgctcctctctctcttcctttatctcttttaaatatgtttatagctggcttatagcctgctattgtacctgctctaacatcttctcatcttcgatctgttcaggtgtggatcgtgtctaaacaaaacaattttatttgacctacgctggtccgtccattgacatattaactccgccgtcgccctcccggcctaagaggcaaggtagaaaatacgatgaggtggaagtcactgatatatggcttatagcctgctattgtacctgctctaacatcttctcatcttcgatctgttcaggtgtgggtcgtgtctaaacaaaacaattttatttgacctacactggtccgtccattgacatattaactccgccgtcgccctcccggcctaagaggcaaggtagaaaatacgatgaggtggaagtcactgatatatgggtcccacttgctagctctaaggaagaagatgctggctcagtgagtcaaaccgaaccgaaagagttgacttgcaccggttttctaaaatttttttagacttttaaattaggaacagcttagctctcaaataatccaatctggaattcacttctatggagatttgaactcaggaccttgggtgctactcaggtcactgcaaccactaggctacatgttctttcacaactgattttttaaaatggtggtgttataccggttttgcgatgagagagactattcaatcagcctcaagagatgagggaggagaaatag

SEQ ID NO: 42031 - DNA, 1333 bp, Oryza sativa
cataaatttgcctcctgcgcgaggacttaaataagaaccactacacagaggtaccacctttgctagataacttaatcagctaggtctatgcccatacaagattgcggtcgtactcgtatgttcttcacatgtacttggcagtcttatatcggttggaacagtactagccacccggaaatcaaccatttctaccgtactgttccaatctaagttcattatattttatgcagtctaactaagcatggctaaacaaaatctagcatatatctggtttgctatatattcaggttatgcattcaaaatcatatatggctaatgcataagatactagagatatagaatataggattattatgctcaaaggggaggaataataacttgccttgctccaacgcaaataaatccaagatagacaacctgattatccgatcctcgaaataccacaggttgtcatccaaaatacaatagactctacttgaagaagagaaagaactaaattcaataaaagccatgaaatgtcaaaagaacaataaacggctagaagggctagggtttagggtataaatatctcctttataaggtatataggttatcgggcttatattagttatatgatttctaaagggtttgaggctaaggtgaagggaggatcaagcaactaatgttgcttatattttatgtgaaagctttgattggttggaaggatgggaagtagctagtttggatagttgtcttggttaggcgggtatgtggctagctaggatttggtggtggtaggttcaggtagtatcatatctagggtttggttatatgggagttaattgtggtgtaagacaatatatcggctaggttctatattttatgtatgggttctggtgggtgtagagtaggtggctgagagtatggtggataggcgatactggtgggtgtgggacttatcagacggttggaatttaactaacaaggtgtccgctagagtttggttgtatactagtcgatgctagagcataacgactagatttggtgtcttctatagccggtgtcagcagacagcatatcggctagagggaataggaggtgggtgcaggtttagtagggcggaagtgttactccgacaaccgtgagtggcggcggagcggctaggatcacacagagctcgagagctaactgtgcggcgtgctgtggaggtcgatgggatagtgaagctccgaccgctatacgcatcgaggcgtggggtgccaggagcagcacttcgaccttgggtttggtttatgccggactttacaaccaacggttcgacgtcggggatagaaaagcgcgaacgtccccatga

SEQ ID NO: 42032 - DNA, 711 bp, Oryza sativa
gccgtgctcgcagttatcgagcattgggactcacaatggcatcttggttagaaacataattccaaattttattaaataatgttgcattataaacatcatagactttctacttctacattttcagcctttctgcaagtaaacctagctctatacaaatattaccatttcatgcattcattattgattaatataatagcttgctgagtacgttgtactcacccttgcttcaaccccactttttcagagtctatttgatgttcttaccgaagctgggagttcaatcatacaagttagtctcattctaacttagttctcaagtatagattagatagatggtttaagtctatagccaaacattagagttaagtcattctatagcttttgctgtaatagttagccacaaccttgtaaatacccttatattttataaagaaatctcctttgaaaccttaatcaaatgtatgtaatgaagatatagattgttgaacctgtatcaatctaccgatccagggcttgatacagttaaacatgtcggtttccaaatcattagttctgggacccgacacgctgccgctaggccaccgccacacgccgccgtgccagcctcgccaccctcgctggtgtgtttggataatgggaaatgaagggtgggattgggattgggattgggaaatgaataaagggttacggttaaatggaagagaatgaatg

SEQ ID NO: 42033 - DNA, 541 bp, Oryza sativa
acagatggagtatttgcacaaaaaaaaagaactcctagggaaacttgacacttggttcacactaagagcacttgatatatctcagagcatcacctggaacccctcttaatagtacggtttttcctaaaaactcgatttcagaagataaactatcctatgcacttctcgagtccggtccgttttgattttgtactttttggggggtctccaagcatccatcttccacaccttggactaatgcacctgaaagctactcaatgagctcattagtcctttaaccacatttgtcattaatcaccaaaacccactaggaggattaatgcactttcatgcacgagcgcaacgaataaggcggtcaaacgggctcgcggtcagcccatgccagtgaaaatggcccacaaacatcctcattgccgtgcgccgccgtttgttgctctgtttctggagggaaaaaagggcgccgttatactcggatggagggaaaaaaaagaccattcggctgctgttcttacggcgatgaagatggtgagcgagcaacaag

SEQ ID NO: 42034 - DNA, 3571 bp, Oryza sativa
ataagagtggggggaggagacggagataggggtggtgggggcgctgggagtagacagggactagagaggtgagagggaaatgatggtcacgtcggcagggcgggggtagtgttggctggcgcgggtgcccggccgccaaccgacacgtggcagggggtacggcaggggccctgcgaaagcaaccgccacgtgatgcccagcagggcggtgtcagacccccgaaagggactctcacactcacgcacccaaatgcccaacccatggcctcctctctcatctgcgcttcggagtacagtacagtacgtacccaagtgcgtgcgaagtttccaaccgacaccccccgcgcccggcacgcccgcgacgacacgctacgcacgccgcccactctctctctcgcgagatcacctcagtaccacgtacgtacgcacccgacccgcgtacccggcaacaagcgggggtgcacgtagaaaatggtaggagtggctccacacaggctggcgcgcgtatttggatcagttaactaatccccgccccctcgtgggcgctgctgcagcgcgcgattagttagtgtatagttttagttaatcacggcgtactcggctactgctgctacggcgacgaggaaacggagtcacgtgtatggaggtgcggggggcgcagcgcaactgcgtaagcacgagtgggcacgtgccgcggggattccggggaccccccacgctctctcttctcgcctcgggatcctcgtcgctgtcacgtgattcgatgccgttgccacacacccgcgccaccttccgcttccgcttccgtcgtcgcacgcatatcgctcggttaattctccccccgttgcaacgacacacatgacgggcggtgagcgggccggagtagtatacagtagctcgcgagatatatgtacgtacaggttggcatgatcagacagatgatatatactgtatcatcgcgacttctgctgcagaatataacaagtgaattatgacaagtggccggccggcaggccggtgctagcttcacccggttctcggataccgtgccatgtactgtaggagtactgctttgcatgcctgctgtcagacattcagttatgcgtgaggtgtgacgtccgagttttacagtaatccagtactactagctagtacatccagcttccctccaaaactttataaccaggcatgcaagtactactaggcatgcaggatgaagggaaactggagtagctatctgcctcattccatcttgctctcctacggacactagatacctctgcacatacaatatgatcgagtacgtttgatcccgatcagggagtgagggatgacacattctcatttctgtcgcgaatgttggatattctttttcaccgatttattagagcccattttgctttcaccttaccatgagtctcaatcaaataaaaacaaattaacagcatgctatatactgtacatttattgtatgaacaaattactgcggttttacatgtgttgggagaaatacgacccaacaagttagtagtagttgtcaagaagctagatgtaccaccggtcacataattatagccaataataaacatatattccagtgttaactctggtaaattccttgtcaactgagaatacgtcaatagcccaaaaccttgtgtaatagcctccttggcttgagcctagattttgtacggaggaagatgcatgctgctaattagtactatatgcctctgatattaactgtctcattatgtgcactctcacgcaaaaacaaaaaatgatcgtcacatcaactagattctttgtttgtgagagctaagaagacagaaacgagcatatatagatgcgcaaaacaaacagaatttacaagttgcggccgagagcacagataatgctacctagaagcaaaggattaagggcgccggtgtttgcaaatgggaccaatggttgtcaacaccttgatcaataacatactgaccgaaaattgtataatttcaatgccacctaagcaagtactgtcgagccctggcgacaaacatacagaacccccacatctcacagtaaattatgccattataggtgttctccttgggttacagtaaatgagtgttggcagtagaaaaggaaggacgcaaaatggtggtcctctggtcgtacacaggtgaaggggaggtgtacagctagcaaacgatatcgtacatttccgtgtccctgacaagacaacagcgcgctgctccacctccaacctgtggtccttcatgtggtcacaaaatggcaaccatcccatccatcatcaatttagctatatgaccatatccaccgtttattatgcaaatgtctcatgtttttgggcccattacatcattgggattctcattggcttgcaatggatggttctaatcatgactaatgagaaaacagctagaaataaacagccttttgaaaatcgtcgatattcatcagtgtatagacaaaatcaaattttatcattaagggcagtggtcctttggttatactagtgcagattagttgagaaaaaaaagccatattccgacatgtcacccttatacatgtgttattaattggagtggcaatagttgcttctcttgtcacaaagcaagttggaaaaggaccccctcggcaagctcaactgctctaataggccatgacagacccttgatcacccccaattaagcaaacgaaaaaaatatatatattgctctaaaagatgtcatcagtaatttactgtttaaccaacgggtcaattttggatggtgatgtttgctacagtgtaatgtgcaagcgcacacacctgaatatctggctctaaagctccgtgtaaccacgacgacgtcaaactccatttcaaatgtctagttcatccaacagttgtggctccttcacagagagaaaaaaagaagagaaaaggaaacaaaaatgctatggatggagatactagctcagataggtgcaagtcgttcgaaaatgaggtgatgaggggcaagcgagagagtacggaagggtgtaaggaacggccgaagaggcatccacgtctcggaccggaggctggggggcagcgtgcatgattgcggtggcgccggcgcgcggctttctttcccctccacgacgttaattttcaccgcgcgcgatcgcatgcggagtacggtagccggccgcgctccctgccgcacgccgaactggcgcggccgtcgtacgtggaggtgcggccacagacagtggcactgttgatgtcttgcaaaaatagcatacgactataggagcgccactgtacgtaccaccactgcatgggcactctatgcaccaccatgccttgtgtggataacgtgcatgcatgatcaaaccagcgtccccctctatctctctctctaatttttgcaatctgcttgctatagctccctctctcctgggagctagtactagtagtgaaggtgcgttccttcatgggggattgggtgagaaagcccattatattccgcgcgcacgctttctaaactactaaatggtatattttttaatatgtagaaagttactttaaaaaatcatattattta

SEQ ID NO: 42035 - DNA, 643 bp, Oryza sativa
caagctaatgttcaaaagccttatttataactacttagtatctacttttgttttgaatgcagggagctatcaattttcaattgcatggtttcaaatttgttcgaggagtacaaattcttcccaaagtatccagatacacaacttaagttagcagctgtgctcatgggtatgtgctcattttttttatttgttttctttcctgaagaattctgtattcagatacactgatttttatctggcgctaatttactcatattgcaatgtttctaatttggtgatccgatactcatgatttaataggatatttggatgcattttttttaaactaggtgttggtgctccacatctgattattttagtattttatgttgtatttgggaagttaaaatcgctgttatgaccataacaaaatgaaactattttttcctctctctctctctctctctgcttcattgcaggcatactcttcacaaaaaaaaaaatctgtagtttgctttgatgcatggcctgttgtggacttgtggttaatataatctgatcaacaatttgcaacatcattcgcaaggctcttgcatagaaatttattaggctgtgtgatgttcttttttttacgattgcatcatttgtaattttacatgtcagg

SEQ ID NO: 42036 - DNA, 518 bp, Oryza sativa
cagtccaaattcagcactgacagactccagtagcttttcctcccattttgcatctgcaagtcagactacagaactggtacatgaagaatcagatcgcaatgcacacctttcaaggtaaagatgcttggacttcttgcatttatttacttctatcggagcactcattcttaagtcttctgcagcctttcttcaaaaattggcgcgagtgacacatctacccaagttattggaaccacaaatgttgcatctgtttttccgcctatggttcccaatgaccttccagtgggtgaaccaacaaccacgaataaagtcagtatcttttactcttgtatttaaatgaggaaatggtgctgaatgcgttctcttatacctgccaaactctgttaccaggatcttgttacttcggcaccactttcacctacaactgctgttgatcggatgggatctgtttttgtggaacctttgaatactagtgatgcgctggagatgtaccaacaagtttcacaaaaggtacaaat

SEQ ID NO: 42037 - DNA, 540 bp, Oryza sativa
tgttgctgctctctgcaaacctgctcgctcccccggcgctgctgctgcacggctgctcctccttgcgggcagcgcgctcccgcggctcagccggcctgctgcactgatgctatcgcggccgctccgtcacggctgcgctccgatgctccgttgcccgcctacttgccggttgccgcagagccactctcgatcgcctcgcggcctcgcgccaacgcaccatcgcccgctggcgttgcacgccgcggtgccgccactcaaagggggactcagggggaacaatgggtccggtggatgtaggggggctcaagtcctcatgtacccacgttgaatttgcccctgactagtatataacttgcatgtgagatgttaggtaaattttgctataggacatcgcgacttcgtggttttagttgtaggacaccgcgtgaagtgacttttaggaagacactctcaaatgtgctataggacatcgcgacttcgtggttttagttgtaggataccgcgtaaagtgacttttgagaggacactctcaaacgttgg

SEQ ID NO: 42038 - DNA, 601 bp, Oryza sativa
gcattaatcctttacaaaacccaaccaagcaagcatcaggcaagaatctagaagcagctattatcaagaagaacaacagaacagtgaggattggaagcaactcttccagtgtttgatttaatttccactgaatatctatttcaacctaattagataatcccccgtatcatacttcccattctccaaattgagcactaccaacaggccatctcaatttccaccgaaacccaaatgatgtaacagtcaaaccatagccataaacactcaaatcacaaccgagaaagaataggcaatgcggagctgaattctcattgcaaggcggaagatggtcaggcgcttccagcagccgacagcaaggaggccccggcggtcatcccaggcgaagaggttggcgccattggtcttcccgatgatggcgacggtctcgagcccggggaggcgatggaggttgacgtggaggcacggagtagatgggtgatgcgggcggcggcaccggtcggggtagatcggcgatgcaggccacgatagggcgcgatggagaatcggcgatgctggtggcggcgccggtcggcggcggttggcatgaggggcgaggcggcgt

SEQ ID NO: 42039 - DNA, 1323 bp, Oryza sativa
cacaattatggctcttcagagttcagagactgactgaatgtcacatttcagcagctaacattttcattttcagacaacaaaagaatctaccatgcattaatttcatttaagacaacaaaactcagcagtaaaaaaacttccattttctcaacagggagttctctaaactttcaggatttctatgagcagaataaactgcaacctctgaaccaggaacaataacactatggcacgtacatcttgggaaagattcaatttttgaatggtcgtgagaaatatcaaataacacttaggccaacatttctaggtgaccaaccaacatcagggaaaaaaactcaaaaggtagccgtgttcttgcagtgccaagttggaatccataccattgggagctgtaaatggcacaagaggagttggatatggaggcaaggggaaccggcattgccgtgccagctgcctgaaccgatggcgtcgcttgtagatgcttcgcagattgcggcagcagtcaggtaactgaaatcacatttcctttccctacatgaaagaaaccctgcagaaagatgcaagagaagctgatgagaaaacaagatttcagttctgaaaaaccagtgaaagctccaatggaaaattgttagaacatcacttcagtttgcaacaagaagtttcaggactctttatgcaacagaaaactggtttagcaatgcacatcagtagcaaaaaaattcagcttcttggttgaatctctcattaaatctgatgttcaggttctgtttacatataccaaaaaaaataagaaccaccccataattcaagatgtactaaaatttgcattttgcggtgaacaaagatgtactaattattaattattaggcagggcaataccatctatccatttgctcgccatacggccaatctgggatatgctctgcaccatcgtgacactctcgctccttctgtccagtacacacacaaaaacaaaaaaaaaatcagaaagacgaggattggagtcaagagagatgaggaaagaccaaaaagctaaaaagctagattagtaaacaggtcacaaccgatggaaatatgcacaccacagcagtagttgaagcacaaacatgggcgtggaggtggtgccgttgccgatgcccaccatcaacgaggccatggcttcctgatccacggcagcaatggatccgctcgcgcgaggatagaggcagacaaccggcgacgcgtgaggataatggtggcagcaccgagatgcacccctaaaaagggtattaggggagccagaaactcttttctatcaaacaaaatatagaagttcatttaccc

SEQ ID NO: 42040 - DNA, 700 bp, Oryza sativa
cagcaatagctatcacagatgcatggtggtcacctttagaataagttccttagttgttcggctcgctattgtaacacttctttgaatgacaggacctataatctctttgatggccttatccaaagccatatccatgattctacaaataccaagaatgtaacagatcattagaaaaagaagatcaaacgtaagctgatattatcttcaaaacacatacttgctatactgcaacgagccaaaagagctaagcttttcattaattctgaaatatatatctgcacgtggaattgccgcaataagctgtgaaggacccacaaaaaatatagtcaattataatgaaaatcaaactttgatgtacatagagataagcagcaagtgcagacctggctaagagaaaatgaagacgatgatagtgatggtgtttgtgatggcgaaacctggctcaaaccaagagaggaaacctgttcaggcatgattaaagcggacttgtcatcttctaccatattgtttgtaggaaggcgaagaggtgctgcatactgtagtacaaaaatatccaacatggattaaaaaaacatttgtgcgtacagattttaattaaaactaaacatgaaagcagaagaccaacctgactcaacatatttggaaggcttgtagcacgggaagtgctatttatctctggttgtggttccacatggtttat

SEQ ID NO: 42041 - DNA, 1138 bp, Oryza sativa
cacattgcaaacaaaacaacttcaaaaataccaccgttgaaatttcatatttaaaaaataccaccgcaatcagccaaaataagttcttgaaaatgctgtcgctgtgatgttctgtacagatatgctttttgaacctttttggggcagaagattctgtaaatattaacaatatccttttttctcctcttcattgcactctttgagattacctttagttatatttgtttctacaagtaacttgcatgatgggtgctttatgtggcaaggaaatgccacctttgccaaagttatcttgcacctgatcagtttggtccttctagcttttcaagtcaattagctaaaatctcttggtatcattcaagagccatggaacagatttaagtcatttagatcaatgatccattttaccaggaccatccttttgctgttcttttaccatcacatgcacactatgaaatatgtaaaaatagaaaaatgataggactgtttccatgcatatagatcttttggccaagttaattcaatcatgggtaattagttatcaagaagtctgttccaaatagttttggcaatatgactgtttttctctgtacaagtgaatccgttgatcttaaaagtcatgacttgtttctggatcaagctcttttgagtgacttaacattttgtgcaggtaatatattctgacgaagataagaagtttaacatcgacataattattggactaattcggtctgaactgattaatcttggggattacaatgttcatttggcgaagattattgatggcggaagaaacagtaagttgagaaagtacttgaaaagctagttcttgtttaagttgggtattgttgtatgtttggcattcaggcatagatatacctgtgttattctagcatgtagcaagtgaaaagttttcatgcattccgtttattggtttgtcagttaaaacagcttgcatgtcctgtattgatgaaacaaatagggatgtgatgaaacttatccataatttggcatactgcatccaatgttcaggttgatgaagtacttgatttagattattgaatttgaaatgttgctgagccaacttgttattgattttcttttctaacatagtttcactaatcgaactatttggtta

SEQ ID NO: 42042 - DNA, 540 bp, Oryza sativa
agtgttgaaattattattttttatgtcttgtgatactaaatagatgcattaaaactgtttcttattacattaagtttatcgctatgtttggttgaaccttagctaaatatgaactattgtaggctgccacaacaccatcgtcacaagcttctcctcatcattctaccactgtatcagctcctttacaacccactggctttctgcggtctagaagttctgctccttcaggtcactttctagcttacatgttaagctcaacactaatcagaacttgctgataatttaaccatagtcattatcattctttgtgctcgaatttatggccttacattattttttatgacccgtccattgttttctaggcattcgacaaccttccttcaccacaggatttggagctgctctgaatattgaaactctagttgccgctgcagaaagaagagatacaccgattgaggtttgtttaatttttggtgtgaaaccgtgaattgcagcaaaggtccacacttctcaaactatttaaaccggtttgggggcctg

SEQ ID NO: 42043 - DNA, 1129 bp, Oryza sativa
ctcactgctaaaaaattgaactcatctttactgactaacatttgctaacaaagctaatctttttgactggaatttgattacagaactagcctatgttgactgaaatgtactgtcagaactaattattctgggtgctaacaaaactattctgatatgttggtgcctaacattgttagaggcacacaaaactaagcattgattatctgacatttgcacatactttcagtgaattaaaatgacctaaacagaactctgaaataattatagtgaaaaccctcctgaaatttcttcaggccaagaacaaaaatagtgaattgtggatactatgatagaaatcaaattgttggtgataaaacctaaaatcataaagtagtcatcaaggggcctccccttgctctaactccagtactccacaaaatccatgtattgttaatgcatatattcaagcaggtcttgttgataaaaaaatctcgagaatatcagacaaaaaacaaatatgcccccattgccagtacatgaaaatgcactaatcctcccccaactctgttgccaaccctcgggcccacatgtcagtgagcagatgatctggattgtacttgtacacatacaaatcaggaaagcacaaaaaagataatagaatcactaacctaataaaagatcaaatacatcctccccaaatgtatatagcttcagaaactgcattatacatcctcccctaatgacataaaactttagatcgaacttaatcaaccaaagtcaacgcacagcatgacacagatgacaaggatctactagcttagaaaatggaaataaactattgctcaccatctgggccgtaaacatcacattgcctaatttttaggagctgaagccacagccgcaacagcaacctcccatcacctgaagattgcttcatcgccgggatgccttgtcgagtcagcggagtacggagtggcgttgctgcacgagagaagaattctctggagaagacgagcgaggccgtcgccgagaagaaatcggcggagttgcctcctcccatcgtcgccactcgccatcgacattcgacagcatcacccaccgtcgaaaagggtggaacaaaccggatccaaaccgaaatagcttgataaaa

SEQ ID NO: 42044 - DNA, 2046 bp, Oryza sativa
ccaccccccgcgcacgtgcactagcaatgaatattgcaaacctgctgttgttttacacacacagagagaaatctttaagcatgatccgaacaaaaaaaggaatttatattgacaagagcttacttttttacatgcctgaaagaattcctggctctgatagccagatcccagacttccacactccttagtgaaatcaatgataacaatatcctcggcagtccgcactatcctccacaatgatgtgccccacaagtatatgttcatatttttgctgagccacgagggcgggagatcagatccatggttcaagagactgtctgcacattctagatcaaattaagtcccataaattaagtacaaaattacatataatactcacacgtgttaaacaattggcaatctcatcaatctgacttgtgcaaagcatgtccatatcacaaatccttggtttgccagaaataacggtatcaacctgaaaccaaagatgaacttaattattgtacttatattttttccggagcaataaagtaacgccgaccaaaattatttagattaaaggactggttaaaggtacaaggacaaaggacaacaaccatttttgctgcaaaaaggggcacacttgcaaaaggtgttcaggccttcagccttagcttgtagtaccaccgattaacagtgccaaactggatctaacacgttgcctttgttacagagcacaccaggaacaccactttacaaacaaacaaacccaagcagctcatagtaaaatcaagatatactactatccacaagattaaaaaaaggatactcctgcaagttttttcccctctgagaagctaaggggcaattatggatttagcgctgcaaccgtacaaaacgtattatagcttcactaatgatcaaccctgcgcattattcctagttttcctaaatcagaaacgggtaatttcataatgtgccagagaaagcgaagaagtagagcagcgggagcagaatcacacctccaaggccccgacgcgcacggactgaggggtactagcagccgtcgatggggctcgccgtggagccacctctggcactgtcaagatcaaggatcagaaatgctaagtctgtaggagttttagaagaagttcagagttagtcccagctcagtccagaatcaagtctgaagaagaacaagttgagggttatgaagatcctatggctgagattactcgcgaaggggtattaggagtatctgaccgttaatagttgtcggggtccactgttctctttattttgtcatttgctttcgtcagctgaatgagctgtaacttatctgtaatgggagttgtggtcctcaccgatgtaatctcctttaaaactctatgtgagatgaagagaaaaggcatcgagaatcataattactgtctaggagtagcttagttagaaccctagttctgttccttgcggcggccacttaaactgaagaattgggttccgatcgaatttggactttctccatttctactcctaggatctgacaagggtatcagagcatagttgatttcttggctcttggatcgatctggtgagggttggtggaaggcggtggtggaatccaccgtaaaattccttaagccggcgagatccaaaccggaggggagagttagggcagggattgagcaagggttggtgagccatcctgcaaaggtgtgctcctgtaaaatctccgaagctcatctctgttcttggcggcggtagatcgatctgtgaggcaaaaggggaggaattctttccgaaccgcccttgcagaaagctggatggttactaagactcattccaacgagtcgatagttgatatggaggagatgaatgaatttagattggatgttgccagcttgaagaaagatgtgcggatctgaaatcactgaagactgagatgagggaaatcaagggattgctgagggagctatgcaagcagaagaatattgaaggaacggaaggggaaaaagggctagcctcgactcaactacctcaggacaggacagtggcgcaagctgctgatgg

SEQ ID NO: 42045 - DNA, 573 bp, Oryza sativa
tcagaagtagtaagctcactaagcaaatttatgaacaaccgaaaatacggccgaggattgaaagaaactttcttttcttcagcatctctttgaataatcctaactataacagaaagaatctgcaaagaagtgaagaaatacttaatggcaatgccaatataaagtctcaaagagtcattaacaacgtaaaatgctgaccttattaaaaaggcttcctttactcggtccaatatccacagaagagtactgaagaaatcaacagaataatatggtaagtactgtccataacagagaggtagggaacataaaaaaattagttcagatatttcatgttaaataaattttatcatggttcaagatagcttttcaccgcagcatcaactttagaacaactttatatatgtatagtaacatcactcaacagaaaagaatgcaacatgttagtcaaagctattttagaaataggaaaaatccatgctaaagaaatcaagcagctatatacacaccacccaatacagatgtttcaggaaggcactttggttatagcttcttcaaaagaaatgttatgcaatc

SEQ ID NO: 42046 - DNA, 542 bp, Oryza sativa
ggattgggttttttttgggatggagggagtatatgtgtagtggatcttgctttatacagtccatggtttcagcatcaatttgttctctttgactgctttagttcaattgaggggttcactgttcacatatgatatgcaatgcctgagttaaaggttccagaaaaggctgaatgaccaaaaaaaaaaatcaacaaagagcatactttttttttttgccgaatgtagttatatattatatcaatcaaacatgtgatgggaagatatatggagcgttatctgttcgcgcataaattctacatgtttagttcgaagttcgaactgaagttgtattatcatatagtttattcttcaaggcatcaatgtttatttccattttttgtttcaggtgtttgcatcataacttgatcaagaacatgttgttcctgatatatggtacaagactcaaaatatcaggtaaatcatcattgtaatacaggattgtttcacctctaagcagcagatctcatggacagcccccaagcaggttcatgtcagtatctcag

SEQ ID NO: 42047 - DNA, 678 bp, Oryza sativa
ttgatattaaaaataattattaagtatcacgtatataaaatacagtatgaatattacatatttgtagtttggtaaagttagtataaaatttaaaattatattgaatatattttaataataaattgggaaaaaatatatatgctattatattagatagaatatattagatagaatataatgatcctagccgcgcaatttacgcggaccaccatactagtttatatgtaaacaatatttttaaatacttttcatattcctggtgaatagtacggacgcacacggatatttattgggttttttctccgttgaacagtagtacatatttatacaaacacgtgaatttttttttcagttttttccgatgaatagtatacatgcgtagttttctctcgtagcgcacgggagataagatgggacgactaatcatcttttttttaatcatttttgttcgaaaaggacatcgtattccgcgcgcacgcttcccaaactactaaacgatgtattttttgtaaaaattttctataggaaagttgctttaaaaaatcatattaatccatttctaaaatttaaaatagttaatactcaattaatcatacgctaatggctcacctcgttttgcgtatcttcccaatcttctcaatccccctctcctcaaactcacccctaagtactatttac

SEQ ID NO: 42048 - DNA, 814 bp, Oryza sativa
  unsure (1)..(814): unsure at all n locations
tcatcagtattaactatctattgatccccaagctatctaaacattcaccaggctcttaggtttgtttgttaattttggctgcaaacgaagaactcacggctaatttggatcatttcacgtgtcatcttgtttctgactttgcagggtccagagagatcatggaactggatgtgacaattagtgaaaaagaaacatcttgttgtcaggaggacgtgaagaaatgtacacagattgctttggcttcagttttccctgcctttatcacggacttcctgggagcttatggcttgcaggaagcctaactcagagatctggtcgacctcgtgtccaatgctttcttgtaatttcttcacatgcatctacttgatcactttgtttcgtgtgtcgccttcagctcggctagcttgtgatcccgagttctagaaaagcatctggaaatgaattgagttctactttcaggaagggataagcttgattctgtgctccgatcgattaggtcactaatgcgaaattgtttcatccatgctgttgaccagtcatgtctaaattctgaattctggccaaattgaaatattcatgactaaaaaaaattccgtacattgcaacaagatctaataacattagataatctaattaagactaaacaatcactctcaaactccaattaacaatgacaggattnnnnnnnnnnnnnnnnnnnnnnnnnnncaacatgttgtgcatgaagcaaatagggatttaaacatagtgctactgctgcatggccggtgccacattggtcaacaaagatggagctcatagaaagagggttggg

SEQ ID NO: 42049 - DNA, 632 bp, Oryza sativa
tactcctactccgtagtccgtactccccttatttcccctcattgctcgagttattatggcctaaaatacggctccagcgctgctgcgagctccgtgcaaggctacaatcagaatgtacattaatcttcctataggagtagtagtagaattcaaatcaaaaagaaaaaaaaagaactcttacaatgcgtcgtacgctgtacgtagttgctgtgatgcattgcattgtgcgatttatttgtgattttaatttgttttttttttagtttacgcattctttataaataatgtctacgggtatagcccgtcgacagtgacgaacatgtaaaaacactatcatgacagagtgtatgcttcggactcgaaaacaccaagcgaagcagggtgaggacataattacttttagtattttactagcaaaatgacaatatgatgtaacggatgaaatcaattttaattttacatacatacatcaaacatgcacgttggtagattagtcgaaagcaatgacacattaactaccacatggtgagtgcataaggagcagaaatttaccatctctcactaaatcgattagtccataattagccataagtgttacagtaatctatatgtgttaacaacggattaattag

SEQ ID NO: 42050 - DNA, 647 bp, Oryza sativa
tgttaaattatatgcctacgtaaaaatatatttaacaatgaatcaaatgataggaaaagaattaataattacttaaattttttgaataagacgaacggtcaaacatgtactaaaaagtcaacggcgtcaaacatttcgaaacagagggagtactaaattttaacgtcccgcctctcctaggccgggcctgctcagaacctctgaaccagcgacagtaatcgctactgaacacacccaagatactaaattgtaacgtcccgactctcccaggcctaaccagcgacagtaatcgcaaaccaacacaagtcttttctgcacactttgtcctcacttgtgcgcactcgggaacaatgtcaccggtcgggaaattgttcccaaattgtaacgtcccgactctcccaagcctgaccagcgacagtaatcgcaaaccaacacaagtcttttctgcacactttgtcctcactcgtgcgcactcgggaaattgttcccgagtgccaggccttccgaaaattgtaacgtcccgactctcccagacccgaccagcgacagtaatcgcaaaccaacacaagtcttttctgcacactttgtcctcacttgtgcgaccagcgacagtaatcgcaaaccaacacaagtcttttctgcacact

SEQ ID NO: 42051 - DNA, 688 bp, Oryza sativa
ctagtttgggccacttgtggtcaatggaactgactatagattaaacagttaaacattgagattatacggtttgtttgaaagctttttagaatattagggttttttttgtttgcgagaagaactataggaacttttactactgtgtcgaattcttgtgtcatgaataagttgctaaagtctagcttggcatgctgagtcatgagattaggaagatgtgcacaaaaatttaatacactgcagaaaatcagacaaaatttcttttaaacattaaagcatgttaaactttaaaaatgtacatagacatgattaatttatactccctccttcccaaattgatcatcatataatgtaattcaaaatttctcaaattgatcatcatataaccgcatggatacggatttcatcacaatacaattaatgtagcatgggagaatgtgtgcatgctaaggtgtaattggcatggtgttttaattgatgcatacattatgggagattgtgtgcatggtgtcttgattgatgtgatttaaataatccttggtcttggtgcataaatatatatgatgatcaatttgggaaggagggagtattgttttctgagttgtatgatggcatatgttgctggtttctgttgtacataagatattatctgaaattattaatatgatgcattattgaattattacattct

SEQ ID NO: 42052 - DNA, 1937 bp, Oryza sativa
aactagtctgtcactcgcagctttatgaaagataagctatacgctggcaatccaaaagaaactactcggattattgatcgctacaataagtagcgttggatccgcggaatacacgcgtaacacgaataagaatcccgtgttattatcctgtcttgtgcaattgttactattattgaaagttgtttatgacagtcggcaccagctgctggccagtagccagttcgtccattgtgacttttgcaccattataaatatcaactgtaaaacatagtggtcagtcatcactacgatgatgagatttagtttggttggttttgctgaaacattctctatgcgatcaccgtaaaaagactactccgtattaatctatatccgcagtcatggtctcatggaccatgaagtccactttaatagcgagttggtttgcagcggacatcaattctactaatcagtttccctaaaaaaaaatctactaatgagtttgctttatctgatatgcttacgtttgtcctatttttgtactaaccaccccttaaaattccgaatacgacaacataacaagcaagatcagcacccacaggttattacaataaaatactttttcaggaatgagatctagtggctctcttttgcctttagtcttgtcggccaaattcatcgattcgtgccgtaatcacgagataattccaggtggtcttaatcagaatggtttagttagttccttaacgcgggtcttacgcgccaatcccgacaggtgcagggtccatagctccatcaaaccacataattcctatatgacctgtggcatgtttatcagcagaaaacgtggcttctctttccttgccgttcccatcacaggacgaaaaagtgtacctctggcaagtcgatctcaaaagtacagatggctcaggtgagcccattctggtggccacggctgtgttttaaggtctgttagggaagcttccggctactgcaatttctcttaaaatcagaagctccctaaataatctagcttttggtatagttctgacaagctgtggttatagaatctaaaaaataaactaaaaaccagaagctgaaaaagctttttctagattctcgaaagttggctaccaaacagccgcttgttagaattttaagttcccaaaacatgcccttaatgtggttcaaactgagaataatgaagacaagcttcctcttattcttcttctcttttttttgcaggtgaataaaacatatttgcatacttaactggcatatggctggtttacagcctgcacattgcacaaaataaaatttttaaaaggttataatcgtacccaaaattgtatacataactaaaaggattccattaaccacctgcccatgcacattgcgaagaattccattttaaaaaatcttaccagagaaaaaaatcatgcagcagcaaaagaaacagttgggagtgaattttaagtgtaaacacgatatcagcttcaactcattttgagtaaagacgtgggaatttaagacagtaaactgaataaaattaatgctgatatgaaggacttattagttgagctacctctggtaagccattgaaatgtgaaaacaaacaacaataatttatgagtaaagtaaagcttttatatttgtattactcatggtttaaaaatcaaagtttaaaaatatactacgataaaaaaaaacctaaaattagctataaaatcaagttttaaaatttggctacagccagcaaacagacgatcctatgatctacgttcctgtcacaccactaatcacaatatttatccaaagatgagaaatgacccgcatcgacaggaccctttttttcaacttatcgattctagtaccctatcataaaagggatgtctccaaatcctattcagcccaaccaatctaatccgtacatcaaattatttgcttcaagcatgttt

SEQ ID NO: 42053 - DNA, 2313 bp, Oryza sativa
cacaccctacccctacgagcacctctggaagactgagctggcatatctttagattgacgaagttaccacatgtgtctcgctgttgaaaggtacgtcgcctgctactaaaaaaataattaatcgtaaatatgatcactcttgtcaaatcttgaatttgaacctgggtgggctggttccaccacaaggaacttaagtagctgagctacgctcatttcacattaatttttttgttcgatggtaataagcgttgttaactcattaattgtacggcatttgcaggctatattaaatcgcccgattgaaatggtgcaactttgaagatgcatgtatggctattacaatagtgcttgattttgatgcaaaatactactagcatgagtagggtgttcgtgagaaagaaaatagatgaaaaaaatggcaaataataatgatagattaggttggtatcttgaccatgttttttcggagcatatggatagttggtgtcagggtatacgtgagattgaggtaaaagaaagacatgaatttttatacaggttcgtcctcccgcttactgataggtaataaccctattgttattggctgaagtctgtattgcctttatagatcaatatcacacgagtacaatatatgagatgacctagtttgtcgctgtcgacctagcatcatcgctgtcgacagtgtagtgatctttttccttgaatatgaactcaacgagattggagatgtttctagatctctcatgtcagcctctctggctcatacattgggtttgtctatatttgtattggcttgtcttttgacttggcatgtcccctgatttcctcctagggggtcttgtattcatactctgggtgtcccattatacaagtagaactagggaaacaagtatggatacgatccgagtagttcctgtagtgtccgaatagaactttgtttgtccttccttatctagaacatcttccgtatatgaggcatgatttcgtatacgacttggtacatgatgggtcccaccgagtcttaatacaagagtattgggtatgttttatctataacaccgatagtcggctccaagcatccattgcacactaatgccagagataattaaggaattgatagactagctagctaggggatgtctggatacgtttttgttgcacacagcgatgtatgaaccgttctagaacgctttaatttattaagaaatcatgcaaaaactaataaatatttgtattagttggaaattcgccttatagcttcactactacagaaaaagggatcggtgctagttaaaaacttgtcataggtgccagattttctaactgtcatctagtaggcaatacctttgaggaagactcaaaggtgtaggttctaagaatgaaaaaaagaaaagcaaaaatcccggcttggtgcatcgcttcgaatcgagccaatacatcaaacagctctccatcatcactgagatcaacatcatctccatcaaccaaacacaatgatatcaccgtcatcctatcaaccaaacacgatcacaaactcaacaaaatcacaaatacaaatacatagaaaacgacattgtcatcatcgtcgatcccgcctcccccgtaagcacaacagtgatccggtcgcctccgtcgtcgtggcggcgtcggtcggatggagaagaggaggaggaatgaggggaggcgacggttaaggaggaggagtgacggatctagaaagaggaggagggaggaaaaaggaggagcggcggcgagggctaaggaggaggaggaggaatcccttcttacgactataaagttatcacacggagttctggacaagctctcgtcatcattgaattgcatgatgtatgatcgctgaccattcacatgatgtcacactcgagcacatgaccaataatttatcacggacctcctgttctttcagaaactgtactcccgcttcttttgcaggtcatatcactcgcaaacgccagtgaagcaactcccattagttacaagcagtgcgtgcgtgcattatcacaagctcttgggctgatgcacaattaatgtgggaaggtaaggaataaatgaagttgtacaattatatcctacctcttccgttccataatataaaggattttaacttgttacttgtactgtttgactattcgttttattcaaaaaattttagaaatattttttttgatcgacttactttattatccaaagtactttaagcataaatttttttttatatttgcacaaattttttgaataagacgagtgatcaaacagtgcatgaaaaagtcaaaatcttatgggctgcaggaat

SEQ ID NO: 42054 - DNA, 1255 bp, Oryza sativa
atgataagtagaattgcttatccttggtctgtgtgccaagatgaaatatatatgactatcaaaagtagatggagagagtatatcctagcaatttgaatatgaatatgtttcttgtctagattcgtaatcctagaatacgtctctaccacccaaaatcttttatatttttggacaaacggggtataaactagttaagtccaatatattattacttgcttcgatttgataattcttacgtttgaacaaggttaagatcaaatttttataacttttactttcaataagtttaaaaatatttagtttaatgcatagaccatcatatacagatttgtattgtaaagtactaagtaaaagtaaaagtaaaaatgtatttattgattgtatatattataatagaaaaacttagttaaagatatattttgaagatcgtgtcattgtaaaaaatatcaggaattatggaattggaagaagtaagtttttaataattatttaaacaacatataaaaacgatgcgacggtatctgcataaagacgaaattacttctgcgagagcattcccatttgatttgttcagcttattactgccatagccagccacctgtgccatgccaatcaatcgatcactacttgtccttctcttgcagatcgaattaatgaactactccaatcaaagtctaatagcaccatttaatttgacagcaactagctagctagtgacagtctgacagagcagcttcagtttcagttgtcttgttttacccacgtacacgtacacacgttcttggctgggagcaatccatgcatcatgcatgcatgtgtacgtacctacttactccctccttcttaaatataaatatgtgacgctgttaacttttttaaacatgtttgactgttcgtcttattcaaaaacttttatgaaatgtgtaaaacaatatgtatacatcaaagtatatttaacaataaattaaatgataggaaaagaattaataattacttaaattttttttaataagatgaacggtcaaacatgtctaaaaaaaagtcaacggcgtcaaatattttgggatggagggagtacatacggagtacagtagtatacatacgtcgtttagcaaccgttccatcatgaacatgcttgagttgagcttcgtgaaccacatgttttaattaagctttctctggcttgtgtcatgccatgatttggtacgctcttgttggttgggagttggaacaacctagatagataggtcttttt

SEQ ID NO: 42055 - DNA, 914 bp, Oryza sativa
atactaaatctcacgaggagtgagctatactaactctgttcttgaatatacgacgttgtttactactgttagaataaatttataaaaaagatatttaaggtacttcctccgttgggctgtgtacatttattgtggatgtagaggttggattttaatctattttctaaaaaaaaagtacttcctccgttgtttggcttttttttcttaattaaagttctttagatttgtttaaatttataggaaaaaatagtaatatatatctacaacaccaacttagtttaattaaatttaacattaaatatattttgatcaaacatatttgttttgtattgaaaataatagtatataaaatttggtcaaattttaagaagtttgactaagaaaaaagtcaaacgacttataatatcaaatgattgaattattaaataatgcgataatcaaatatagaatgaaacaagtgtagtgttcttttttttatcttactgacagctcattaatcatattactgatgactgatgcgtctgtattaataatggacaggcaccagtaacaagccatctagctcatagtaatatcatataaatatagctattaaaattgtcaaatgaaaatgaagcatattcagaagatcctgcctctgaattaatacccagagaaaaacaaaaaagagagaaagaactcataagccataagccaaagattattactggctagctatatatatatacacagaatcacaggtcaaaaaggagagagagatagtagtatagtagtactacatgttccacaggagcgcgccgaagccggacgccacgacgccgtccgcccagacatggtccagctcgaacccgagcgcgtcgtgcacggcaatgccgccgccgccgccgtcctgcagacacgccgccggctggtcg

SEQ ID NO: 42056 - DNA, 1531 bp, Oryza sativa
  unsure (1)..(1531): unsure at all n locations
aaactctaaccttaacttatacttttacatatttataccaaaattttgaataagatgaactagcaaacgttatgtgcaaaaagtcaacatatcatatataaaaaaacgacgaaggttgtattttttttaaagttaactagctacacaagagaacatatctggtgancccttaaaatcaggtcgaaaagttttgtaaattaataaaaaaattaatagagatggatgtaggcatggaatacattcttacttcaaactcaattttatttgagagtaaaaaagaaacaaatttcggctaaatattaccatgacactattcacctaaaatttgtccttttctcttaaatgacgttgactttatactccgctaccaaagatttttgctgatgccaacctatttttttttaagcagacaaagtaaaaaacttgtgaaactgaagtcggaggtccaggttagtaaaccgcttgcaaaaatatatttctacaagcggtcatcttaaaagggctacttgtcaaaataacgctacatatgggatatacttgtatactaaactcgacggggcccaccatatacaaaggtctctacggaatcgagcctgaaacgttgttgacaagaaatccgcgctcagccaatggtgcccgaactgtgttggcgcgaactaagtcaatgaacacaacggcctgggagatctgcttagctccattgcaggtccaaatacgatgagatgcgggcgtaccagtcagtttgattctgcaactgacgagatatatatatagcagatgaaagagccaatcggctgacaagccgatggagtagttccagcctatgctgataccagccgataacgataggatttgagctattggctaaatgtttaatgtagagtctgacacgatgtaaataatgatatgaagacaatccgctgatgataacaatagaataatctagtagaaaccaatcggctaacaatataatagaataaacactaatccgatggttaaagcatacatcggctggagatccgatgtcataaaatctaaatgattagataaacagtgaaacctttgttgccattggctaaatccaacttgcatgttatccttataaaccgatgcaacgtcctgataacttaccggctgaaaccctgatgaaacccttattggcaaccaagaagaagactagagattatggttctaagcacgacttagtagatcaaacttaactgatgcagcactaagtatgaaaagaaacataatatctagacaatcaagcccttgactgattttcagggtagtggatatcttagctaatctagtctggtaaagcgatttagccgatactggcataaaccttaaagcgaatctcagccgatacaagtaaatagagctaccaaactagattaactaagatatatgataaatcggtaggcaaatatattaaccaaaccagagcaatccaggaggtcgaatgtactgatgtagcctttgatgctgccaatgtagccgatacaattgtctgggccggtggaacgta

SEQ ID NO: 42057 - DNA, 1667 bp, Oryza sativa
caattacatggtttcaatacaataacctcccagaccttacctcctttcattcaataatggaactaatggtggtcagcagaggcaatgaaaaattcagggtttgtttggtttaataccctaccaaaatattggtagtgccaaaagccaagtctcggcactaccaatattttggtagggtagagttgtatttggttggagaccaatttagaacaagctttgagtagagtatagaaaatatcaaactagacattggcaataccaatgatttggattcaaaccaaaactaccatatgcactgttcaaactaccataatattggtagggcaccgttttggcactaatccaaaacggccctcagaacaaaggagaagctttggctaactaaaatctttcatctattgtggaacatctggaaagagagagagagaatgaaggatctttcaaaacttctccactcatccactccaggttgcgttgtcatccgcgagagtggttcttcacttgaaactagctgtctagctcaaagaaattaactgatcatctttctgtttttctttttggcttgctcattcaacaatccttgcactgtcatgatacgcagtcccttgcctcatcactcgagttgtatattaatgtttcgacataaaacccacaccattgtttttggtgcatatcccggcaacatatttcgatggaccaaaatatagatattgggctccattcggcattgttacagtttttcaaaaacagttactgattttctattttgagattaattaaggaactagtagttggaagcatttttttttgtaagtttcagattagattttcttaggcaacatatatatttcaaggaatgctactagcattgagaagatgagtgtaagttcgataacactatgcctttgtaatccgtcgaagaagtccaagtcgagccgcaagcagggacaatggtgctctatctatccttacaggagaatagaaatgaagttggtagtggcggcgagatagagattattctgttacgatagatatatagaattagaattaggtcacagtcgcacagacatataatcaagagatgctgagataaaattgcatggcgtaatgcctttaaagcattatgcatgcatgatgatatacacaccttgcttgcttttatgctctgtcgtctccaagaataatatatgttaccacttttttttacacatatggcgttaacattggcctgttacatgcatgcatatatggatcatttgcttgggaacaaattaaactgtggactatgtgttcattcagttaacgtggtcaattaggcttaaggcttttggtctcagggtggggattgtattgcaactgggcaaatttaaagtggtatcatggaagtagctagctagctatatgtgcacgtctgcatggtttgctgtctgggggctgtggctatcaaagttgctttagcaactaggggctactgaataaacataaagtacaacgtgattaaaggagaaccaatcatggagaggcttccattgttccttttcggcgaggtcatgtcaatttcaacagtaagagggaaagcatccaaatttacaatgtgaagcgaactttgctactgtttttttcatcagaactttttcaaataagctagcaagttgaagggctgcagg

SEQ ID NO: 42058 - DNA, 636 bp, Oryza sativa
cccctcctccctccccccccccaaaaaaaataaaccctatataagtagggcaaggagtccctcaagggcataaaccacaacaagatcatcggatcagtacaatatctgacagatacaattcctaaaatagaaatagggtattacttctcatcgagaagacttgaatctgtctaaatctttatcactttactcatctactttagatcttatgtggtatcccttatattattgccgattttccaaattgacacatattttccatatctatactttctatataattggtacccactaacaattattggaaactaaatttcaacatgcaagcatgccacatcatcacccactaacaattactattctagcctatttaaaatcgcatgcaaacatgccacatcttcactcactagcaattactctctccgtcccaaaataagtgcaattttgcactatttatattcaatgtttgaccgttcgtcttatttgaaatttttttatgattagtatttttattgctattagatgataaaacatgaatagtactgtatgtgtgactaaatatttttaaatttttcaaataagacggacggtcaaacgttgggcacggatatccacggctgcacttattttaggacg

SEQ ID NO: 42059 - DNA, 1473 bp, Oryza sativa
ccctcactggccactgtcgttgctcatatcctattctctcaactttatctgttgctattgtattcttggtgaccaacagtggcagagccaactagaggccacgtctagagctcaactctattttgtcacctagctaaattctttacaaattcatacatttttctgaattttatataaaatctacatggagtttggatcttagacctagggtttagggtttagctaggctttaggagtttgagccctagtcgtcctaggcctggttccaccccgggtggccaatgcgttcatgctgtcctccccaatcccgtttgccatgtcatggaatcatctcggatcttgcagccttagaggtagagtggctcagggtggtgcgcaccttcaacgattgagtgacatggaagtcgtagaggagcaccagatttactaagttgcggagtggcttgggtcagtgtctttaacgataaatgatggtgaagttgttagatctacttgttgctgggttaggccatatcgacatattgacatcggagtggctaggctccagagtctaatctcaacggcaaagagaaacataagatagaggtgactcatcgaacaaacattcctagttttgcttggtgggacaacatgttcacacaattcagcttcctaagcgatggcttcatatgttggagttacttttagctaggatatatacctatgtcatttgcagattatggagatggcacgaggttacccgttaactagggtttagttctaacgtgagcctaaatcgttataaatgctctattataatctattggtatagcatctcaaccactattcacgcggcatctattagccctattcggtaggcaggtgtaacatctggctgcagccagccactattttttttatttgttatgcttgcttcactgttcctgcgggtacagcagcactgcaacccttgtagccgaacatacccattgttagtgtagctcaaccactgtgtataggataacctccaatgatccttctggaacgggaatatcaaccaaaccaggtgagattagaattaattttcttaaccgattctcttttttttaaaaagaaatctggatcaggatcgatcaatcaagcggtttctagaaaacaaaccggtttatcgtcacattttcagtccctgttcgaacccacaaaagctgacatgcacgccagtgtcgccgatccagtaggaccaacaagcaatttgcatcaacggatggtcaacctccgcttttcctcccctttccatgcggttacagctgccgaaggccgtagaaaccaccaccacagccacatccgccaaatcgcataccagccgaacaaaagcaccccgtccttctttcgcgtgcccgagcacaccgcttttatcaccacccccgctgtcagcatcccgaactatcttatatatactccatccctcccaataatataagaggttttagataa

SEQ ID NO: 42060 - DNA, 1869 bp, Oryza sativa
tggttccaataaaaccaggactaaaaagcatctttagtcccagtttaaaagcttaggggtactttttgatctttagtaccggttcgatcattaccaaccgggactaaagatcatttttagtccccgttgaagaagttgtcagatcgtcaggccccaattatctttagtccatgttggtataaacaaccgggactaaaaataaatctttagtcccgattgcttataccaactgggtccaaaattcaccccaagccacgtgcatatctcggtcgatctttatctctttgcgcatctgtctgtccttcctcccttggtcttatcccttcttccccaccactcattctcctcctcctcctctctcctcgctcctcttcctcctcctccccttcccctctcccccgtcttctcggtggtggcaagcggcggccggcgcggaggcctggcagcggcggctgcccgcgcggagggcccacggtgatatgcggcggaggtacggagggctgccctggtggcgggcaagcggcggccggtggcccagagcggagggccgcgaggcggcatgggatttttttttcctttttttcttttttccttcttaatgtgatgtgaatgattgtgatttgtgcgatctgtgatttgtgatgcgatctgtgatctgtgatttgtgaatgatattgagagatatgtgatatgtgaactatctgttatttgtgatttgtgatgcgtatgtgatttgttagtttttaatgatttggagatattggacgtgagaaaagaaaaaaaaaccttagtcccagttggtgggactaaagatttagtctcaattggtgttactaaccaggactaaatatccatctttagtcccaaattgttataccggttaaaaaaccaggactacaggggttaccaaccaggagtacaaaccgtttctccggtagtgtacaatcctataaaatattattttaagtaaggttgattgcaaataatataaataaatatgcttaagtttacgtaaaaaccaattacatttatcaaaatcaatttatatgctttaatttatacaacatattattattgtatataaaatttgtacttttaaaatatagagtatcatgatcctatggtactatctcaatacttattaccttttctttgtcgtattttaagtgcagtcgtggatttttatgtataacgtttaaccacttattttatttagaatttttttgatgattaatatatttttattactccctctgtttcaggttataagacgttttgactttggccaaagtcaaactattttaagttaaactaagtttatagaaaaatatagtaatatttataataataaattagttttatcaaatcaataattaacatatattttcataataaatttgtcttgggttaaaaatgagtctatttttttttacatactttaccaaacttaaagcaaacttaaagcagttaactttgagtaaagccaaaatttgttataacctaaaacgacggagtagatgataaaacgttactcgctctatccaaaagactaaattcttggtttccatgtccaacgtttgatcatccatcttatatgaaatttttttatgattagtattttcattattgttagatgataaaacataaataatactttatgtgtgacttatatttttatatttttttataatttttttaaataagatgaacggttaaacgttagagacaaacattccggaattgagtttttttagacgtagggaaaactgttcggctgccattgtctacagccgcgggtccctcttgcccgcaccgcgacataccgggacaccgggtggggttccccggagcgggggggggggggggggc

SEQ ID NO: 42061 - DNA, 656 bp, Oryza sativa
aataattttcatactaaaatgttagacacacaaagtggtatgcagaaaagcacaacaatatgaactggaaatatatgggagtatcacttgatattgttggcaatgaagatgacagtgaaaaagggaaatatggggaggtaatggtgtcaactttgctgccctaaactttgccatctgaatggatgaatcatgattaccctcgccttagatataggtagaaggacagtaaagcgagagccgattcaaaatggtaagatgtggtcggcaaaactcaaatagagaaactagacgaaacagacagcgatcatccattatgatttggaatagctggaggattgatttggtcaatagctgacactccattgtccaattcatcatcctcggattcactctcaataagctatccattgcatgggcgctttgttgtgaggcagtgtgtctagctgcaataacagggtgtggcactggaattgtacgtaattctccggcagcagctcgtttaaagttgttcctccttgatgctacataaacaagggaagccaaatggagaattatgagtcgtttggcaaccaactaatctaaacatcttatgatagggagtaacttgcagcatcatacgagattagacaaatatagtaaagatattaaaattgagt

SEQ ID NO: 42062 - DNA, 1046 bp, Oryza sativa
gagaggccgcgaccggattaattaatcgcgactggacagggagtgtgttagttcattttgggctaaagaatgggtggttaattggttgaaccaactggacggtttactttaaagggcaactgttccctatcacccggctatgatcggccgatggatgcttctatgaaacagggtatgaaaagatggtgtagctaatggaggaattttaacttgttaaaagtggcaccaacgacctacctgctgtctgtgttggggtgtataaaaaggcggcacgcccatgtgagtgttggtggcgagaggtaatacataaacatgcatggtgatataagaatgttgctttgttacatattcttctctcatctctttaataaaccggtctttctagcttgggcgtcgaagaggtgacgggtaaggatcgatcggttaaatgggataattagcttggggacccaagcatgtacttgcgtgcaaccgtgcatggtcatatacaggcgtgcacctacgtagtattcagagtgctcagctcagctcgcgcgaaatcacatagcacgacgattttttttttattttgaagacgacaatactttgcaatatcgtttggatggaaggttggcagcacagctgcacaggcgtatatattggcatacatgcgttggcatattgtgacgtgaaaaaggggcctgcatattttcctgcgccgccacgcagagcattagggaagaaattggtggatcacgggccacgcagtgcatgcatagcagtcgcactcgcgtagcacgtacgggatcgggtaaccgactactcctacacacgtacgcagcgctcctagctagcctacgttcacgtacgtacgcgcgcatcacatcacatgcagtgctagacttgcaggaagccggcgctcgcacgccgtccgctgcgacccgcgcggagagcatggagcgaggcgtgcgtacgtgctcccaactttttcacctcggattcgagcgagccgacccggacccgtgcccgcacgcggagcggtcgttgccgcgctggtgctgctgcta

SEQ ID NO: 42063 - DNA, 1790 bp, Oryza sativa
cgctggaggcgccatgcgaatgcgacaagaggagcactacgcggacgatggagccatcgccgtagcggatttggtcgtcggccgagttcgtccaggacgacgaggtgttcgctgccggcaacgtgggatcgagacactgtgctagtagtgagccgccgacgaggaggatgatggctccagggacggcagacaacagcatcatcgcgtgggggtgctgcaattttttttctttttagtgagcaaggctaacaagatcgaagagtccgtttttgaaagttgtgacttagggtgcggttagttcgcgaaaagaaaatttttaagtgtcacatcagatatttttttagagagtcacataggatgtttgaccggatgccggaagagattttcggacacgaataaaaaaaactaatttcataactcacctggaaaccgcgagatgaatcttttgacctaattaaaccatcattagcacatgtgaattactgtagcacttatggctaattatggactaattaggctcaaaagattcgtctcgcgctttccatgcaaactgtataattagtttttgtttttatctatatttaatgctctatgcatgtgtccaaaaatttgatgtgatgtttttggaaaaataaattaggaactaaacaggccttagcaataacacataatatttcgctggggcggcgaaccatagattcagaagtctgaactttttaccaggtaataacccagggtcactcactcctaccatttataatactgtcactgaccagttgacacttcgatgtttcgttgacgtttaccaatccaactgcttcagcgaactacgaacgcactgtttgtgtcccgctcatggttttcttcggttccgtatggcgaagatgaagccaagtttacatgatttggtataattttacgaatatatatacaaagtcgattacaaattaaaacttaaagttataataacgagacactaccaattatagtcgcatagtgacaatagtataggtgtggccacgactagcaacgacatagccagccgagagttgtgatatctggatacaatgtaatatgctaaattagggaggagcgcatgtaatcaatttctccgaaattagctgaaaggtgtattgtgttgggagagttagctctaaaaaggtgtttttatagaactcaactatacgggaactcagttcctcctggtcagaaattattactccatcatgctatatggagtgaatttggcattttcctcttctccatcagttgaagcttgattgcttcaacatacggatcgacaaaccaaaagttcatactagaggtaattaataggtttcatgcatttaaactgatctactaataaccctagcttgattaattggactgtgcggggatgcgattccttattcgacttggtgttgtgcatgatctggtgcatgcagcgggagacggatgcggcgatcttggcgcatggagccgggcggggacgaacgtcaattacagagaggccgcgccggtgtaaaaacgctggcttcctagcttcgctaccataacagattgtgcgacgaacagactcgtcaaaatctgaaacgggatgggaaaagtggcgacagacgaagtactagggaatcactatcaattttgttagtaggtaaagatatgtagagaaattttaccgtccttgaaaatatatctcaaagtaccacgattttatattaaaaattttagcacctcaagataccaagtttttacgctagaaaatatggtatcttcccgtactttgccaa

SEQ ID NO: 42064 - DNA, 1062 bp, Oryza sativa
ttaattattacatgcatgaaacatgaaataaaaaaaaatacatcgctccgttttataatagataatgacattaacttttagatacacgtttaaccattcgtcttattaatattttacaaataaataaaatgtaaataatgcttaaataaagtactttaataataaaacaacactcatcacaaaataaataatacatatttcaataagacaaatgatcaaacatgtatccaaaatcaacgatgtcatttgctagtattgttttagtatggtgtgaggtttgtgagaccctgctcatagtacagtcatatatataggaaaaggtacgaattgttgccctgaactattacggccattcgaattgccctcctaaactcctaaatccgaacgaatcacccctccccctcacccctcccccgcgctaactcaatccagagcggtttttagcctacgtggcatacacatggcagcctagtcagcaaaaaaaaatcagtgaggcagggcttcggtgatgtgggccatacagcggggtgagaggaagcgacacggcggggcacctgccgaggccagtggtatggaggcagaggcgagggtggcgtgaccggcggtgagggcgacacagacaaaggcgaaggtgcggctgaagaggcggccatggccggtatcgatctaggactaggagccgacggggatgtagaggttggggaaggtggcggcgatccgtgggcaatgcagaggaggcgtcgtcgatctgcggggaacgcaaacaaggcggctaggacgagctgtgcgacggggcccggcgtgccggcggcgtcaaatcccggcatgccggagccatgacccagcatatcctcgtccggccgacgagagggggggtcagagcgggattggatcaaattgcatggaggaacaagagattttggtgtcgccgctattgtgtataccgccgctcgccatcttttcgtgcaagtctggcgtcggctatcgctcccccaatcacaggaggacaaggccctgctgatgagcttgacgggccagccactgccggcgcacgccttatct

SEQ ID NO: 42065 - DNA, 3257 bp, Oryza sativa
ctatgcaagtacgaagctttgcccgatcctcgtcgtcgcatcgtctcacaagacgacgccttcgatggatagctctcacatcgtttccactgcaaatggccaatccaaaagcgagaatagtacagaatgacctaatctatatatatgtctatactattataaaaattgaagatgttttgtcgatattttgatacgtcatctgtgtatgagtcggtttttaagtttgtttgcttttgaaaatacatatttgtatttgagtcggtttttaagatcgttcacttttagtaatacagaaggaatcatataagaaatttgtttaaaaaaactcgcatgctaacttgagacgatcggactcctagctgcagctcatgattttctatatatatatatatatatatatatatatatatatatatatatatatatatatatatatatatatatataagcgaactcccacagtgaatttcatcttaactaaaccatataacaataataaaattaaaataaccttcacacgttgtaacgcacgggcattttttctatctctactattataaaaattgaagatgtttttgccgatactttggtatgtcaatcgtgtatgagtcggtttttaaatttgttcacttttgaaaatacaaatccatatttgagtcggttttaagttcgtctgcttttgaaaatacagaaggaatcgtataagaaatctcttttaaaaactcgcatattaacttgagacaattagacttctaattgtaactcatgattttctaacaaagtatatatccaagagaatttaacacaataaatttcacgttaactaaaccacataacagtaataagattaaaatagccttcacccattgtaacgcacgggcattttttctatattataaaaattcaagatgtttttgcctggaaattttgtacgtcatcctaataacacatgcttttattttcctactccgttccatatagtataccaacgcaacacgcgtccgactatccgtatttgagtcggttgttaatatcgttcacttttactaatacagaaggaattatataagaaatcatgatcagactcataactgcaactcatgattttttaaaaatatatatatccaagcgaactctcatagtgaatttcatcttaactaaaccatataacaataataagattaaaatagactttacccgttgtaacgcacgtgtattttttatagtactaaataaatagaaggagtaaaacttcgaacagagtccggctagccccatgtcgtgtcgtccacttgccatgcatgcatgatgatttcacccatggatttgatcgatcgatcgaccatcgccttgagttcgttgtgcatgcgtgccgcatgccccttgtctgtctcgatctccgtccttttttctaaaataaacattccatgtacacctctacagtacatatatatcctacttatataaacacttctaaaaactagacaacagattaatcttagtattgacgaaattatgaccagtgacgattttatatcgacgagcgtatcgtctactattaaaaaatagttagctataaatacgagtatccatgtaaaattttaaaaaaactcgaatgaataagttctactatcagtagcctaattagttcagctacgttcaggtaactttttttccctgtgatttggacttgactgcacgcttgcttgcatgcacacggagggaccaaacggtgaggcatgggagatgcgtagatgcgttccatggatctcgcgacagtgatgaccatcctggattgtccccggccatgcatggacactatatatgtctctctgttttttttgaaaaaataatttcgagggagaatactttgtctctttttcgtttgcttaattaattttctagctactagatatatagctagagtattaaactacatgcatctagctagcatattagagggagaggccttaaattggcctattgttgtagaagaagctagtagatgaatccgtactatgatcatgtatatataggtagattggttggtacaacagtggaatgaatgtgtagggatgtttcatacgtggactggttgacgtcctatatttgttcacatgtcaattaatgtgcatatgtcatactatgccttgttttttgtggagagattttgtactcccaaccctctttgaggaaacttggctcttcatagaatgctaaaacttttgcagaatcagctggctgaaggtaaaatgtcatatcatgatatcaatatataatagaaaaaaaagggaactatttgcacatatttatatctacacggttttgaaatgtatctgtgcattaggatgtgaaaggttggttgatgagtccttagcttgtttttggggctgtctagttttcactcccctaaaaaaaccaataaattctattcacttttgaatgccccaacatgggcgtatctacaagccggacaacccaaaaatttcctagcctaagacccttgtagaaaaatatagtaaaaactaataaaaaactcctgccatgtgaagagtgaagtcgatgcgtggttgtcttggtcccatatcgtgtttttttagttttctcgccacattggcagcaatcatcatgccagacggcaactacgagtctgaggcagagacaacaaactggtatggcaaggatgcaacgcactgtcatagcagcagttaccacgccaaacaaaaattaggaatccgagacagagacagtaaaatagcacggcaagggtgtatcttgctgtcatagcagcagtcatcataccagacgacaactaggagtccaagatggaggcagcaaactaacacggcaaggatgaaaggtcatcaagtagtcaagccgacatgttagcaagcaggaaagggcaaacgtcgtgtcacgatgttcgcgcctttgtggcagctagctaacaacaaggtggtaagggcggcgcacggtggtaagttggaccacccaaacctcaaatcctagatacgccactatgccccaggtcatgccaagattcatacaacaatggtccatgggtagtcctccagccatatctttttcatccttacgtcgcttcacagcgctgcccctgttcacgccatgcgctgcatctacgggcttaggctaccccctctacctcgccaactctgcctctagcaccggtgagccctaccatccccctcctttgagtagccccacaccccgccttcttccccatctagcaatttcac

SEQ ID NO: 42066 - DNA, 3007 bp, Oryza sativa
aatcacaaataaaataaataataattctaattttttttaaataaaatgaatggctaaacagaacaagcaaaaagtcaaaataacttatatattatgggacggatggagtataacgacaaaggagacacactttgccgcagctaccagttggctggctgatgagaagaggtcggtttggctttggtaaagtaaacaatcgcagtagattagacactcctgcctgaccaatcgtcgtgtgacagagcaccataccgtactccttactactgatgccggtcgaaagaatagcttttcactggcccagctggtcgatacatcgatcagaggccacatgttctcgtcgattggtgattaaaaaggtgataaatgtgcagcaattagcgatgacgacgagaagatgaagtgatcatccaactaaactcgatcctttcgttctcccgtgtgcagtgcatatgcacgcacgcttgcgcgggggtggccggcgcacggcaaaagctggtcagatcactgtcgccgcgccggccagcagcgtgtgtacagcgttaggagaggacgatggcgacggaacagcgtgtcacacggcgcggtgtctctttggcccagccgctgtgtaagttaaatttgttagaacataagtataaagaatgtgtgtttagattaggggggtaaagttttggtatgtcacatcagatattatatagggtgttgcatgaggtgttcgggcaataataaaaaaaactaattacagaatccgtcagtaaaccgcgagacaaatttattatgtctaattaatccgttattagtacattgtcaaatcatgaagcaattatactaaaagatttgtctcgcaaattagtcgtaatatgtgcaattgattattttttttagcctatatttaacactttatataggtgttcaaacatttaatgtgacagagtgtaaaattctgagatgcgatctaaacacccccccccccccctcttaagctggtatgtcacgtaaattgttaagggagtagctatatttatagtgccatatttttgatcaaaaatagtcgccatgtatttacattgtaagtccctaaattacatatgtaattttagtgtatttatcatgtaagtttcaaaattacatatgtaagttcaatgtaattataatgtaagtacaatgtaattatgcaacgtctatattttgcattgtagattacatatatttatatactatacagatacatatgagtaaaaccatcaaaatcttaaactaatgaagcatgttaagttttaattaatcgtgtaatgacagccgagagatgctaaggacctgagtggactgaacaacatctgacggtcagaaattcgactgtaatcagccataaaatatggcgacatcattttagcaaatccgattgttaattggctgtggtagaggatagagaaggcgagggaagagaagagtagactattctattaacatagacataatatatattattctttaaggataattgatataaacacggcatttacttcaataaaggtacatccacttattacatagttgttgttttgaaattaatatgatataattaaacaaaggtagatgtaaaaacgacacaccagcatgacaacaccaaacaaagaaaattagcaacttatttaaagtttaagtatgttactaaacctctatccaaagttaatggaaatctacacagcaatatacattatcggtatggtaaaatcaagtaaagtgagaggaagtcgaggaatacaaattttgacataaagcaatggccagagcccctccaagggctaaagtgctcaactattatacagcatatttgcataatagccttttgtaaattgatgcggatgaattagcctattaagttttagaggagggcaagagataataaagataagatacgcaaaaaaatatgagcaattagcgtatgattaattaaatattaactattttaaactcgaaaagtagattaatatgatattttaaagcaacttttctatagatttgctaaaataaacgtttagcggttcgagaagtatgcacttagaaaaggactttctcctccttatgcatggatgcgacagtcccgatgctcagcttggcgaagtgcctatgtgcatcacacagctactcacatctttgtgtgaggaacgcgaagagctgcgttgctcaggagccatggtctgggaaatcatcacaccgagcggtcatttgcggcgatgttcagaaatcaactgggagatggatgggaattagggtttgattcatttattaacaactagagtatttgggccggcctgctaatgatggcctttgttcatgtgttttgatggaccatttggggcccccacgtttgacccacggattaattccatgtcccactcccatcctaacaaaattgcagggttccgccccagttcaccgacgagtagaaatttcgacccgccctagcccccgtagcggtgggtccccgctagatccccgcaccatgcggggaaattaccaccctagcggcagtggtggtggtggtggtggtggcggcggcaagaggtggaaggggaaaggggtgaccggcatacagttgcggtggccattggggacatctttggaggattcatcagcggcattgctttgccatctcaagaagattgggtggtgcccccgaccacctccccgtcgttgctctccacgtccttcttcttcggcttctgatgctccaatctgcatcatctcgtcattgctgtcgacgcgacacattttccccttcatgtgccgccaccgttagagcgacaaagctgctcccggtcctgccaccaccgcagaagctttaccacacgcgacaccttcaacaccgccgaggacgctgccatggcgtacgaccgtgagaccttcaagctccatagcaagaacgtgcggctcaacttttcagaccggttccttaggaagggttgtgtagtgcgcctcaccactggagacatctgacgag

SEQ ID NO: 42067 - DNA, 2770 bp, Oryza sativa
ccttaggaagggttgtgtagtgcgcctcaccactggagacatctgacgaggcaatcgcgcaacaacagtgagaacagcggggcacgacaggagtgtccatggaaaaacaaccacagcctccagctccattctctcattaagaacgctgacacaaccacaccatactcgaacaaaatgcttcacatgccggtgtggcatctagcagcgtgtggattgactctgacgtgtgggccctggatagatggggagatgtggaagtccacttacatttgtgccccacgttttaaattttaatttttttttcttttttactaactaagatgctacatcagcaaaaaccaatcgatactgccatgagacttgacttggatgattttgttaaggtgggggtataaatttctggtattacagtttagggatatcgattaagctcgacgtaaagattaggaataggaatggaaaatgtacttattccttcctcatactcttccagcaggttctctcccggcccatgatgtcgatcgttcacaggccagcaagcaagtcgagcggtgccggcacttgcactggacggcggcccagcccatgaacggacggctgcatgagcctgataatcacggtaaccgaacgattgccggcaacaaactacgggcaatacgacttgagaactgcaaatataggtgaagagaagagatgtgttacaaagctctgtactggtattagaaccaatataagacagtttaattttttctaatccaactgtaggagtagtacaattttataaattaatggttaagatcacttttgacgcataaaggttaaggctcccatcggatagcctaatcagctaaagaaaaagccaaaatttaaattttgaagcttaattttgagattgattttgagatattttcaacgtagtttctttttcaacattggcttttaagtcaccaagaacacatttataaaagttttacctacaaattcatttttattttctaataagctgttttggcttattaggaaataagccaaacgatggagatctaacaagtagcaccgctgttttctctgctcatttcagtttcggatgatcaccgctggcgtcatcacgtcacagcttcacaggtgaagctagaatattaatgtcttgtacatatatgtctcgcgtacgggttaattccacagattcatcctattccgtattgagagttttcgacaactcatccaccaccacacacatgtacagtaccgtgacggggacgtacgtacaacctggctacacaagcaaacgcacacataatatgtatcgcgattgatcaccaccccggatgcccggatcgaagcccggccggacagtagagttttccacttttcatccaggaattctgcccaactacgtactatgccatacaagcacaagaagggtcgcatgagtagtagtagtaggcatcatctacatcgtcagtagtggtaggccaaagtggaagtgaatgaaggatttgttggtcaccatccaactactccgttcttgatcatcactctcctttctctttgtcaccatcctagaaatatatactcctgcttcctctttgtcaccatattgcttcattgcatgtctgtcttatctttagactatgggcatgtttcagattatagccaaaataaaccttaccattaccaaaactttgacaagatgctatattgccaaaattttgacaagatttcttatgtattgaccaaatttgacaacaaactaaacgtagacaattttttgataactttacaaaaaaatagtatagttgaaaataacatcaaattgaaccgtccctatatatggttcgtattttaaaaattaagtaataggtgagaagctaacttttgacttttactttattttctaaatcctatgactatcgtaacgatgagaatcttaattatctcgagagttagtgattctaaaatagttaactggctctattagggcctagtgtatagattactccgtattttaaatttcgaatttagttttaggaataactagtattaagggttttcaccactatttttatttccaaggatatatgtggtaattccggatttcttttaatcagtacttagcagacggtacctttgaggtgactaaaggtgttggtttaaagaccagcagctttgacgtttcagaaaggataaaaaagccagctcaatgcattggcttgaattgagccgaagcatcaagcaactcctcatcccacatatcaccatattaccattcatccatcctacatccatccacaacacaaatcaaagcatttgaatcacaaattttggcacaaataaagaattctatcactccaattataataacaagatgaacgaagaaaaaacaaagtttgtcccacctcaccttgtggggaggggccacgccagatccggccgcccctgagagctggttgcaagggcgtggggcggagaggaggaggggcggcgcttgatccaaccgttcctgagcgcctatggggaggggcggaggtagacctagctgcccccgagcgccggtgggaaggggcggcgttggatccagccgccctcgagcgcgggtggccaatgtgaagaggtgagaggagtaggggtggcccacatctcattgctgccaccgccgtgaccccccggcgtgaaggaagaacaggaaggcatggactaggggaggaggaggaaaagcaggtgggacggtggtttcagagagagtggcgagatgaaggggctgcaggaa

SEQ ID NO: 42068 - DNA, 2818 bp, Oryza sativa
tgtagtagtggtaccaaggaattgcatggtcaaagctttagatgtataattaattaataactgccctgtaacaaatttgaagtgttagtttcatcggtcatgaaaaaaatatagtactagatatattacttccatatatgttactaaatttccttcctatttggacaaagactacgcaattacccaaatcttccctagcatactgtttatagcattatattcaaacatacatactccctccgtttcacaatataaatcattctagtattttccacattcatattgatgttaatgaatctaaataactagacatatatctatctagatacattaacattaatataaatgatagaataactaattacattgtgagacgaaggaagtactatagaactctatagacgagccccagctaactaattcagagttaatttcgagtcctgatgagatcaggctgtccccttcacgtcaactcaacatgttaataagtgtatcatcacatcctgtttatagctagtatttatgcgccgccactaaatccgagtgctgttagaagttgccttaattaattcatcaatttgtgattattttaagaaaaaaagatgaatttgttctgttatctccataatttagtaatgcatatatgaaagtaggtgaaattggtagagcaaataaatgcccctctgaaaaaaaaaatccctctggtttaaatgatttagttattgaataaattaatactcctataaggttaattgtcccatttcattaatcctttgtgttcggtcaaaatgcatccatttctttaaaaaaagttcatgattattatatttattctgaaatatatattatgtcaattgcatggactactggtccgattgaaccaaaaattttaaattgataaaaatgcgggaaatcctttaattaattgcatcagctaagatttgaattcgagaccaccaattcacttatgctatctaagtcactttacttctaaggtttgtaagttggattgagtttaaagaaaaatataatatatagcaacttttctaatacaaaacaaacatattatcaaaatatattagatgatagttttaatgaaattaatttggtgttattgatgttattaactaatttcttttataaacttatcaatcttttaagaaaatttattagtaaaatagtcaaaatgatttataatatgaaatcgatgagtagtcaaactctccatctcagatgaaaactcccttgagccttaaatatcgaattaatagaggtgggctgtactgtttttaattgcgtgtcagcaagtattctaacttgatattgagctgcaagtaccattcaaatccgaaagtaaaagtaactaggaaaaatggtcaattcacctgtactctatacactgtatattgtactgatgttcttgtgagcttattatttggatatctttattgttaagttcatagaagtgaaagcattagtactttctctttcctcaaaacaaaaatggcggcgggttccattctgccattaatttgcaactcgaaatgtagcagtgacatgcagcttaatttgcaggcagcacctagtggcaggaaacctgcaggattttgctggtagcagctagtataatgtttgccattactaacatggattgatggatgtatacataggtaccagaacatcttacatatgcaaaatgcaacaactagtagaaaactaccagaacattttacatatgcaaatgcaacaacaactagtagtactagagaagtgccattttttgaaggatttttatggtacaatatgctggtagtatatattaccagtataaaatgaggtgttgggaatctaccgcaaaaatagaaaatgatcaatagttattcatgctatattttcactccgatggtaatcataattgtccatgcatcagatcggattactgaccggatacggtcgaatagatggcacaatcatatgctcttgatagaatcgatagattcatcaaacacataaaaacattaacccagataactagagaaacacataaaacatggatcatttacccttttaattttatactcattcgatttaagcgggtagaaaaatcaatctacaactcttggattgtttataatggcaatatatactaccagtatagtgtacctgtaaaaagcaccaaattaaaataggagtacataaaccaaaaccaatgctggattaaacataatagaatcaaagtcactggattagccaaaaaaatggcagacaacatcgatcgatcatgtaatgccattttcagttgagaaacataattaattaactggtctagaaaaccctaaaagaaatcaatgatagatatatatttcaattatgagtaacattctacaatatttacctagaaccaattgcaatacacgtacgtatgcgacgtcgcaacttccattttggcaaattaaagggccatatctaattaagggcatagtccgatctgattaagtagatagcgagtaggtggcaagcgccgaatccaatttaatcccctccgtcgggtacaccattttagtgctgatagtgccatgccatgcatgtcccttgtcataggaaataagccatcagcagttttgtactactggcctgcacaaggaagctatatcagtggttttgtagaaacatgtgctttatatcttagtgatcatcaccaaagccagcctccaactacctagctatataaggattttcatactgtaaacttgagtgtaattatgaatgcaaatttcactatatataggagcctcaaaatttgtgtaatttactactg

SEQ ID NO: 42069 - DNA, 696 bp, Oryza sativa
tgccccttatcctttttgtaggtggacctcttaagttatcgcctgtgaaaatcagacagaccacttaagaggtctgtcttgtcccacggttgtcattttcagaggcggctttttagctccgattgagaagcctacttgcctagaaaaaaaatatcattgcttggaaaaatatttttttactatgtttgccactattttaaaactttttttgaaaccgcgcccaaatgccaagttacataccagggtattctattcagatatttgggcaaaaaatagtcagatttctagcctttggattacacagatcaacaatttatcagcatgttagcgttgatgatatttctttgaaagttggagtctgccatcctgatacatctggaaaagatatatgatcaattcatataaacatatttcactcaaatttcatttttttacggtcaacatctaatcacggtgtaattataccaaagttataatgtacgcataaaaggcaggccaatgctagattagcatacatgcatggagcacaaatttagctgcccgtttcagtcggatttgcaagacttcagaggttagcatatttaattttgctcatttgctgcatccatggctcttcacgaggaaaaagtcggatggaagcgcccatctcaaaacagatcaaacggttagaaaactgactataaattttaaaaaaaa

SEQ ID NO: 42070 - DNA, 1661 bp, Oryza sativa
ttttttctgcaaaagttgacagcaacagcgtggggtgtacagtaaaggcagggataaaagaactgcacaatcataagctctctctctccttttggattgtcttctagtttagagtcattattattatttgtatgaattttgtcttttatagcagaaaagatattaatacaaacaaatgcatggacattagatcaagacccaaaggacagaaaaaagtgaccaaaagatgacagaagcttgagtcaccttaccagcaggcacccacatggtatacttcgcgacagtgtagtatggtctgtgtacttgtttcacattttcagcttggtagtcatgaaatgaacttagaattaaactttctagtttatccttacagaagaactacatgtaccgaaagtgaacctatatgagttaagagtggctttagtttggtgggctggtgtggtgaccatgggttggacctatcctgtgctggaaacatcatttctagaaagaacaacgtgttgctgggcgcagccacaagtatgaaagtcggtgacgatggtggccagggtacttattcataagaatgaagaaaagagtagtgaaaccgaccccgacagaagtcggcacagccagacaaacactctctctctctctctctctctctctctctctctctctctctctctctctccatccatcccctgatcccctaagtgaagacgtgacatctcttgatgttgtcccagaaagcaatcaaggaaaggagataacctgtgggaggagctcgtccggagagaacaccgtccacctcctacacattccgtcgaacaggtggcgggcgcccacgcgacgggactgtagagaagcgagagacaccaaattacaccactgaaacacagagaagaaacaagagggcctccacgcatcggcgccgcctcacctcactcgccgtcgccggagaagatacgctccccgcaccgccgccgctggcacaccaccgtcgcgcgctgcggtgcgctgatctgatcgctgggctagagggtggatgtgactgaattaaattaactgggcttaaaatgaagcaactaactgaattgggcctggttacaaagcccgcacccacctgagcccatcctatttaggaataagttcaccgaaggtccctcaacttaacagcgagattttttgaagtccttaaccacaaaaccagaaatgtttacccctaaacttactaaaaccgttcactcaaggtcctacggcagtatatataggtggtttcgctgacgtggcatcctagtcagcaattttttttaaaaaaaaagtacatgggacccacatgacaactgcacattttttttcttctcttttcttctccttctcttctcttctctattcctcttcttcagtgaaagaggccggcggcaggcggagcggtgcgcgcggatgcgggtggcatagcagagggcgagcgcggcagcggagtgacggcgggccgagaagtggagcgcgagcgcggccacgggcaaagaagcggagggcgagcgcggcggcggagcgggcggagggcgagcgtggcaatggcacacgattaactgcatgatgcatgcacactgtgcagtatatatgaacatgaccgattgattctatctggtacgtgctgctgctgtcggtacgtgctg

SEQ ID NO: 42071 - DNA, 2094 bp, Oryza sativa
tttgcgtgccaatgtgtagattccgtcgtttcggaagatcgcgatcgcgaggaaaagtgttcagaagattgattgaggaagcaaggcaagtcacacattccccttgggcatattgagcctactttataatttttttaccgtttgcagataaatatgcatgttttgcttattacatgggaatagggtttacctatctactcgcttgtgccatgtttacttgacatccgttctttgttaaacttgggtgataattcgactagcttatgttacttatgttgacctagctagaactgtatgcttagccatgcttaattaattaccactagctcacataatgggataattacattattagacatctagtatcttgacgagctgcgtgcttgagacatccgaccatgtttcattagtcgtaactacccaactaaatacgacttaatggtgggctgtgggtgcatggttttgctagtcgcacccatggcaattaaggaccggttcacaggaaaccctcgaagacatacatcgcttaccacatgtgggagtgggtaactgcttgagctgtagtatagctcgaccctttcctaggcacccgtggcgagggtgggcgtgatggagttgggtcggctggggtgtccggttgtccaacttccggattcaccagtggcgcacgaggggactgcccactcctggttaggggtaggggtgaaaccttagcatggtgtggatggttaggggagggttatgcgaagggtcttgcattgtcacaatcactcgacatggtgatgtgtcaggcctggcacaatgacatgccggtggattgtgtcttgtggacacagttgtgcacctcttgccagagtaaaactattcgaatagccatgcccgcggttatgggcgatcgaccagattcagcgtgattagtctcacctttaataaattggcttaatgaactggttagttcaggtgggatggttaggcctattcaacgtggtgtagcgttgatcagtggagatttaatattaccttaattatcaactattttaccattttcaacaataaatgctttacaaccacctttttgcaaatagccacaaaccctccttgtctcccattgcacgtttgcatcattggtgtggcttgctgagtacggtggttgtactcagtattgctattatcccctcttttcagaagtgtagtgcttcttagctgaagatgaagttagacgacaagggcttagagcccagttgagttttgcctgtggagtgaagatgtagccccgctaggatcgcctttttccgttgctactgctttcttttctgtgtgaggactaagtgtctcttctgtaagtatttacgctttatttacgtttggatgtgtatattatttgtcgttttgtgtaccctggctgattcctggacagggatttaatacacaaaatagtctagaaatttgggcaaaatttctgggcgtgacagtatgcatcctagggctaaccctaggacatccctaatcatatttattcagtagccgtcatagtttcgagtcgggtttcacttagattaattctgtcgttacatttttgccgatggttcggtttgtggaaccccaacttcgagtctttaatcattcatctgcaaattgagttgcaatctacattgttcttgcttgtgtttttcgattcgcatgcagggattaaccttcttagtgaggtcaactggatagcacacgattgataaccaaaggagacttggatcctattgatcggaagccggatcatgtgtgtcaagtttccaccaaatctagagttatcagcatatcgaaagatctaagaccttagttcctaaacatctgtgttgttactccatatctaaagtagcatgtcaaagaattccttcaatagctagatcgatggtgagcctgtgccacttgtatccaccaatcatttgttagtgtttcatataccgatcgactcttctgctttgagtggttgtagagtcaattgctttgcttccatctcctatttgtgtctctgttgctgatgttgcacattcggtacaagataaaatttcgattgttactcattgggctgcaggaatt

SEQ ID NO: 42072 - DNA, 1707 bp, Oryza sativa
ttatacttccagatcaaattctaatcatctcattccatttccaaattcttaacattgcaatgtaagtttacatgaaattaagggctcaccccaccattacaattcatgcatatgcttatgtacacagcagttagaggccattgccaccacatccccgcccacagcaaaacaaattccattacacaactagcagcacatgttattccgcattacatgctcgcacggtgagagttccttcatgctggaggaggcgccgttgtcgcccccatcaacaaggcaatgcagcctgtcaagacagtttgtctagctacaggaacaaggagtggcactggagttgtagcatcaagcagctcactaggaattgatgccacagtttttggttggctcatatgcagcaggtgcctggtggcacctcatcttgtgaggtttgcacgccattctccagcagcaacagctcatctaaagttgttcctccttcatgctgcataaacaagggaaacccaatggaaaattatgagttgtttagcaaccaactgaactaaacatcttatgataggtagtaatttacaacatcatatgagattagacaaagtagtaaagatactaaaattgagtccattaagcaagattaaaattgagtcaatcttaccaaatatagggaacacaaaaattcctttgttaaaaaaaccaaatttcatatatatttgtaagaaaacaaatactttatcaaaattgcatcataccaaaattttagtaatacatatagcacctagcagtaacacaattcgggtaccaatccaaacgtatattttgcatttcacccaaccaaaatttgtgatggcatcaaaccaaaccaatctacacttaataaaattgagttgtggaatatagattgtttaaggaaacaactaagataggtcctaaagatgatgttacatacaaacaattaatcatgctatccatcatttttaaaaattcgtcggcaagagatctgtcagatatattaagaaggggtgatagagtaaaaaaacaagttattagagttattacatcagacaacagaaacaacatgagagaactaatgggaagaatacatcaagaggaaggaaaggctaacatgcgttgatttatgtccgtagtggttaggttagcatccatggtttcatctgaataagtgtttttgaaaactcttttattcatctctagccatatgttccaccataagtgtttttgaaaactctttgtttctggttgtgtcgtcgctagtttatttcaccatggttgaatcaaggcttatgtcccagcttggttaaaaaatttacaatcgtaaaccagataccaaaccttctttgtgaaatcacagttcctgaaaaggtggtaggtattttcaaaaggctatgaacatagggagcatatccagttacacgaccaatgccttatgtgcaagttctccgcggtaaattctctttgatgtagtacaagcacaccgaagaaacgatccttcggctctgcctgtgctttccacaacatagggaagttttcatccatttttgatccatataattgcaaaaggtgatttgctattaaactacttgaggttgataacttacagaatagttattccctaatcaagtatttcatagcaatggacccaactctaatggagtcaaagagtctgagaaggcctatcgaggatacttggaccat

SEQ ID NO: 42073 - DNA, 657 bp, Oryza sativa
ttgaaatataaatttctcgaaaaccattcgaaatttcattcggcatatgctttcgccccatatagaaaccttcgaatttctcggttttcaaccagttactgttgagtgctacaaatcttgttgtaaagataataaagtactaattggataacaaatcaaaagcaacccagacactctgatatcagtggtgttgcgatgtggtaggaaagaaaccaagtgcagacaatgagcttctataattagggaacgatacacaacatgtgtaggacaatgacagcaactcagcaagacaacgtaaacatcaacttggacaaaggtatcctaaaaagggagcatgaactttgtaatactagcgacttcaatcataaaagacataacagaatccaatcaatgatccacgtacaatgtacacacctccgacagaagtacagagacaacagtcatagcaaggacagctaaaacttgttacgggagcacatggaaaataaaaataaaaaaaattaaagaactcctttcctgcaagcactcctttcccttcccatattttcttatcaattctaaagaaaaaatataaaaagaaagaataaaaccaaagtaaataaaagaaaaaagttaataagttgcataagctaacacaagttcagatccctgaaagag

SEQ ID NO: 42074 - DNA, 629 bp, Oryza sativa
atcttataaatctctgatagggggactactagtacctgcttactagcaccaaaacagagacattagatgtgagatgtctcctgatcagctttactgttcctgctttgcagcgcagtaattcaaaaggcgaacccaccacccccaccactgtaacaatcacgggggagggagtcgcgttgcgtgcagtgccgttgggtcggcggtccaaacagtacagacattctacatgcagtgagtgggtgaccgcatgcatgaaaagacgttcaccccaacatgcgcgacggcaacatctcgctgccgcagccagccagtgacagtcacagggcgaatcgaggaaagaagaaaagaaaaaaaggaagttagcagtcgtgcaaagcgaatagacaggacaggcagtaaacgccgagtcgtacatggcctgtgctctcccctccgagaaagatcccccacccccaatcccgaggcgtccagactccagactccagaccatccatccatctcctgcggtcacgcaggtcgtctcgtctcgttgcttttttttcctcggtggcccggtgcgatcatggatcggtggcggtagtccgtgaatttgcgcgtgtgtggccgtgggctgctttttcccttcccgt

SEQ ID NO: 42075 - DNA, 1286 bp, Oryza sativa
tagcttagctcccccgcaccgccatgggagggtggcggtggcgggagttgttgttgttcttcttgttgtcattcgggcttgttccttccaccacctcagccggagcaatcctggacgctactgcgatctgcgtctctgcagcttcctccgtttctgtctgctttggctttcttttgagatgtgcactctctatttttgcttcgattcgagctggtttgatgtcgaatcagctaaagatggcgtgtgcggcttagtgttcagcaatgggggaatgcaatgcggtgatatattgtctctttttggcttcaaattaaggattgatcctagatgcgctaaatttgatctatttgctttgagctttcttgtctcttgcgagatgtttgatttgtgttgccgagtcagggtagggagttgatttaataatggcgaatgcatattttggctacctggattagcaaactccataattatgtatatctaagaaaaaaaaaagatgtgaatacggaagattgaaacgattgtgggcatttcagctgaaggggaagactgttttttttttgaggatgaccggcattgtgtgccatagaatcttttcaccaaaatttgcagtacagttttaatggtttcttgcatggttcaatttacaaaactatacccttatgtactgtagtagtacatttgtatgggaaatcaccaagttgccttgcttgctgggagtggcaagaaggtatttaaagctgctgggttcagttgatgatgcatgttttaatggtgaggtcatagacaaatatgaacataacagagtgccacttacctgcatccaggtaaaaagatataatagagggattcacgattcacatcataaaacacaaagaaggtttctcaacacacacagagaggagtgctaaatggcgctcttgcgatgatcttcgtgttgtgctcatgatgccattgctttcagtgatcaaaaacataatttttaactgcgcttttgcgcttgctgcagaatagattagtagtacaggacaagtgttttgtctataggcacacccacagagggcacaacaaccatacttttctgtggattgatttgtatttagtctaaaaagagtagcagtttcttttacaagattgctaataacgcaccacttgagattttgagtaattgcctatttggaaatataattcattaaatctgaggtatattttcactttgaagtctgcagataaattggcatgtttcttttcaatttttcttttggggatagacatgcttaaattctgga

SEQ ID NO: 42076 - DNA, 595 bp, Oryza sativa
aagctgaagctacccaactctgcaaaagcttctatctaattaagctagaaaagatgcagcaaaaaaacacacacaccccaaaaatcaagtgtgtaaaacatgctccctttctagcctaaaaattaagaagaaaacattaagcaaagcttaatttatgcttgtagccaagccaaaagctaagtgaaattaaaaaaaccaagaaactctctagttgatgttgacgcgctggctgaactcgtcggtgatgaacggcaagcagctggagctgcgtgcgatgccgccgccgccggcggcgccggcttggcgggcctctcgggggttgatgctggagcgggagcgggggccgagcttggagcgcttgcggaggatctcgcgcatggcctccgcctggaagagcaccgggtgcgtgcgcccgaagccgttgaagcgcttgcacacggcggtgtgggcgcggagcgccgcctcgacgccgccggcgccgccgcgcctcgccgcctcctccgccaccgcctccgcgcacagcccgcacaccagccgccccgcgaaacgggcgcgcacgccgcggatgtactccggcgtgcactcctccgacatg

SEQ ID NO: 42077 - DNA, 735 bp, Oryza sativa
gacgagaaaacttgtgatcttcaattgcctgtaattgtatttgaggtgccgcgtcgtcgaggaagagctatgcaatctatattttcttgtgcgcatctattatttctattgtctgtatgtaattgaatttgtgtatcatgtattttagcctgcaaaaaaatctggcaatcacgttagtggagtgcgctaaaaatagctaaaagaaaaccaggatagaatctgactcggggcgctaaaaatagaatcctggacaaattagaattggtgtgtatgggcttatagaatttggtgtgtgtgggcttatagaattgtgggcttaatcctggacaaatcagaaccggtagaattctagacaaattagattagatagattagattggaattggtgtgagtatgggcttgtagatggacctagaatactgaaatcagtttgggcttgtattgtacttccatatggaccgaaccaaaacagaatcgggcggatgaatcggatcggatgagtttagcgcgattaatgatggacgaaaatccgtgattactgcgatgtgacgaccggaaaaatccaaatatttatattagttatatatgtgtgcctagattcattaccatctatatgaatgtgggtaatactagaaagttttataacctgaaacggaggtagtagcaatgtaatacactaactctaagtaaaattattttttataaggatctagttggctaattaatttctttgaa

SEQ ID NO: 42078 - DNA, 1402 bp, Oryza sativa
tgcatccatttctcataatatctacagttcgcgtggctacagccgagacgcgacgtcggtttcagatacaggaaacgaaacctgacgaaactgtaaatatgatacgaccgatcgggtggctggatgagttcagcatgtgaagctccaggctttacgcagttactgcgcatccaagttgataagctataatgattaagattggtcaatttattactactttttttttctgatcaagagaaaatgacatgaagctgaaaaaaagctgataagggtcaaggcctatgcatgtatttggtatgataagttgatgcctttttttttgtgaaaagcagatgagagagttcaaatgatagcttatcacttacttatcgcttgccctttttccccccttgaactctgaatatttctgacaaattaaaatttgttggatgtgtagagctttgttctgggctgccaatggaagttgcaatatatatgggatctgtactgaagaaacagggactaattatattggttcagtcaatgacaacaagtagctaaatcctcattttgtttggtcttagacagtactgttttacatttgcacttaacagtgtccaaattgcaaacaagcaaattgactttcccatcagagatgcatgagaactgatgaaaccataacagccacaagatgcaacctgaacggtatgtggttaatccctggccagtgctaatatctggcaaaaaggtacctaatacaatctaaatctcttctctcagggtgacacagtagctagctagcatcgatatctgatctcggaatccttctggatttcgttaatctgaatcttgattattaagctactgagaacagcaaccactaatcagtagttcagtactggtcgtagtacaactaacagtgatcagcagcggagggagtctggacagctaccttccagagatgtctcttggcgagctcctcgtgaactacttgactcttctcttcatgcgttttcttcagattgaaccctggccatgcatgcttacaattaatgattaccttttcataaagattattatttttagaaattattcgttgtccattattgttttttaattagcatcatcggccactgtttatataacttttgtttttttaatggaattacagaacttctgttgaaaatcaatcagttgaattaatcagtcatgccaagagtctcaaacatggtaggaaattagtttcagaaaattcaaaccatgacaaaaagaagaaaagaaagaaaacagatccccgacaaagaagaaaacatactcctgaaaatgcaaagtcggatcaaaattactagcaatatctaaaccgcaaccacaattggctacatttcacaatcacctttttggccattttgcaccttaattaatt

SEQ ID NO: 42079 - DNA, 605 bp, Oryza sativa
aatttacatagatttaattaccttaggaaatctccaaagcagcgtgtgtttttttggccgaacgaagccacgaataattggtagccatatgtacacagttgcagcagaagttctcacatccacatttgcctagatgtagttcactagtgaactttgttgcctgttctctgctatagttgccgcgctggagaagatccctataggtcaaatttaagcaataacaaacgtgtggtatcctatgccaaattgccggcacaacacaactgttgctcagcctggccagatatggtgatgaacaaggtaaaatattcagtgtccccgcaaaaaaaaaggtaaaatattcagtgatgatgctgactgaacatctctgtatactattatcggactgcgccagcatgtactttcacaatgtttcttgacgggctctcagaatgaagtgcaaatactacacctgaaaaaaatttcagagctgtaaagagtgctagctagatgcttagatgctgtcgcagtaaagaatcactaagtagaatcagccggtatcatgaactatctatctgtgatagagaccagcggcgcgtcacctgtaatacggttatcgtggttac

SEQ ID NO: 42080 - DNA, 783 bp, Oryza sativa
tccccccctctctctctcctctttttcttcatcgcctctccttttcttcgcctcggcgccgtcgccgtcctccactctcccgccgctcgcctgactccctctccctctctctcccgccgccgccgcgagcctcactctccctccctccctccctccctcccgttggcggcggctgtgaagacaatgagaagggctgccgccaccgccggagctttgtcagcggatttgttcgtcgccgtcgcgtcatcgagcggtgaacggcgagcgatgcacggatccgtcgtcggtgccgctcgctgcgccgttgccgtcctccccgcctcacgccatcgccgatctccccacatcgtgtcgtcgccgtcgcgacctcctccgcctcgcaccgtcactggccggaggcggtactctctctctctctctctctctctcgtcgctgcctctctctccttccggcagccggcgagggtagaaggggaaaaacggggggagagagccgtgtccacaggctcctccctagccacagccaacccagtgcggctcctcgcccggtccccagtagaggagctcgtagagccgcgtcccttgcacaggggtcgcggctctctgctaggagacggctccggccggaaaagtggacgccgtgagtagggatacgccccaggggcatccattgctgatgttttaagctgcaaagaagctctgcaacacagtcaaagagagaatgatgaccgctgcgacgagtgatgtggccagccacgggttgctgaagtagttgcgcaccag

SEQ ID NO: 42081 - DNA, 923 bp, Oryza sativa
cgtccgccagctcaacacctatgtcagtctcgtcactcccagttctatttcatcgtctcatcatactccccccctctctgcacttcacatcatgctgccatggattctcagtggtacccaactcaaagtgagttctgaggggcttcggccatggcccatggatctgagctacatggttcttgagttcgtgtgtgcgtgtgttttgggagattctttggaagatgagataaaaaattgttgtggtggttggcatgttgattttgtagacttggagagacaggaggtgagaggtgaggacaacagagtttgggacccatcatttattgttgtagccttaaattgtacatatgcgctgttgtaaattcagctagctgtacatcttggtgtactaaaatctgtagaacaaagcaaagaatagaattcattcatgttctgatgttcttttttcccttttgagtgtgctgcatacttttttaagtgatttttgctcaaatcatggacgtccggaacatattcattttttgcgtcactcagctgtacttcggggaaaaaataacgcaatttggaaaattaatgctggccttgccaacggaagacgatttcgatctctgcacctgaagaaatcggtagtgagtatagtttcatgtttgtgattcgaggttgttcacaaatttcatccgggaatacccaagagatccaattttgtctagctctttcaatttccatcacattgaactttcctacacacaaacttttaatttttctatcacatccttaaactaagggtaagggtgtgtttagttcacaccaaaattggaagtttggttaaaattgaaataatgtgatggaaaagttaaaagtttgtgtgtatagaaaaatttgatgtgatggaaaagttggaagtttgaagaaaatctttgtat

SEQ ID NO: 42082 - DNA, 1495 bp, Oryza sativa
gcggcatttatcctccatggaagtcgtttccgatgggtgcagtagtgcttattggtgacacgcgtgcgagcggcgatggtgcactgaataaagatgtgcttagctatgtaatggaacttgttttgctgtagtaggctgggatatgatgtggcaatggcctctaactattgctgttgtgtacataagcatatgaatgcatgatttgtaatggtcgggtgagcccttaatttcatgtaagcaacttacattgcagtgttaaagagtttggtaatggaatgacatgattagaacttgaactggaagtataagttgtcaagaatttggaaatgtcatttggaaatggaatgacatgattagaagttgatctggaagtataagttgttaccccgtgcgaacaataattttgcacgttatatatgtatgatttagaaaatatatgtttggtaaaagaattttttctgtcaggtactgaatgggtaacgatcaaaattaaaattttatgtagtacagaatgtccaacgaaattttatctagtatagaatgcgtaataccagcaaactgagatggaaaaggtgagggaagcaaagcaattttctgggtatcgaacttggtcagtcatcaaccactcaaagagctatagcacctggccttaacaaccgatcaaagcgaaagagtcgatcgatatatgaagcagtaacaaacgatcagcggatacaggatatcacgtacaacctcactgtcgacctgatgaaggaattcttcgacatgtttcttcagatacgaagcaacaacataatccaatcagaagggttgatgacatcattagatggcgatggacgaacaatggaataccagtgcaaagtcggcatacaacacaattcaatgggagattagattcagtagctgcaaagctgatatggaaggcatgagcactttgaaaatgctaaaaaaaatatatggctcctactataaaataagataaagatggtaaaccagctgcaaatccgtcagtggctgaacaattaattctgccagctctatgacaaaaaacctcgaaactatgcagcatgcacatttgtacgccaaatataggagaaaattatgcaaaaattgagaagtgatgttctaagcgcacacaatggcgacgaaaccttgttgaactagtggatcaaaggacatcccaaggtaaaaaaacacaagacaaatacaatgaaattgatcataaaaaaaagttgtggcatcggagatatggtgtgaaccgaaaaaaagagtgttccacagtaaagagactaaaatgccataactagtgtatgacatatttttgttgaaactgttgttatgtttttctataaagtcaacttgaagatgggataaccccaatatgacttatacgagtagtagttaactcttctgcttgtacctcgattatcatcacataataaaaaaatctactatctattcatccatctagaacaatctcaaattgtgactatat

SEQ ID NO: 42083 - DNA, 725 bp, Oryza sativa
ctacaatagccactgcatccttctgttcagaggaagccaggatgagaatcccagcatcacgaaatggaaacacccctattaccacgttgtccggtatttccatcttcgtttccttcctaccatagcaagcaatttgtctaaaactacctgtcctttcatccttggattctcaccaccaatggtttgtgttcagtgaatgatctaaccatgcgtcattcacagttcttcgttcttgtctttactctcatgattttctctttgttccagacttgccaatccaaccatgagcatgtcgtttgctctgaatgctgagccaaacactgtgtggtataataaccgctccctcctccagaatacattttcagatgacaatttcttgatgcgcatcttcctccctcatgacattgcagttccaagtataaatgatagcatcgttccttcatttgcttgcgggttgttctgtgcaggatctgcaaccagctgtgatgcctacattttttccatcttctttggctatgttagcaccgatttcagtcagcggctgcggtggcccgagatagtctggtttgccaaccgtgatcatccagttggagagaatgctactgttcaatttactgaacttggggatttagtgctctatgatgcagatggaacacttgtttggtccaccctacagcgaacaagtctgttgtcagcatgaaccttacagggtcaggaaatctggt

SEQ ID NO: 42084 - DNA, 1572 bp, Oryza sativa
ccagcttagtcaatgctttgaattatttttttaaaaaaggaggtagtaagaaataaacctgacaaaagagtttgaacccccactaatactactaagtgatgtggactagggttcacgatcttccgaaagattctgataagcagtcgatttggacggagtcatgacacaactcgatccggcttctgaacgaacacgctcttaagccccgcaatcgcagccccacgtctcctccggttattaaccatgtcgaaacgtgattgacgtcgctgataaggctaatccctgtttgcgatacgaagaacacaaacaagaacaaggaagaatacaaccaaaattacagatgaatgattaagcttacaagttgggatcttacaaaccaatctagcggcgagactgttcttgatagaataatctaagcaaaacctgaaccctaaaggtgacggcgggtactgatatatagagtttagggtcatgcaaacaacccttgacgcaaccctaatgggttccaacacaatatacggtccaaaggcccaaatacggtgacgcaacaccgggacaaattctaaacatcaatttgtttggttgattcctattgacttgaaaagaatttggacgtgggactagaaccattggaaatgttatcttcttagctttccatccatataaagaacaccctaatccgagcatgtatgcgatctgggcgtccgttttagtgcagactagtcttggactccgaataatactcgaagtcgacttggttgagcctccatattgatttgggtgcccttgatgatttccacgcctctaagtctttctctaagcgtcgctttgtcctctccatgattcttaatcataatataatcattagataggaatctattctcaaaatcatgtaaaaaaacgtaggaacaagctcacctctaaattcaattatcgtgcgcgagctcttgtaattggttttttaatgaccggtggaggattgttgtgtatatccaatggagtgatgtcctcatcactaaagaaacttcttttataagcaacagagagacgaaataaacaagactggtatcaaagattgttatgaacttttgtaaacaattgttttctcccaagtgttgcaacggttctttccgaaatttatccgttgcatccatggtagtcgctctctcttcttgacccggtaaacacaaataaacatattcactcactccgtcactcggagaagaacaaattaattaataaacaatggagaatttgaggtaaatcagattcagatagatatatagatagatggatggatacagatgtagtgagattgggcgaggatggagcgttgctgacgacgacaaggacgtcgatggcgagagaggagagaagagcgcgcgcgcgtccggtgagacgtcgccgtcaccgcgcgctcccaccaaccactactaaaacccccccacgtatctcctcctctcgacacggtctctcgtgctctccattcgagctcacgtagtggctaagtgtttgtgtgtacagttgtttgatcagctcgccattgccaatgccaatgccggaatacgagct

SEQ ID NO: 42085 - DNA, 1463 bp, Oryza sativa
cccgaagctacccaaaccgaccaaactgattcgtatttcagaatgatgtattgttctgttcagatttgtttgatttgattccttgttttggtttctgggagtagttgggatgctcgtcttatacagtattttctaggatgcaaaatacgtagaccaaaatacattggttatgtgcaaatgggggatgaaaaaggggatcagaaatgaaggaaaaggttacacggtttaaagattctgctaggacgtgtgtgtgtaatatagaggattggttgcgatgtgtagaagaaatggtcacgggccacggcagcgcatcttgtaccgaataatgcagctttcggacaaactaggtgttagctgccacgttatccctaaagagcttaattgtccaggcataccaagacccgtctctgaaattctgtatcaactatctactgatgtttagcacgtgtaaatggagtttatactaaggaaaatagtttacagtagttaaaatggaagtactttgtttttataaaaatgttaccaaccctgttaagcttaggcccagtaggagtaagcggcccaatccacgcgtcagtgggcagagtgggtggcgtgagtgttcagcctgtgtatataaaggctatgctgtaatcgagctagttatcgaattgaaaatagaaaaactaatccccaacaacctctgcttcttccctctctccctctgttcatctctcttcctccccaagtgctcggtcaaattcctgagagaggttgtgacaaaattggtatcagagcaatcggccctggagtatcttgagaagccacgctaccactgtcgtgctcaactcaaggtccaggagatggagcagcagttgggagatctcatggcagccatggaggcgattcaaaaacataatgttgcaatccagacttcggtgggatcaatagaagaaatcaagcccatggttgctgagttggtgggatggaagccaacggtggagaagacggtggcagagttacgcgacgagatgggagaactgcgctcacaagtccagcagctcgcgaagaaccccatgctgttggtcaagccggcggatctacctcctctgcttccgactccgcaaggtcccaagttgaaggaggcgaaggaggaggagcgcactcctgcgtcttctacaggtgatgggatccgcaagccatttggtaaccacgagacaactttgaaccgggggaaggctgcatggggggaatccccttctctgtctctcccggacaagggtgcattcaatgcttctccccattctaattctgtttttgattcgggagggagttcgcggggatttggtgtgtttggtcatggctatgcgtcgcatgtggattgccctggttttgaaggggagagtccgaaggcttggaaactgaagtgtgagacgtattttgggttgtctggtacgcatcctgaacactgggttaggttagcg

SEQ ID NO: 42086 - DNA, 3056 bp, Oryza sativa
attcctgcagcccgccattatatggcgccggcgaggttaggggagaggtttccaaacgaatccgagggagagagggagggaaaattggggggaaagggggaggggatcccggggaataattccccccactttgttgcgcgcggggacggcgggaggcggcgggattcgcggcggcggcggcgctagggtgcgggcgaggcggcgggagcggcgggaggaaggggatgacgggtgggccccacccgtcagcgagggtggcgggcgggcccgcccgtcagcggcgcgcgcgcggggagaggccggatgggctgcggggagaggagagggagggggaggtagatgggccgagccggcccaagagggagagggagggaaaagggactttttagagcttttctttttataaaaccattttaactttgtttatttcttaataattattatttgtgctctgaaaattccactaaaatttatttacgcattttaggcttttaggaaatatacaaaaatcctccaagccttatttgacttttaactttgcacattttaattgctggaggctttcacacagattttaattattctaggcataatttagaggatgtattttagagtcgttttgggacgtgacagagcgttttcctgtagtctcggcttggggacaagccagttgcgaagaaggggagaatgttaccaaccctgttaagcttaggcccagtaggagtaagcggtccaatccacgcgtcagtgggccagagtgggtggcgtgagtgttcagcctgtgtatataaaggctatgctgtaatcgtgctggttatcgaattgaaaatagaaaaagctaatccccaacaacctctgcttcttccctctctccctctgttcatctctcttcctccccaagtgctcggtcaaattcttgacagaggttgtgacaaaaaacccctttgttttttaatttgttaagagatgcgctcatagcatagtggcaggggttgctgcatgcaccctatcggtccaggtttgattctcgtcgagtacacacaccaggttcgattctcgtcgactacgcacaccaggaatcgtcgagtacgcacaccagaaatatttacttttctttcttcttaaaaccattgacaccaaatcctttcttggtgtctaacctttttttaattgtttaaatccatcagttgatccaatgaacttggttattatacaacaatcagtagtcggcctcaccaaattggcgatttctcagtttcgatagaacatttttaacaatgaatcagcgagcataacagatgctgtcaacataacagagtagtttgacttgtttctggcatacttcacgtacagataattaagtagaaaaatatctctatactattcaaaatgttggtagctagcagtggtgttcattttcacaccacctctattactagcatttaggcttacaatctatactattacaccacattcaacaattcctctcttttattattggcttcaccatatttcaaaatcacaaatttgttcaataagaaaaattgtagtattacttagaataaatatatatttattacttgatttaataagctagaaactcaatttggttttcgtgacaacacaatcaattagtcctgaacaaacaaaattccaagagtatctacgttttgatgactagctgattggtcatcctacgagagtctcgaaccaaactgtatcgaacgtccttttgtttacgaggattgctatagcacgggatttcattccaacgcgatactttatgaatctaatcctgcacctcccgtttttcccatgttcaagctcccacattacaaagaaacaagtagcgtagctccttgctcccaccggtcacagcaacaacagaggaaggagggagctatcgttgagaggaaaagaaaagagaagatgagacaatgataggtgacttgccggtaagttagacgatgacaacgcgctcttttcccctacgccttgacccggtacttgataccattggtatcagacccgatatctaatacctgataccaggcatgataccccgagatatcagaccttggtatcaaccctctgatacctaaggtatcaactgtgacatacttgtacacacatcagtgagtacaagtgatgggttggcaagaagcagaagaaacccaattccaaggtcgccatctacgtcgagactagtcgcttccacccagcctcttcctatcgacgcctaggacctcatccccctcctccgccgcctccctttccttctggttgcacatgacaacccccaatctcacagccatagttggctcgctccttgactataacccccctgcccatgccaacctctactctttcacattcttcggatccagtgtagctagaaagggagaaaagatgataaggaatgtcgtcggtgttggagacgatggtgaaggagtcgaggagagtgaggaggaggatggccactggggtagaggagtggatggagggaggagaaaaacgaagcgctgctacttggtgggggagaaaaacgagtcagtggggaaacagatcttgaagatatgtaccgttcacacctattttatcacgtgtccttgtgcccccgatgggattccgtgtattagttttttctgtttgtttgtgggagtttagaattttaaggaataattggttggtagctagattctaataatcaagagaagttggatttcctattttttgacttttaattatttttgtagattttacacagcttctcagattttagactttgtattgtttacgagagcttctaattctgaaagaaactacagtcgctagaaacttccaaaacaagccctttgattggatgaaccagccgggattcgtttgtgcacggcccaacgtgtcacggagcccattcagtgacccggcccaggtaaccatgggccattgcccatgaggccacgcttagtcgcctggtcgtcgcagccgttgcatatgccatgcatgcgcgcgagcgaaactgcaacaaccgccacgccagagtccaccgcacgcca

SEQ ID NO: 42087 - DNA, 631 bp, Oryza sativa
gccgccatagccgcctccccttccactggatctagcggaggggaggtcgctgccgccgctgggtggagcagtggagagagagggggaccgagagagagagcagtggatagaggaggagatagagggaggagataaggaggagagagagagaggtgggtgggtgcgttgacgagataattaaggccgaggggagagcgcgcgggtcaggctatgcttgatttttcaggtgtcgtttttttaaaaaaaatcgacacctatataattggtggcggtttttctttacaaccggcacctataattacttaaaggcatcagttctatatattttcagatcgtagaggtaggaaaaaaaatctataggtactggttttaatacttccggcaactatagtgttgacttctatgtgtattttttttgtagtagtgtatgattagttccgatgattatgttgttattaagcgctaaaataaccataaaggggcctagatgcttgcacccagtagaaatagtgtatcgagcattccagtcgatcgacgcactcctccaatcggccaatcccacaaccccgatccatgggaaaggaaagagccaaattaccatgacactatggaacatgatgcattaaagatg

SEQ ID NO: 42088 - DNA, 668 bp, Oryza sativa
  unsure (1)..(668): unsure at all n locations
gcgccaaaaatgaaaagattttggatggatgagacatttcctagaattataaatgggacatggtgattaattaattatgtattagctacacgaattaaaaaatgtattataatgattttctaaaactactttgttatagaaagttttttaaaaacacgcatcagagaaacgtgtgtgtgggaaacatggttggagaagtttgaaacatccactacgaacgaacttagggtttgtttgggagcttttgacaattacagttttttttaagaatcagaagctttctcaaacagttcagattttaagaagttgtagaatctagtaaataaattaaaagttagaaactgaaaaacctaatttatgtagatttttagaaactgactacttaattaactgtttcttcgaatcaaagtgcggtgccaagcttccgattgttcacgatagataccccacataatccctgtagagcaaattattgggattggatgcctggatctgatcgaaggacactaccatgatgcgaattgagtacttctcggtcagtcgtccctggccccaaaactgcagtgaattgacgagatcacgtacgtgcatactatgccgccggaacagtgctagctagtactccctgaaaaaaaaaaaagataaactcttcattntcgtgtccaatg

SEQ ID NO: 42089 - DNA, 737 bp, Oryza sativa
gcataaattatttttgtagcgtttcctcgtctccatatatgcatgcatgcatggccaaggatattgtacgttggcgctttgtaacatacaccttccgtttaaaaaaaaatcaaatcctaactatgcatctagacaagtgctagtccaaatttatagataggatttgagttgtttggccacggagaggtatgctctaatataaatacatatttttagaataaatatttttactatccttaattatggaataacatgtaacagttgagggaaataatgattcatattttctacctatcagccactagtttctatgctctttcttcaccagcggaacttgcattccctcgtcggtccttcttcacctctgatatggatctgaccaagtgcgactgacgaaacagttgatttaccaaatttgtccaatttttgcataagttcaattcgaaatttagggactaaatgagaaatatttaggtgagcgataaataataaaacttactaagaatacattttggagagcatgatttgtattttgtaggtgaagttgcaatcttagacagtactagcatatatgcctgcatgtggcacaaacaaagattttatggcgccctaggattttgtaaaacctcaaatttatggatatttagatctcagctatttaccatatttgacacagtattatgcttcaaacaatgatgaattaaatcgaacatcgatcactgatggaaccgacagtg

SEQ ID NO: 42090 - DNA, 638 bp, Oryza sativa
caatccatgaaatgcaagatctgctagctgctcatcatttaggctcaaaccataatataggctgcagacattatgaaatctctgaatatattccatagccgattctccttcttgctgctcaaccgatattatgtctgaaagattcaactcattgattccagtaaagaagtaatcatgaaattacttctcaagattggcctatcctctgatagaatttgatgataatgatgaaaaccatgtgaaagccgatccagtcaaagacaatggaaaaaaaaaatctaactttcagagcttcttcagtcgatgcctcccccattgtgctaagaatcggctaatgtgttccattgtagatgtattatcctgccctgaaaacttagactaaaaataggtttttagtcccggttggtgttactaaccgggactaaagatcatagggccctgacacagcctgacatggaatcaaccgggactaaaaataaactttagtcccggttggagttaccaaccgggactaaagatgatttttagtcccggttggtaacaacaaccgggactaaagatcttcctcttattaaccggaactaaaaatcattttgtctcgatttttaatggaaccggcactattgtggatataggtc

SEQ ID NO: 42091 - DNA, 669 bp, Oryza sativa
tatccaaattatgattcgagtacaccactaaattcattgcaattaaatctttaaaataggaccacatatggatatattccgacgaaaaaaatagcttattcatgaattatttttaaatgttgcacgatgttccaccaagtatatcggaattattcactaggtagatcgaaaatgtttcaatcgtttaaatcgggcgttgtttcaccttatataaaaacaatatttaagcaaatagcgaaagaatgattcagttcactgcaacattagatctatacatagtgaaacattgtcagcacactaggtgaaacattttttgtggaacaaaaaatgaaacgaattctctcaatagagggttttcaaaatatgtgggtgatttgttgtaaaagaatgtttcaatttactgcaacattagatttatacatagtgaaacattataaatatactagctgaaacatttttggtggaacaaaaaataaaacgaattcccttaatagagggtttccacagtatgtgactgatttgttgcaaaaaaatatttcaattcactgcaatattagatctatatatagtgaaacactgtgagtgctctaggtgaaacattttttgtggaaaaaaaataaaacgaatttccttaacaatgggtttccaaaatatgtgggtgatttgttg

SEQ ID NO: 42092 - DNA, 2178 bp, Oryza sativa
tagattaatcaggcttaaaaaatttgtctcgtgaattagcttttatttatgtaattagttttgtaagtagtctatatttaatactctaaattagtgtctaaagacagggactaaagtcaagtccctggatctaaacaccacctaagaaatctgtaactagaagttttatttgtgataccgtggaaatcataaacatttctattctaagagtattttccagctggtttccacatatatatatatatatggtttcacaacatgtttccccctttctctcccacgtgttttactcgccgcggccaccggcggcggcaccttggctgcttatgatttggtgagactcctgttgactattatatatagttggttcatttgaccacgtcatttccttgggtcatcagtcatcgccagcgttgtggaaattcgtcgtcacatggagcgcgagaacggtatacttttgttcggcagacgcacaagcacacgtacaaactacacatacgtaacatcgatcatacccacacctccgcgcacgtgtcctctaacatatcaatccaagaccggttaaaataacagggccatcttatctactagatacatctgacttgaaatattttctttctaaactaaccctacagacatatatatttagcagggcgtatccatggttggggcttgttggggcttaagccccagctctgcccgcacaacttatgagccattccaagctgcaataacgcaatactgaatactaagagccaatgagtatggaaaactttaaaagctgtgagtattaattgataagattgtttgttagcttgttaatcctatcacatgatcgatgagtagattctgagataatgttgccaattaataaacgttgagaataccaatttgttaattttggttgaatttttttaatgtttcaaaaactataaagtcattgataatttgggaatttggtcatacggttaaactattgacatggccatgggccacaccaacagttttgaatcataatttggttatacgattcatcttttctttgttttatttatgtaataattgattgagtttagagaaatgacaggcatatatatatacttggcaccaaaataatttacatatataagagcacacgcttaaatttcattctagatttaccactgatatttagtccagcttggtaacactaatcaggactaaagattattattgggggtctgacacgccatgacagcttttaaaccatggctaaaaataatctttaatcccggttggtgttatcaaccgggactaaagattataaagtatcattgggcttttgaaccgaggctaaagatattcttttgtctctcgaacagggataaatatgatttttttttcatccgagtaaagatcagttctgcagtagtatatggtctaaaagatggaaatcggtgatacatccctaatctcactaaaatcatgataaaagctcacgtgcatatgcgtaatatttataggcggtagcatttaaatcctggtgggtggagtcatgcaccgacatatgactccaccactgcactactggtgctttcccggagagagagcgatatacaatgatgtgatacaagagtaggtggcgtatgtgaagcggagagtgatcgatgaaacatttagcaagataaagatcacgatgagaaaataaaaaattcacttgattatataacatgatgtgtctaaagacctgacatgatttttatgtttgccggactggtgtttcattgctatggaataatttttttgtccattttaatttttaaattgcattggctcccattcctagctaagagttacttttctctccatttgaaacgtaagtcacacttccttaaggttatattcttttcttccactccaaactcaaactttacacacttttcaaacgttaaatgttgtgttttattttaaaaaagcttctatagaacttatttttaaaaaatcaaataaaatccatttttaagtttatgataatattaatgcttaataatcatgtactaataagttttctcgttttgtatgcgctgagaatatcactccaaaagcatggatcgaacgagttcgttggatcatattgaaatatatatataacatcaagttaatatcaccaaatccaccactgatcatctttcttaatcg

SEQ ID NO: 42093 - DNA, 921 bp, Oryza sativa
aggttggatctcctttgatgtggggcaaagaatcctaggatgtatgacccagcgatggagacgctcgaggtcatctatctcctctgtagccattcaggaagcccggagatcatccctacgtcgctctgccctattcatcttcatccttcctctatgaccttgaatcattgttggtggtgcattgtcgccaactcgttgtgtcaaagagaagttgaagaaaggtgtctctatgtgagagggaggaggaggaagatgaatggtaggacggttattttacactagatttatactataattatatttgatatatttttttacttaaaaatctattgtcatatttttagatagatcctttctaaataaaccaacaccgatgtcccagatattttttttataaacgaacactggtactttttttatggctttttaataaactgacactgatcaatagttacatgttataattttagccccacatggatgcttggaagagtgggaaatgtatattagatgagccgtacatgtgaggcgtaaccgctaaaaccaaaggagtaatgcttttactagagttaggcttagtttgaaaccgatgtttggatggaggttttcagcagatgcaaaatgagataagatattagggtatgattaattaaattttaattactataaaattgtaaatgaatttatttgattttttcgagcaatttttatatagaattttttcacacaaaatatactgttgaagtgttgagccgtttgaatatgctaacgaaaacaaacggaaatcttccccttcatcccaaatgaacggactctttgtttggtacggaggaaatggaaaagaaagtgcgttcactacgtacacatacatcgcactggcagcgaaaagtagaagtattgactagatcaaactacgagcaa

SEQ ID NO: 42094 - DNA, 2423 bp, Oryza sativa
gatgatcagcagctgggtaatgatttttttaacactttctcaatttgaaaatataaataagattagttgattcaagggagtttcagtagagagtgcattaggtcacagtgaactttgctagtttttttttcacttccttcattttagatcacttgttattctaacaaatctcaaatataaataagaaaatgtgacgatttatatattaccttcttaggtactagctattaactatgatcaacaattgtgtgtgactgagttgatgaaggataggaaaatcacctctaaaaactctttggaatttagagtaaaaaaagttttggaattaatgtgagaatgacaagtatttaacaaaatgaatgctacaatgataaaataacttataatagatggagtaatctcatagtgtaggtaattatgaactgtataaaatattggtctgtcttaacattggacacatcaagtccaatttgctgctcttccctactttatttgatctgaaacattatagatttgttatggctgttaaggaaacgaggcggcaatttgaggtgatttattagtgacaaaaggcactttgcaaaaacaaacaaagaaaaaggcaaaaggaagagaggaagaaaaggatgcatacttaggagggacgcggaaagcggtctcgatctttttatgcgacgatgttttgccatctcttagcttttcttttattcccctttcttcttcccatttagcgcgcactaacaatcccgatagcgacggcccagaaaatctaagctttaaagtgccaagtgcgcagataaattttctttccatctcaactgcgcataatccctgatcaagtgatcatttaatgatatctctaaccattttgggcaaaatcgacctacctatccccatctttccgacccatgaacacgttactcaattcactacgatgtgttgtttgcaggtagctagctaagcacacacggagatatgatatagtagtgtagaagtagtttgttttagttggtttctatcttctggttgttattgttgccagcactaccggcatagttggtaatgtttttttgtttcttcttttaaccaagcgtatcagagaaaataatttacagcagaaagcttgaggagatgctgtccaatgaaaagttagtatgccccaacttgtgttttttaaaattgttgtttcagttgaccatctttcttgttagtgtactgctgcagcacttggctggaacagcagtaatcagtacgtgcatcttgaaatcggagatatttgacagttgctaattaacgtgggagaaactgaaactgtaccttgaatatcagacgacactgaagaatattagtatgaggggaagctgaggcacgcaaataagatcaacagccaaaactttttcaggtgtactgtccagaaattgcaaccaaatgaggccctttaatttctctcgaacggacttgaaaccaaatgtccaacaaccagaaaaaggtctgggactactctgtgtttcgtcctattggtagaatagcagaacagcaatgcaagagtagttctgctcatgatagccatcaattatcggaacagaattaactactccaaactacagtgccctgtacaaaattctatgcatgatacactctccattctttttggaaagatgtccaggttcagtgaatttagtgtccttggtagtgcccaagcactgttccattctgcagtactgacattgtgtagcataaggtggtattagagtaaggttgtctcagctcacagctggaattttacgattaacctaaaaggttacagttttacaatcataaacctttcaaggttcacgcttaacgtttggtcgatgtgcagttcgatctttacttagcgtggttggtttgataccttattttaagcccttgtggggtcttttggccttttggccttttggccggcgctctgatagtcacatcacatgtttttagttaacgaagtagatgactcatcaattattcattagctccatcttggtaatatcttaaaaggaaaggttaatgtagtggtaaaatttagataaaatttgcaaaatgccatcgtggagatttttatgatggttctaagcatattgtccataaggaaaaatatgaaggcagtttcagtcctccaggggtcaagattaaggttttaatttttaggaatattgaggttataagatgttgcgtttcgtatttcttcaggtttgaattttacacaaattattgatacggagtttacttaattaacatgataaattaatattttcagaagcaaacgtcataaatagcttagaaccattgtgatctaaacaatatagtggaagccttttacaagtgtagagcaaataatctgtgataataacaaatctgaaaagaaaattctaaaaataacatggcca

SEQ ID NO: 42095 - DNA, 1147 bp, Oryza sativa
tattaagcctaattaatccgtcattagtaaatggttactgtagcatcatattgtcaaatcatattgtcaaattatgacgtctcttctaggcttttacaattatttctgataattccaattaaataacaatttatatttttgggatttttagggtgtaacaatattttcagccaaatagtgtccaaaagacagcacgcgctttcaacggtcgtcggaaatgtgcatccaccaactcctccaccagcaccatagccattctccacgacatcatctttctcacgccaagcatgcgggattgagcactgatggaaccacaaggatatgggtaaggaaaaccgcgtcactgcggtggaatggttggagaacacaatagtgtaaacattaatttctaccgtgagaaattaaaagatacagggaaagagttgaaataattctgcaactaataaacgacttgtagattggaaaagcatcacaaagctacaagagattaagaggcacgagttgttttcatgggagcacagaaaaagtcaaaaaccgatggtcgtctggttaaccatctccgtcaaagtatttatatcacattatgactggagaattttaagagaagtttcactaccatagaattgttaatcacatacgcgtgttaatgtcgaacatatatagtcacaaaaaatgggacggaaacgtcgtccccgtcttcagaacgtggggacagttttgtccgtgccatgtaaaaacatctcacaagtgccataccacgttcattgaccacatcgaatcaggattttatgactataatgtgtgtaccttatttattgaacgaggaactttatgactattgtcgatccggtcgccccgcttggccagggtgaccggcgacgggctcggtcaatgccggcgccactccacggacctggcaggggggtggctggcggcggcgatggtgacggatgtggcggcgaaaaagttggcgacgacggcagcggactgcggcgcgtgccgtgacgccttcctctatgacgccggcgacccgcactgcgcgctgcacctccaggtccgcgccaccctggccggatctggacggctggcggctggcgacggtggcggctgacggtggcgactggacgtggtgactgacggtggcggc

SEQ ID NO: 42096 - DNA, 645 bp, Oryza sativa
agataaatcttttaagcctaattatgtcatgaattgataatgtgatgctacagtaaatatttgctaatgacggattaactaggcttaataaattcgtctcgcactttacaggcggaatctataatttgttttgttattattctacatttaataattcaaatgtgtgtctatatacttcaaaatttttacacctaaacaactaaacacggccataatagttatatagttatataattttttttgcggaagcttaaagaaactacaggaatcggagtaaaaaaaagctttgagatggaaatgaccaaacaaaccacatgcacaaagtttatttctaatttaaccaattggactaagaactaatgcattaacttatttaagtaataagggcatgtttagatctgctgacaagttttttcaccctgtcacatcgaatgttttaacacctgtatgaaatattaaatataggcaaaaaaataactaattgcacagattgcgactaatttgcgagacaaatcttttaaacctaattgacaatgtggtgctagagtaaacatttgctaatgacggattatttaggcttaataaattcgtctcgcattttacagacggattctgtaatttgttttgttattagactacgtttaa

SEQ ID NO: 42097 - DNA, 2431 bp, Oryza sativa
taggggacggcctggaactaataactagtagctagtactactttcgattttgtttcgtcacagtctgacgcctcacgagttgtatttactatacctttggttatgtcgtgcactcgtgtggtagtactgtatatatagccgtttatcctggagctaggagatcgactgactaggagacccgcgcggtcaactacacccgatcgatcgactggtcaactactaggagaccttcggctgtgttgggttgggaacctctcctccgcacgcaaaacagagcgataaattaatgcatgattaattaagttttagagataaaaaaaacttaaaaaatggattaatatgattttttaaaagcaactttcctatagaaattttttgcaaaacacagcgcgtggaaaacgagagatgagttgggaacttagtgaaaagaacacagccgaagtgttgtttgtggtccctcaattgagttcaattttttattttattttttgatcaagggaaaccagcacgagagtgtcattttcattaaatatagcgggaagctatacaatatacaagaggcggtataagctcactcatgcgctttgcagccgccagaacccacacacatgcttcttcttttattttggcgatcaggaaggacgtagcggccttcttatgctcaaagatccaccgattgtgctcctgccaaacttcccagacgatgaagaggataagggtatgcaaccccttcataggaatgcccacaattgttgctatcattttgcaccactcttggaccgtatgagtgtccccccagtgttgaggctcgagttattggtactccgcccaagaagctactaggctccagatccttttggtatatctgcattcagcgatgaggtgcatggctatttcatcctctcttcggtagagggggcactatccgttattttgccatcccctgatcgcaaggcggtcagaggtccataccctattcttaataataagccaagcatatagtttgcatttccccggtgcccatgctctccatatcaacgtgtcaaaaggtatgtcaggtgtagcgtggcagtgagctttgtaggccgaagatgctgaatattgtctgtgagttgtgaacttccaagaaatttgatcacactggaacgggatcgcttatctgtgacgggctgaaagcatcatcactatcgggtaaggcccccgtcactgggcaaaggtcactgatgtgaggaaaaatctcaatcgggctaaagcccgtcacggatggatgttatctcactcgggccgaaaacaaagcgcgtggaaaacaaagcccgaaaataaatatctatttttgcaggcgggaaaaaaaatagatccttctgtacataacttcgcatgcatattcacagctaaaaataacagcgcccgtaaaatttgtaattggctttgtgaaaaatcatttttctagtagcatcttacatttcacatttacgataaatccacatcatagacgtagacctattgacgtcttacgtctattgacgtctgcgacttgattgagaatagtcataaagttcctctttcaataaataagtacacacattatagtcagaaaatcctgattcgatgtggtcaatgaacgtggtatggcacttgtgagatgtttttacatggcacggacaaaaatgtccctacgttctgaagacggggacgacgtttccgtccattttttgtgactatatgttcgacatcaacacacacgtaagtgattaattaacaattctatggtagtgaaacttctcttagaaatctccagtcataatgtgatataaatactttgagatggttgaccagacgaccatcgttttatgacttttctgtgctcccatgaaaacaactcgtgcctcttaattaatctcttgtagctttgtgatgcttttccctgtatcttttgatttctcacggtagaaatcaatgtttacattgttgtgttctccaaacattccaccgcagtgacgcggttttccctatccatccttgtggttgttccatcaatcctcgatcatcccacatgcttggcgtgagagaaagagagagagatgatgtcaaggagaatgactatggtgctggtggtggagggatgtggtggatgcacatgcccgacgaccattgaaagcacgtgctgtcttttggaggtcccgttcttaataagtgttggatgaagattaatattttcatggcacgtttttcaaactaataaacggtgtacaaatatgtttcgtgcgaaaactttctatatgaatattgctctagaatatcgtattaacctatttttcaaatttgtactaattaaaactcaatcaatcatacattaataccagctcgttttgcgtaaaaaacttaatcttcatcttaatctttatctttaggataaaagaacactgcctat

SEQ ID NO: 42098 - DNA, 629 bp, Oryza sativa
tgtgcccaacacaacacaacactcaatctctgcataggcccctgggaggccaccgccgccacttgagttggtcgatgtcgtcgtccgaggttactggaaaaagaatcataagctattactggaacaagaatcataagcatcatccagatctagaagagaagctaggtttaacacaagaacattccagacaaaaatgggtgggaaatagagagataaatgagaaagcggatgtgtatgctcactgggatgcagcaggacgacggcgcccctcccctcgtctgctctgttcatgagatcggagcaaaggcaacgatgtgggcaacgacggcgcccctctcctctcctgctctgctcgcgactcgcgagatggggatcggagcggaggcggcaacgggggtttgggcggatatcgcgccgcgcgaggggatggggatgcgcagtgccgacagcggtgtagggtttggggattggggttggcggtgatgggcgatgggtaggggcgagaaacacggcggcgacgggcgaggggcaggggagagaatcacgacgcgagagagacaagggggcgcgtgagcgaggaggaggatgcgcgcagagtcatcgcgctggcggaaagcgcggtggagagg

SEQ ID NO: 42099 - DNA, 1209 bp, Oryza sativa
cttgctgttgttcccccttttcagaagtgtagtgcttctgagctgaagacaaagttagaagaccaaggctcagaccccagttgagttttgcctgtggagtggagctgaagccccgctaggatcgcctttttccgctgctgtcgttctctttcggtgtgaggactaagtgcctcttctgtaagtatttacgctttatttacgtttggaactgtttattacttatcgtttatgtaccatggctggtcctggacagggatttaatacacaaaatagtctggaaatttgggctaaatttctaggcgttacaaagtggtattagagccaactcgactgtaggttgagccaaatggtcaaatcctaaggacaagttttctgaaaaccctagttgtgaaatgtctcctctcttcctccggcatttctttgtgaaacggtttctcaaaattctcctccctgcctctccaattcttttagttgaaaaaccaagaggacaaaccgccagcttcatgtatgttcagaagtcaagtcaagtcaagcctcaagcttcgtgctggagcaagaagatcggtcagcccagagtcttcgttctgcgaaggtcaagtgaagtttctcccggagctgacctaaaatccaatctttcccggaatagtagtttcgttagcttttagatcgtgtgttgtttgcttgtgtgtaggggtatggtttgcatcattggtggggatgcaaccatactaggttgtttgcttaagcaacttgaacaatataagtctactcacaacagatcagtaggcaagtggtttagtaccttatctttagcaacccccctcttctatctctcttccatcctggcagctgatggtctctttagcaacccccctcttctatctctcttccatcctggtagctgatggtcagtgtcagagagaagatcaacatcaacaacggtgcattaaattcatagatcaatgggtcagttgaaagcaacaaggtaccccaaagccagaagaacccctgctcgtgatcaacatttggtatccaagatcagatgatgggtgtattgatgtaggagatgcaaagctcgacgcaaggtaaaatataagcggaagtaaccccagcattgtgttgaggtcagagctactggatcagttcaagacaacaagcaactagctgagtcagagcacctcgctctggtcagattctggttagccaagg

SEQ ID NO: 42100 - DNA, 700 bp, Oryza sativa
catgtcaaatgccatgtaagtttaaaataggcttgtagttggatatgggggtaaatagattggttcgaagagttgagaggggagaaagtgctgtattataatttaggggaataaatcggactcacacgatagtggtaattcagactttttctttttttatgagctaaatgtatggatctttcttgaactgttatatttatgtacatacgcatactggtctttgtcttgtgataaaatggtgcttgggcactgtgattgaattgatttttgagatacatgaggtgtcgaaatagatgtatttacataaactctacttgttttgaggaggcatgggtactatttgtacaagctagcctaaaaagactcaaactacataagcagtattcgctagatttagcggcaccctccccacacagggttcataatcaagatatattattactagttgatatcctcatgctttgctgcaaggatttgtgaatacatgtcatacattatataaatggtagatgtatatgtttaaataatgtgaaaataatgtgaagataacggtttcacattgcttgcatattgagttctaaaaatataacaaaattgtaaataatatgtcatatttgcatcatattaaaaatactctataaagtaattactagtgggtgatgatgtgatatacttacatgccatttaaaatactctatat

SEQ ID NO: 42101 - DNA, 673 bp, Oryza sativa
ctgtgcatggatgtcatgtaagcaatatggcttagcaattggtggatagtgatctgtatatagaacctatatacatagggattaattagtggaacattcggttgatctattaggataatcttgattaacaaattatatattttatactatatattaagtgttttcgtacataagtaataaatttatggttaagttctaaaatgcttatttgattggctactcacttagttatcgtgactatgtttaccgaattgctaaatggtccgtatttgaaaaatattttccatataaaagttttataaaaatcaaataaatttacttttgagtttgtaatatttaatacttaattaattttgcactattgaactgcatcgtttcatgtgacctggacaagctcaatgaatgagctagatggaatgaagggtaagtaggagataaagaacatcaatatggtggcaaaagaatatatttgatctttaattttccaataatatatgaatagagaaaacacaaaatacgtgaaaaatacatttatgacaaatttagatgtgatcattttgatatatgagtattttttaggttgaagttatttttattttcgaaaatataagtctaatttaactattatataatctacattttcaattcatttatgtttttcatggatttttcg

SEQ ID NO: 42102 - DNA, 682 bp, Oryza sativa
attatgggaggatggaggaagtgtacgtacatgcctatgtgcgtgcacggggtgttcggaggatcagtctgcttttcatctaatctaaataggaaagagaaaaagaaaaaaaaatagatgtgcaaccggagtacgtacgtacgtttggttttttttaatacctatccacgtacttaatgggaaatttttacataaatctaatggttgaaaataatgggttcaccagattaaatgaaatcgatggttagatgctttacttttttttcttagaatttctataatttattagagtgcaacatggcggtgtaagagcgtttctagatatgccacgtggcagcttaggagtgtttataaaaagtttaatggacttttagtataaaatagattcagatgcaaagtagatcaagaaaagcccatatgtgaatccacgggttcgcacaatcgcacgggttatgaactagtagatcaagaaaagcccatatgtgaatccacgggttcgcacaatcgcacgggttaaggactgtactattattcataagagcacacgctttccttgaactgtctgattttccgaaccatttgtttgactcacagacaatcaaaagctactggataccaacaacgtgcaactgatatattgaaatagtagtactcctgtatttatccacacaattcaaggcag

SEQ ID NO: 42103 - DNA, 3514 bp, Oryza sativa
ggatttttgagagggaatagttctgcaccacaatagagtgcattaaatcaccctccaaatccctctctattctctcgtgggagggattaaacgaagaagattagctttaatcttttcttgcctaacaagctccaccgaataaaaaacatgatgagccctgacctgaaaggcacataactgaggatgggtagcatggctaaggctttgttttaagattaattaagtattagcctaaaaaacttgaaaaatagtttgatatgtttttttaaagcaacttttatatagaaagtttttataaaaaaatatatcatttagcagtttgaaaagcgtgaacgcagaaaacaagtaaaatgagttaggaaagaggggaaaagaacatagtctatgactagcagaggcatgagatggtaagcaactctcattatggaggacaatatgttggaagatgactgggtttattttgttctcaactctatggtacacatgaataaatacatctacttatctactcgatctatctagttattcccaacatccgttttagtcaaacctttgaaacctcatgatttttttaaagacttgaaacgcgtttgaaaatgatgtgtatatatttgtgttgaaaaatatatattttctacgatatcataattctattggatttataaatataatctatctatctatttatctatctttatacctctatactattgagcacattttttttactctcacgttaaccagaaaaatctgatgactactgattagattactcttattatgatgaccctagattaaatatctcacctaacgggtcaactttgaaggcccaatcaattcatataccaactcaacctctatgaataagggtcagtcctgagatttcggtggtctagggtcggtcctgagaagtgatatccatataaaaaaaatcaaacatattggccatttgtaggtgtgaaatcattgatgataagtatcactatcatctgtatttcttgaagtatctattttactccttaaattttaatttatccattgctcaattagcccaattactcgttctttttttaatgtatactttctcgaccacattatatccatacgggcaaattagtgaaagggaacattttaaagttgaactcatagcttaaggctatagaagtactgtattaattcagaaaaatataaccaacaattatattaaactcacaaatcgacatagtctgtactatttaattaatttgtatccctaatttatcaattgaccccttgtaattatgtaaaaaaaagataatctcgagctagatgacagattgagattgacagaaagctttgcgtacttaccaccgccaccgtcgaccttgtccctgccgccggctgttccctcggtcgcaagggatggggttctaattaatcgacgttccgatggtcaccctcgatcttgatggccagccaatggcgcagcttccgctttaggtcgccgagaacaccgcgctacgtatatacacgccttcctcgccagctactccaggactctgcctccagtactgctcctgctaccctcgcctcctacgcctgccgttgccaccatagactagcgtcgaagcgtagcaagaggattgcggccaagcttgcgctcgccggcccgagtgacatgaccttatgtgcgcagcacaatttgatgcgcaagcttgggttggtgcctgagaagggtcatgtgttggccgaggctgttacggcttacaacgccctcttctcccagcccctccctctggatcacgccatagccctatcttcactcttccccagctccctgcctccgacgcaggctggagtgtagtgggatccccaaccccaccatgcattgggataggagatttttcttttttagtagcttatcttctttgtatttgttttttttttcttttttcactactagaggacccctcttctatcccagttcgcaacctcctttacttccgggtaacgaaccaggagaaagaatccaggactaaagaagccagtctttagtccttgttcaaatacctgggagtaaagattcatctttagtcccggttggtgtggcaaagccacatcctggttggtcccttttttccattgtttctttactatttgctagggttaatccctgtatttcctccaaaatcaagtgggttgcatatcccaaatcaaaccctaaatccccaaatcaaattaacatcccaaatcattcacatcacaaatcccaaatcccaaatccaaattattcacaccacaaagcctaagttacttatacaaacaaattaaatacatcataaatccttaaaaaaattacacacaaatcaaatacaccacagattatacatctcagatccatgcaattaatcacaaattatatataaaaaaagaaactatacatcacaaattatcaaaaaaggaaaaaaaagggacgccgcttggccgcctagcatgcgtgctggccaccgctcgccatggccccgccggccgccgccgcctgccactggccgcctgccagcgcacggccgcgccggccgctggccgccggatgggaggagaggagggggaggagaggggagaggaggaggaggaagggtaaggaggagaggggagtggaggaagaggggatcggatctgagaggaggagaggagatgatccgatcttatctaaatactttgtctgggacttaaccgatcagatatgggagtaaatacggttgaagttaccaactgagactaaacataaatctaaatacctacattagtcccggttggtactaccaaccgggagtaaagatcctcagtcccttgacatgcctctgacatgggatgaaccgggactaaaaatgatctttagtcccggttggaaacatcgactgagactaaagatcagaatttttttaatcgggactaaatttagccccgattctttttggaaccgggattattgtagaaatcgcccgaccctcaaaagataacttctccagtagtgtttccttgacccctggcaacagccttattaccatgtgcgttgtgtaatcaaattttactctcatcttctaatatattgacgtacaatcctttttgccgggatcccagcaggcagcagtgccatgattggtgtttatatcagtggcgagatcgattcaagcattcagcccagcacagcggccagcaattgatgcggcaccggcgacaccaaacgtgctcatccagcacgtcgatcgtcgatataagtaagcatgcgggcatgcggctgatgtgctgcgcgcatggcgtcaccaaccagcacggcagtcgtcagatgagatcgatactcgcacgattgcaaaatcatggagcttaattaggaatgccccctcacgtgtctagcggcagaagatcgctaagtagtcacacacctaggaatcgggggccagagcggtcgccccgctcaggccaggcctatgataaggtcccatctcgattttccaggattgttgctacgagggga

SEQ ID NO: 42104 - DNA, 942 bp, Oryza sativa
aacttgatctctgttcaacttgtactcaccctaaaaaaaagttgcttggattcagagcatgacaatgtcaagccatcttgatggtgaccagatgaccgaattctgatggcgtatttgcctctttggtttaaataagtgaattgcaaatttcctttcatcagtcataaacagttgtctactactgaacaattctatttgtctaaaaataatttttaaaatttcatattaacaaaattttgtttataatgatctgtgcatgtgagtgagactgattttgcttggcactattatggagtatcaatcaagtggaagtcgcggcctcttgaccttatcttaatatatatggtatttgatttataacaaattaatccacagaaaacagtcaccgctacaaagtttggtgtacattaaatatatgaacagaattaaacttgctcaaaacaatacttgcatgagtccaattcagaatcaattaagttgatggaaccattttaatcacaataattgataagcattcatgcttgaagaaaagatcagagttcagttgctctcctgaataaatcttctgtatcttagaaggagaacacacaggacaacgaacttaatcgattgcaatgacatctgagtattcaagcagaatggcctgatcttaaccaattgccgtcttctccttcacatatgcaaggagatacaaaagagatgatgaccgcctcgctagggacaacatgagaagcagcgccgctgccattgccataggcccatggcccatagccatagctctctttccccacctctgtatgctgatcggccagcgcgaggccatgaccataatacccaaaatttaccttaaaacgccaccaataacagccatggccaccgtttcagccacttgactctttactaacacccaagatgcctgaaaagcaaggcaatgttatgctt

SEQ ID NO: 42105 - DNA, 1680 bp, Oryza sativa
acctataaaggtgagttttcaatcttattaatccaacctttaacattattgataagctttcttatagaaaaggtatatcttctcaagtatgcggaggaattgttttcattgaaccatttatggtgtggtaaataaggagtgcaataatatactctctccattccaaaatataaggcataaccactcataacacaaaaccaagaaaacatttaatcaccttcttagtttggatcatgttgatacatacaaacaatgtgattgggaggtttgataatataagatttaaaacaaatcaattttataggaccaagatatgctagttaatgtatctatgcatgcatggcttatattagtatgagatatgagaaaaaagtggttaatccttatattttgggatgtagggagtaataaataacggctgtgtgctatacggtgcaggggctagtaatttttaaagaaagtgcaaaatcatataataactaacacagacaccatgtatatacgcgaatgaatgagatttttattttcaaatgtgagagcagaattacatcatagccagcactgtgtcaaattaatataacccttttttctcatctcatctcagtggtaattaaggcggcggacatggtacatatgttgggcttccgcacgcgggggaattgggcatccctctggtgatggccgtgggacgcacaccttgttgacattggcgcctctcccggcggcagaggccatgaccatcaacagcgtcaggacgaggaggaggaggacgggcaccaccagctgcctgccgccgccggtgctcgccgtcgacgtccagccgccggccatagctaggggacggcctggaactaactagccactctttttattttctttcgtcacagcctgaagcctcacgacttgtagttactatacctttggttatgtcgaatggtagtactgtatatatagccgtttatcctggaactgttgcgtgatcaaggccgagtttagttccaaactttttctttaaacttttaacttttccaatacatcaaaactttcatacacatataaactttcaatttttccgtcacatcgtttcaatttcaaccaaacttccaattttaacttgaactaaatacaccctaagttaaataaaatggaaaaaaacaagggagatcgactagctgcctaggagacccgtgcggtcaactacacccgatcgatcgactggtcgaagtgttgtttgtggtctctcaatcgagctcaattttgatcttccctcttccaaacagcacaggtaatactatttttttgatgatgcaagcttttattaaaatcggtctattacatcaagataatataatataactgcgcactgagaaggcttccgacttctacataactagaatacacgtaaccaaaacaaataccagtaaaagaagtatatgaagaattaagaaccatacactagtacggagagctctgacttcggtatcctgttgcatagttaatttcacaagactgaactgaccaactttgcattggaactgatgcaacttgaggagctggggtgctgcaaacaaagctattgatgtgatgacgatggcgccttaccgttgatcaaccttctgagaagtgacatgtcgtttatcttctatgaatgtttggatactttgcgagaactgcccttga

SEQ ID NO: 42106 - DNA, 1575 bp, Oryza sativa
gattaaactgactaattgctcgatgaaccaaacctgcataagcttgctgttctgttgcttcccatacactgaacggaccgactttgattagcctgaccttgaccagaactgctggtgctcatagaacttcttttctttggattgagttgctaatgctggaaatttcggtaacctgaaaattcaccatgctgaaaattcacaaacgcactcctcggtttcactattgatttcttcccttgcgaaggcgaaatcgaaaccttcacaaactttccgtggcacactacaaccttgggtgctcaccggcgacgccttgtcgtctaggagacttttgtccccaagagtaacaaacacaatcgaagatttgcttgctatgaactcgagtgctcaaagaatggagtgaagctcactaactctcaacttctcaatcactcaatccaactctctccccttctcaaatctttctcacaaagagacaccacaaggtagggagatggggatggctatttggctttggatatatctaatactccccaagaacagcagccactcaaaggaggggtggaggggtttatatacccgagcctctcaaaaactagccgttggggcaaagacaggaattttcggaacttccaaaaatttacagaagctaaactcagaagctaaactcagtttcgcagccattttcggaacttccggtaatttttcggaacttccgaaaagcacatagtgaaacgaccataactttttattcgggagtccgtttttgacgatcttggactctatggaaagctcacttagaggactacacaaatcaaccaagaacaaggtctaaaaccacttaaaggataggttaaagcttgggtttctctcaaggtagcactatgataggtcactttgatcaccgagacatacacaaacacatcgacgttgtatccctcttaatagtacagcattcctatactcaaatataaataggaagagaattataccagtaggaatgccttcttttccatttgctttctttgtcttaagggacgccaatgccaaaaccgtttcaccgtatattcttcaaatgattgatgcggttacttgtagcttcaaatggtctcgcacggtccatcatgacaaagccatcactcgcccttcaccaccggatttggttcttcggcgccaagccccttgcttgcccttcaccgttgcatggtccatcgcgaacgagcatcgcttgcccttcaccatcttgccatagtagccacttcgtatcccacatcttcaatatcttcgctttgttattcttagtgttttaggtgtaatcatatcacttgagcgtcaacaccttttcaatccttggaacctatttttctcattcaacttagtgaaattattagtctcaatgatccggttgtcaacctccacatgttgactaaccgatcgcatgtataaaaggatatgaataaatgatgagtattaatcaacaccacaagtgtcatatactcaaatatatgctcaaatgtaaagatcccaattaaatgaaagtgaataacttggatcaaatacatgcataactaaggcata

SEQ ID NO: 42107 - DNA, 665 bp, Oryza sativa
aattcctgcagcccgagaacgatggtgtgacaacatagccaaatatacaccaaagcttcaggttctaagtttaccttattgctcacgtgtcaggtcccatctgtgcatcattctctgccttgcaagcactcactatgatcgagcttcactataatcacttgtcaggttcagtgccagagttcttggctggcttctccaatctcactgttcttcagctatccaaaaacaagtttcaaggatcgtttcctcccatcatcttccagcacaagaagttgagaacgatcaacctctccaagaatcctggcatatctggtaatctgccaaatttctcacaggacactagcttggagaatctgttcctcaataacacaaacttcacaggtacgattcctggttccatcatcaatctcatatctgttaagaagttagaccttggtgcaagtggcttctctggatcactgccctcttcgttaggcagtctcaaatacttggatatgctacaactgtctggattacagctagtaggaaccattccgtcgtggatctcaaatctaacttctctcaccgttctccggatctctaactgtggattgtctggaccagtgccttcttcaataggaaacttaaaggaattgaccacattagcattgtacaactgcaacttt

SEQ ID NO: 42108 - DNA, 681 bp, Oryza sativa
acactgccagaataattgccagaataagtgtgggtattctagatcttttactttgtactggtatgtgtagcatgcgtaaaaaataaatttatcttaggagagatttaggacctgtttggcacagctccagctccaactccacccctcctggagctggagctcagccaaacagtttcagctccatcaaaactgggagtggagttgggtggagctctctcacaaaatgtactagagttgtggagctgggtttaggcagctccacaactccactccagactcaactcctggagttatatttaggagttggagctgtaccaaacaggcccttagtattaactaattaactgagattgtaggtcaagattttgtttttcatcaccactataaaggtagcccgcgcatatccgcgggcatcttatttaaatttgttagaaattttattaggaatgtttatttttttgcgggaatagagatgattagaaatgtttatgattactctattgtaaacatgtttaattttttaataatttgtttggtgttcctttgaatgctagcaaccatcacactacgtataaattataaactaaaattacttaaaaccatgcagttttggttttataagagaaaaaatctaaatggaactatacatcatttgtacataatgcgtttcttttttttaat

SEQ ID NO: 42109 - DNA, 863 bp, Oryza sativa
gtgtagtcgcgtccttaaaattaacgggtccagcgatttaaaagaaaatcgatggtgagattatagaatgccacgtgtcaacctatgagcgtttgtaggaagccacacgacggtttgagagtgtttataggaggtttgatggaattttagtatataatagaagatagatagatgacatttcttatgttcctttcttttttatggatttcttttgataaaaaccctgttccgctctcgcttgccgctactaacgggctctcggttgattttccttcctttctagctactcaatgtttcagttcgctaagtttgaaaagtccaaagagctccggctttgacgacgttctactggtgtaatataggaagacgaaatagagaccgaatgcctcggccacttgcatcgctcgccctatatatacagacggtacacgagcacacactaggaaacgcaattgaaacagccaaaaaccgtaggctcgatcgaccggctcgtccttctagcttaattagctacctatggccggaagggcggcgccgttgaggagctccggcgccggcggccggcagctggtggtgctcatccttctcctgctcattctgttcctattcacggcgcccatcgtcatggtattcggagaggacccatcggtgaacggcaagtgcaacatccgatggcgaatagcatgcccgccgccggttcctcgaccttgagagatgatcgcgatcacctgcgaagtgtgacctaacaataggctcctgtccgcaatgcatatgtaattgcaatgatagaatatatactccctccatttcaaaatatttgacaccgttgacttttacgtgtttgaccattcgtcttattcaaa

SEQ ID NO: 42110 - DNA, 1623 bp, Oryza sativa
cccctttctttccccacccctctcattaatcccttctccatccttatcctcctccatcccttctcctctcccattcctcccccttctcttctcttcctcctcctcctaccacatgaggccgggcggtgcgcatcagtagggagggcgcggagcggcgggcggccggcaggcggccgaggtggcggcccgcgaggcaggcgaggcgggcggccgagcaagcggccagcgaggcggcggcgttccctgggcggccgagcaggcggccagcgaggcggcagcgctccctgggcgggcagcggagcccgaggcggcagcgggcgggcaccggccgccgaggcggcgggcggcgacgctccccaggcggtggcggagcccgaggcggccaggccggaggccggcgaggcggcggacggccggcacccgatctctgcgatgtggttttttcctgatctgtgcgatgtgtgtggccgatctgtgcgatgtggatttctttttctgatctgtgcggccgatctatgcgatgtgatttctttttctgatctgtgtgatgtgtgatctgtgaatgaattggtggagatgattttgtgattttgtgaatgatttgtgatgtatttggagatagaaaatgcagcttgatgtatttggggattttgtgaatgatatgtggtgttggaatgatttgtggataatatgaatgatttgtggggctcgaaatcatgcatgcatcagtaaaagaaaaagaaaaaaaagaacattagtcccggttggtaactctaaccgggacaagatcttttgtcccggttagtaactccaaccgggactaaagatccttttttaatcccggttattttaacagggactaaaaatgggtatttttagtcccggattcatagtcccggttgcataaccgggactatagtggggttgtgaaccgggactaaaaaggtttgtccaccagtatgtagtgcccatcacctgaagcttcgattcgttaaacctgtagcgttcccaaaaataacatgttccaacacagaaataacaaaatgattattttttgcgcattaactgtcttttgaaaatattacattaataaccatgtgatgtcattctagaagtattgccactctaacaaatggattgcgaccatggaaaaccgaaatatccatgtatataattgagtaacattcaaataaattaattaactagcttaactagtatacctgtcatccacaaactctatattgagagaactgtaccatccaggggttgattgatcggcctagatcgtcacacctcttgcatgtgcaactatagtacttgatttagggtcggggccatcatatatgggccaatcgtggacgacgatcagtccgaatgaagctggatgggttgatggtaccatattttcttggttgtggttctgtccagagtacacttggtccaagtacaactgcatggtaatctcgttttcacggagcacatgctttactaggttaacactgaaagaaaagctggccatattgttgggtgtaatggcaaggtgtaactaagaattgtgactctttcgattgtttgggctgtgtggagagatttgggggagggtcgggtatatttatagtgtgg

SEQ ID NO: 42111 - DNA, 4164 bp, Oryza sativa
gacggcctttatttaaagggccgtcagagatgagttacctgtgacgggtcctaactcgccctaggctagcggagaccaacacctctgacggccttctagtaacttgctcgtcagaggtgggtgtcacctgtgacggccggccacccgtcaaaggtgactggactcaccagtgaccactgatcactcaccatgcgcgaagccgtcaaagatgagggtttgggctcgtcacaggtgaccttggccagtgtagtgaacgtagtgcatgttctgtcaggaagagttcagtatttttaagaaatacaattgtgtaccacttgggaggaatcaccatggtgatgttatataaggaaaaaatgatggcgtatatattaattgatttttcattatttaaatgtaccgaagcacaaactagatcaaatttgtaaaacttcaaaagtaattattaataaatcaaaatgttgaaatggacactcgctaggtgttaatatgcaatttatttgattttggactttttccccctcttttccgcacagtccatgcactcatttatactgaaattttcaaaacataaaaatatgctctagcaagtcacgatgacatttaaaaaccaaggatgtttttcttataaatatatatagtggctgtcgacgggttgtacccatctatgggatttgtatagggtgggaaacactcgtactaatatatatgagagacaacgattaagtaggtggaagacaagtgatttatatatatatatatatatatatatatatatatatatatatatatatagccctaggaaatctagttgatgaaactattgtctagtttggtgccaaaattcaatcagcgaaaatgataaaatttgagtttaatttctagaactttttgcagccaaataatctgcagcaaaaataattgcagtgtttttagtataccaaggtcatgacgtcctctaggcacaacaaaattaacgccacaattggaacaccgtacgtagaacatcaaataaattgatcctcgctctgtgtgatgctctatctgcactgttccgatgccttgtcaacgtaacgctgcatccgtgcacgcacctatacttggctgcgttcgattctgtccgtcgggaactcattccctccgcatagaaaaaggatcggtttattaacacatgattaattaagtataagctatttttttaaaaaatagataaatatgtttttaagcaaattcatatataaatttttcgcaaaacacgcatcatttagtagtttgaaaaatgtacatgcgatatcaagttgggaaccaggagtgctgaagacagcctatatatagacagtatgagtacaccaccttagcgagcctttttaagttaacgctcacgttcacacacattctactgtttgcccgtgttattgcatcagagcaagtttaatagtatagccaactactaactccaattcatttatagccaatctaatagctcgtccatacaatagttatatactacactattaatacctagtctcacatgtcatacacacactgcgtcttgaagtccgtgctacaactggctacaaatctgtagcctactgctcttctctcttcttatttatccccttaaaatatatttgcagctggcttatagcctgctattgtacctgctctcatacccttccacaacctgtcatctgttgtggctttggttgattcgaacattactagctttcgtctatttctctagttttgtttaccaatatgtactagacacattttactggttgtttttgttactcacatgttcgggaatgttaactaagggacgggcataccactctggcaatgctatggtggctgccattgctggccggtggtgagatcaaccacacccctgacttccctggatcctttctccatcaactgcgatggcccatgccgggagtgcatggagatatgaaagacaatgaacaccaccgtgacgttaccgagctatatttgtttactcaactccaccattccttaaattttaggctggatccgccattggtccaaatgctctgttttttccgaacatagtgtcagtgcattcatgaagaggccggagatatattcttcatcctccacgatcttacaaaaatattagctgaacacaatcatgaatcatcaccattaggtgtccaccaaaacaaccacttcattttatctaaccggtgttttaatccaggtttatattcttttttctggccacaaattataatttagtttacttagaaataaatacaggtccataaatcaccaattctgtataaatattccagttttgtaaaattaataatgattttttttaaaaaacccatttatatttcaagaagctgagaaacattaccatcactactaaaatacctctaataaggggctggtcatacatgcttgctggttcatttaaaactagcacctattgaccgtttctcacttctcttgggtgaaaatatgacaacggttcttttgagcaactataggtgttgttctaaataaaagtcagccactatggtatttgtgttggttctttaaaaaaatggtacctataatatattaacaaaagaaacggcacctataatatattataagtcccgtttttaagaaccggcacctatatttatattataggtaacggtttttttaaaaatggcactaaaaaaccagccgaagccatccaagacgaccgaccttatttactcccttattcagtccttatccccatctcttattccgccccctccttctgatcccccctcctcctcctcgtccacatttgctcctgcctccccactcccacctgccccccctcccaaccgccgccacatgcacacctcctcaccaccacccctacctagcatctctgtctccccacctgtctctgttgcgtcccctcagcctcatcattgctgccttcctccttcctccctctcagcatctcctccacacagtggcgggccgacggctccttcgcgcagtggtgggtcagtggcttgccgacggcgcagtggctcgagatctagaccccgagcttaggacctatgtgatagagaagcggcgaggaggaggtctagccaggagcagtggcggcctcccgctcgcccctccctctcctctcatctcctgtgcgatttactttgtgatttccgcttcttgtataatctcccgcatgatttattttgtgatttttgattggattgtctcttgtcttgtgttttattttgggatgattttttgatgattctgattggattgggatataatttttgggtgagatttatgatgatttgggattcagtttttaactcaaaacatcggctcaaattgagccgatgcgttgagctaatctatttttttgccacacatgcacctcagaggtgctgattgtggtatcggcgtcaatggcctagagtcatatgggccacctgacggatgctgattggaaaaactggcacctatggaggattctcaactggcaccaaagtccttacctgtagtagtccatactgaaattttgattttttttttttacacttcatgacttaatactgtctgcttttgattttgcaattgttttcagattttttttatcaatgttatagtatgtgaaatggatttttctcctagtgagatttttataaattttaatgtctggatatttacagtgatactacaacagaaaaatatatggttggaagacttgtactatataattcgtggagtagttgcagttgcagctaggaaggtgcaacgcattcatgttatataccacctccggtttttacaccattgacttattgacaatcatttctcttcttaaaataacatataattacgatttatttcttgtcatttgtttgatcattaaatactttaatcatgatttgtactttcttatacattacttgactgcgtgaggtacagagtttgtgaggatacgtgaataagatctacgtgttgtcaccctcaaggtatatcaagtacgaacaattttttttttagaaaatgggataaacccggcctctacatccgatcggatgtacacatccaacaataaaacaagagttcttagactccaccttacaaaggttcacaaaccaacatcatgacacatcaacaccaacacaagag

SEQ ID NO: 42112 - DNA, 622 bp, Oryza sativa
tggtgaaggaacctatatgatttatgagtttaagtagcatgtttcagttcatatataaaaaagtttgtcatatggttctcgtaataatttttttccgcaagattaataagaatgatgcaaacaggaggccaccagcccaccaattattcagcggtggataagatggcaatgaacataacatgcataaacattttttatagtagtataaaagagaacagaacaatattttacatggagtcgacgcgtatgtgtacaggatatgatatttatacggaggacattaggtacgatgcgtactgcagaacgcgatatctctacaacattagcattaaaacggtggtgataacatatagggatatggtgttttgctcatcagcaacgatggctttggccgtttgaccacatgctacgagaagggcatatgcaagctagttttgtggacacagtacttggatggtttagccatgtttggatttcctacccacctgacatatggcattgtttctcctgcaaaatggaaatcgatgtgattcattatttgggatgtatagctgggtcaacaatagacagtatttagtaatatgttgttggtacattgaaaatactaatatgtactacctct

SEQ ID NO: 42113 - DNA, 690 bp, Oryza sativa
aaaataaatggaggaggaggtatacaaaaggagttacttttattttccgttttccacccacaaattcaccatacacatacacgtgcacattcttgatccataaagtatatcttgtatttccgtggatccattattttactttgcaatatatgtgatgcaagtaatgcttactcttttccataccctgagcttcacataagccttactagatggtaggaaaagaaaaggcacaatcatatgcctttgtgaggaatcatacaccttgagtgatcgatagaatcaatggaggagcaaagcaaagctataattttgtgttacatgaaaaaccccaagttgttcttcacgaaaagttagggtgacttgagtcaagattgttccatttcttaattgcttaggattgcatggtagacactacaaagatccacaagtacaggtatagctttgaataatttgtttgcatgttatttttcagggagatcatgatttctaattgtaccatccctagcttgagttcaattatcttcgatattttagaattggtaatcaaattaaactcaagatagaatggatgtccaaaagtaaaaattggtgcaaacctacgctctatataaaacagaggacgattcattgggtctggccgcatcaatttccctgtgtggttcgtcatggctcgtcactctggagtgatct

SEQ ID NO: 42114 - DNA, 570 bp, Oryza sativa
ttctcaagagatgcatcatgcaagaactgggttgtttcttgatgataaataagaacaacgttctgaaggccagagggacaaggcttaggtttcatcgagggtgatgaggatcgttcagtttcatgaagatgggcaataggttctgaaaaaatgaacgaagatacaaacatcacctcctcgaacggctcatgcttgggatgagccttgattttgctggaataattcagggtgtttccataatctttataaagatcatccctgaattgtaatggaatttccggaggatgaatttcttcttcttccggctgcagcaactggaatgaggattcggcagttgagtcgggttccgactccatgtgcagaggttcctcatggataatctcgacctccgggatggcttcgctttggccgaaagaatcgttctctaagatcaaatctaagagttctcttccttcggcagttgtcttgtgtgcgaacgattctccagcagaaatatcgagatttgcggcagactccttgtctaacgcgtaccgaaaatgttgtaacaacacatggtcgggtaatgagaag

SEQ ID NO: 42115 - DNA, 1268 bp, Oryza sativa
atacgtacacatgcatcatcgtgtactgtactaaattcacaatacacaaggaataagtaggcaatctaatactctctctgtttcaaaatgtttgacaccattgactttttaagtacgtgtttgaccattcgtcttattcaaaaaatttaagtaattatttattcttttcatatcatttgattcattgttaaatatactttcatatacacatatagttttacatattttataaatttttttaataagacgaacggttaaacacgtgctgaaaagtcaacggtgtcaaacattttgaaacggagggagtatatactatctctgtcacaccaaccgtataaggcataacaagacttgacatgatatccaaactaatctttaaattttaatttcttcgtatacgacaatatacgaaatcataacaataagaaagtatattcaaatgctaaaaaatactccctctgtttcacaatataagtcattctagcatttctcacattcatattgatgttaatgaatctagacatatatatctatctagattcattaatatcaatatgaatatggaaaatactaaaatgacttacattgtgaaacggaggaagtaatatttttgtcaaataaaatttaatttatattagattagtggtcagctaaatattttaagaaccgaatcttaaaatatgtacatatctctgcttaaaaaaatatgtacatatcgtgcattatggggcggagagggtaccgctcattttaatttttttttctcgtggcatagcctgtgccggcgtcacgatcatggccaggccagccagtagtttgattttaaccgaataatgtcgaggacaacccgtgcgattcaattcaaccataattatcgcgcttgcatttgcattggcagagatttggctgattttattattgccgcatgtatcgtgaaaacggtcggaatcggtagcattccttcgaaaacgatgctcgatcgaccggtaattaaccatatttatcatttaaactattcaatatcaacattaatatggtacagaaagaaattagaaaaaataaaatttaaaaaatagtcaaaaaaacgttatgatcggaactcggaaacgatactccttgaaggaaacggcgcccggtcgatcggaatctccctgaccgttttcaccccccaccccccctccccccaaatcgatctgctactgaatgtacgtgtacgccgaaatttccattccttttttgcctttttattagctagctgtccacgttca

SEQ ID NO: 42116 - DNA, 1668 bp, Oryza sativa
tatatatatatatatatatatatatatatatatatatatatatatatatatatatatatatatatatatatatatatatatatatatatatgacactcatatggggcaccatggtgcccgggcaccatggtatctaatgcacaaaatcactcaaatttttcaaaattttcaaattgtgagtatatacctagttataataatttgattcatacctatacttatcaacaaaacaactcaaatttaactttatttcacactccatgattacatacctaactaattatatgtatggatgctatatacctagaatcaaaatctaacaaaaacaagttcaaattcagttcaaacttgctttaaactagttagtaaagtagttaatgttaatacctaagtaattgaaaaagtttcatactcatttgaattgggtatatactcaatttcaacaatggtgcccgggcaccatggagcaccaaacaaatttactatatatatatatatatatatatatatatatatatatatatatatatataaaagctttattgtacacccctcccttagaataattattctacaccccctccactcaactcccccaatccggcccagcccaccccacgcgcgtgcctccctcttcagcccccacgcgcgtctctccctctttttttccttctcttcctccgcgcgccgatctctctcgatctctccctcccttctttttttttctcttctccctccctgccgatctctcttgatctctccctcccctcctcccgatctctccctcccttctccttttttctctttaaattggtaaattcaagactagaacacatgatctcatggtataacaaactctcctaaccaattcaccctataacactatgtgatttgggatcattgtttgctttctctatatatctgttcagattttatgaacataaacctgttatgtttactgtaggaatcataccttgttactgtgattcggtagtaatattatcgcagaagtgcagtaacacgatacattactgtgaaatttataggtcgttactgtgaaatttataggtcgttactgcattttttcaataacattatgatgaaattgcagtaacagagagcatatgatagtaacggtactactacagtaccacaacttgtgcatagcaaaagttttaaatctcaatcttgtgcaaaatacaagtgctaaaaaagtgcatgtgcatggtcacaagttaacacaagtgctaaagtaattctctttacccatacaaagatacatacatagtagcaagcttagtacaagtaaacttttataattataatctttaaacaataatatctcttacatcgcatattattttttagaatcgttttcaccataatgctttaaaacgatgttacagcgagacaatagtcatgttactacacaatgatcgagacaaaaatgcttttataacattgttactgtagaaagtagtcgtgctactgcacaatgatcgtcgcgttactatatcgttccagcgagacgagaactttaaaaaagtaaatctcaatatttagagagtaatatctctcacgttatatagtatttttctaatccgtttacaccatgatgttcgtaaaaaagtgtttaacaaaactagatccatcatgactatttttcga

SEQ ID NO: 42117 - DNA, 3576 bp, Oryza sativa
ctgaattgttatgttgtatgctgttttcatctgatcatgcatgtgctgctctgaagattgatcttgaagttagcatttggtacagcaaactgaatttgaatatgcatgcaactgttaaacacagcctaaaacgtgtttacatggatctctactgcattcccataatcaatcactacggttttggttatcattggtactggaactgccagtcaatttcttctatgtaacagtcgtcttagacgaagaatgtgcacagcaataataatatgtttgtgtctatgatgtcctttctattggacttgttcatccatatggattgttagttttgaactgcattcacgacttagcttgcatgccaacttcaggtaacactatgcaacaaatatacgaagtttaaattggaggtttcgtgctttcaaattcaacttatagtttatataattcatttgtatttttccattaaaagtgccaaatcttgaagctctttgtatttatacatccctttaggtatgtagtatatagcagtttgccattttatgcacacattagaacattgcacaggataatgaccttgaaattttttttgtcacttctatatgattttagtgtatgtcaggtagaaacaccttttttgtattatagaccctgtgtatttttgtttatatgctgctaaagcatccccttaacaagtgaaatatcctttcaagtatttttgttcttattgctgatgcatgacttcgcaatgtgtaagctttgtatacaaacacaaccagattgtcagtgtgcattttgttaatttccagcctagtacagatagctgcatacaataaacctaaaactggattggacttctcttgtattcatgtctgccatggtatgtttgtctcagagtaacatgtggcggtatatctgttttgaatataaattaattagcaagatcttgttagattgtaaaattaaattgttttgtttttttggacagaacctggactgttcttcgcgcatgaatttggctagtttgcacatcgacctactgtgtattgtgtgcatccaacttttttatgagtatgtgacgccatgtttcatgtccgcactatctgatttcggactatcttttgtttttccttgtctctttgtatcatcacaagatttgtgcgtgcatgtatccgtctagctagcttttaatttcatcacgagtattgtggccacagctgtagattctatacatgcaaagaaatggatggctcacatgcaaataaagattagcaggcgaacttccatttctttacctgaattgatcaatccatctgtatccgacatgcccacttatctatcaggttatattctcatttgatacatgaatgttcttcttcagtacaatccaggatcttgagagctgcggccaatctattagcccaaacttattttgttctactcaccaacttgtctcggatttctaaaacaagcttgactggagcctcggaaggagacaaagaggcttttattccggcttgtattgctgcagttgggccagaaaatcaagggacatttctggttgactgaagaaagatgccaaggtgagccatcttgttttagctccctctcactaacattatgtatgtgacactgatcaatatactgtctagaattatttgtgcctgtactgttcttttttatgagcctaaagcacacgttaggttgcatgtccgatgctgtggcagcataggaaaatagttgcacatgtgaatgtgagtatcagaaaatttcttctaagcttatccaaggcttcagcagatggtcaatagtattagctgcctattttataagaccaggcttggtgaaatatggtcaccttgtggtgaatttagtcctagcccactgtaaagaagcaaggagcatgcgggatagtggcgtggtgccatggtagggttaggtgaagtgggtgaaacctatcccacaagttcccagatccatgggtcgagaaataggattgaggaacacgggatgctacttattttaggtttaacatgggagggacaatattgttcccgtgttcccgtcagttccatatttcttgtgacgtttgactggatatcggaaggagttttcggacacgaatgaaaaaactaatttcatagttcacttggaaaccgcgagacgaatttattaagcttaattaatctgtcattagcacatgtgggttactgtagcacttatggctaatcatagactaattaggctcaaaagattcgtctcgctatttccgtgcgaactgtgcaattagttttttcatctatatttaatgctttatttgggtgtcgaaagattcgatgtgatgtttttggtaaaaaaattttgcgaactaaaccaggccttagggtgaaacccgcgaacaatccacctaagattaatggtaagctgtgacagtgattttcagaagaaaaaaatcgtctggaaaagccacatgtctgtaagattgtgaaattttctcttcttttgtagtaataccttagtgcggcttgtatctatgatctatctacaccaaatgggagtacatgatgtagctgaaaatttgaaacagtagcttccacatgtgactcgtgacctctcctagctagtagtcctagctactagatgatcgtgcaactcttgtacacaccatatcagggaatgcattttttgctgcaatacatttctttttcaaccaatggcatgcattccttgggtgtatactagactttttttctggcaacctgatttgatgagctgatgcgcagtttgtgcacaatgggcagctgctttctgaaaatgatttgcttgaaagctgacaccgcgaataatgtcgccctgtgcaagtcaacatgactgtagattgctctgcaggtttttgcactgtggaagggagattgaccctcgcttttcagcagcagcatgtgaagttagtgccatttgatggagtcacggtcagatttacatgcccatcacagtacattgagaggtatcactcaaattagtttctttgcttctctggttctgggctctagcacagtggatgcatgttccgttcagtttggtcactttccagttaacccagcagtagactgctgctagatagctgttgtataactgctatcgatcctgtctgctgcttcagagggcagaagctgggccacaggtcatagaatcatggaggaggtcgatggatggactctcagtaagtaagcaggcccttttagaggaattattgcttgacacactaacttgactttgaccacttgtctgtgcagctgtagcaactggtccaattggctaggtcccgtggggcgagctagagcccagcgatcgagatgcaatcgtactgccacattttgctcggcatcttgctatcatgctatgaattgcttagctggtgagtgtccctcccatgcttatatattgcttgtggtccttacctctcggttctagttcagaacgtggtaaaatctccagaattttatatgctaattttttttcctgaattatattttccgatccgattcgagccagtgctattgccatgtgcacattataccatat

SEQ ID NO: 42118 - DNA, 8948 bp, Oryza sativa
tgtctcacctaattgcttagaaatcatacagacacaattctcttctttaaatttgatcttgatgctggaaaattggtcccgctcctatatcgccttccatggacttgtagctagtctactctaggagtgcccatctcacaccagtcacatcttcaccacctttacttggagtatatttgtgcatccggatgtgcatgtgaggaagctacagatctatgcaccaatctatttcagggcatttgacaatcgatgcacaaactctcaagcgctgaggttatctggaatattttgcaaagcttttccaagagatcagatgcatgtacactagaaattatctagattacactataaatataaatacaacctagtacagatgtgacttattatagaactatgaatctggacagctgtctatctagattacacttatattggaacagaggtagtagtcattatattaaaaaagtacacaagaaattagtggggataaaatcataaatctgttagtagatgctgaacatgcttttccatttgaccttagcagctggctagctttcacatgtgattaaagatgtttctggagctgaacatgatccatcgagatgcatgtatcactgttccagaacagtgctagctccagataaactaattaaaatgaaaacgatgttagttttttttcctgctacgatgtcagcttcaagacgtaggtcatctaatttagttgtaccgtagctcactggtgcattcatgtatctctgtttggaattgtagctgggtaccttcaattgatctggtttccaaatatgggcactattttatcttttgaaagtgagttaattgatacggagttacggatgaaacgatacttttccatttgggatggaagatgcattgacgaaatcccctatattttacgaatgaagtagtatatatttaaatgtccatatggtgaaaaaaaaattaactggtcgatcagacaggttttttgctaaaagtagcagattttatattggcttgctatatagtttgggtgcccactattattaatttgttgagttttatgctcagattgatctctctgcaattgtaatctgtgaggacgattgacatactatatataattttagaatatgttttctgaatggttattattggagtatgtctctctactcaagaaagtattgtttcgaaaaacaagaatacatgttattctaacttctggctggtttgctgatgtatttccatgagaaattagttttcatatgagaatttcgaagtctctaggtgttctaggatttttttagaatattgcacaatgcctacatcgcaatatttgttttgcatcttaatggaacgatgttgagcttttaaaagggcaggattaatgtagagtgaagaatcatgtaatgatcaatccaaactcaattcatccaaagtttaggaactcccaaattagtaattatattatttttaactaccattttttcttttgatttttccttgttgaatttatcatcaattgtttgttagttccctcctgatttggctcaagttaaatctaatatttcaatggctggcaggttaagataccgggttatttcctcagtctcttcggtatgaactcaaatttacttcattttgtccttcagttcatataatagccatgcttagttactttaccttcatttggaaaaatctttggaagttattactggcaattcaaactaacaatagattttctaaaatgttgtttacataatattacgtatctctagatgtttagctgcaaaacagggttactgaaattaagtactagttgaagaatgtgatggacatagtacatagcaacaccttctcttaatctggaaatgaaaagctgcagtgtaaattcaactgcaagcaaattaagcatataagagaaaactttcttaaaaaaaactgaaaagtaaaactttgtgggaaggaagctagtgacaacccaagaccagatagttctgctggatatgacaatctgtaagttttcctgtacttacgtaggttataaccatccagctcaggttcgacgaccaggatgctatgctggatgatactctaactgtaagttttcctgtactttctagtgctgcttctttcgaggactggctatccatctattcaattgatacttcagtttatttgagatataggaataggagtactctatattgtgataatgtgatccatttttcttttgaggcttggtttagttcccaaattttttttctaaaaacatcatatcgaatctttgaactcatgcatgtagcattaaatatagattagaaaaactaattgcacggttagggggaaatcgcgagacgaattaaacaggccctgaaacctgtgatcattatagtggtatagcacctgggatcaatggtggcgtctgggctttgccagcgtctgatcgaacgtttgaacacctgtatgaaatattaaatataggcttaaaaaaaactaattacgcagattgcgactaatttgcgagacgaatattttaagcctacttgctccatgatttgacaatgtggtgctacagtaaacattcgctaatgatgtattaattaggcttaataaatttgtctcgcagtttacaggcagaatatgtaatttgttttttattagactatgtttaatacattaaatgtttgtccatatatccgatgcgacacggcaaaaatttttaccccttaatctaaacactgtctaaacgatggtccagctagctctataaataaacaacattttatccggtctacatcacgatgttctctgtgacatcaaatcttaaacactgctgaatctaatctggtcttcaaaagtttggtccaatatatatactgcgatatgcaccgactccttaaaattaacgattaaaaatatatgagaatatctatagtttggatatgatggaatatttatagtactcctaggatatagcttatcttgtacctgattccggccagctaaaagatgtatactgaaaaacaagttatttaaatttaaatgggtcaacttatacaccctgtagtgctgtcgttaacaatctagctcctcgcaaatggcaccatgcgcacatatatatatgcagctaattggagtttgtaaggcaagctcacaagctgctaaatactcccactggaccgaaataaatccaactttcatatctagagttggacttattttcggacaggaagtatggcgtagaggattttagccttccaataaacatctatactcatttaaaagacaatagtgatggtggtggcagcctccccatcatttcttttatagtttttacaattagcccctaatatttactgattttatagaatagtccaatatcttgttttaaacaagtgaatatcatatatatttaagtaagcaaacaagtaacactaacatattttatatataagtagaatagggtaagactattctacacccggggtatagaataactttcatcttcctcccgatccccccacccccaccttctcgcgcgcctcgcgatcccccctcccccacccgagcgcgcgaccctccccctctccttttttttttcctcccgatcgctcccctcctcctgatcggacatacatttgaagtattaaacgtagactaataacaaaacaaattacatatttcgcctgtaaactgcgagacgaatttattaagcctaattaatccatcattagcaaatgtttactgtagcatcacattgtcaaatcatggcgtaattaggctcaaaagattcatctcgcaatttacagtcggactgtgcaattggtttttctttcgtccacatttgatgctctatacatgtatccaaacatttgatgtgatgaaaaagttgaaagtttgaagaaaaaaaagttgaaatctaaacacggcctaagcaaatttgccatcagctatgcttttcaagttggattagtgggacgttatgggctgtgtttagttacacgctaaaattggaagtttaaagaaattgtaacgatgtgacagaaaagttggaagtttgtgcatgtaggaaagtttgatgtgatgaaaaagttggaatataaaaaaggccatagtatgatttgtcaaggggtacggacgtaattttggcaccagcaagtactaactaggtctagagtcgacattgctgtactgcgcccactctacccgccatggctttctccaagcctcaggggcagcggtcgggatgggcccacaacggccattcccaggcgtcgacggttggcccaccaccgcggtgaaccaatcacgggtcgacagcgccggtgccgaatgtccgacaaggacccgccgctccgggccccgagagcgaaccgcaaccaaaatgaataaaatagaatagagaaaaagaacaggcaaacaattcctttttgttaaattactactcgtactaggcatgcaatgcacgcaccttcgacggtagccaccgcgtgtgacggtgtggtgctgcaaccaaacgctgctgctgctgccagccactggagggttgggggatggaatcatggaagggataggcggatagctcagcagtggtcagctctgctagtagtaacaacctgtaggatggatgagagttattgtagtagtactttggtagtaccagtatattacgagtaggaatggtaatgtgttgagttatatatacccctgtaaaagaaaaaaaaatcctagctatgagcctaaaaaaatatgcccactccctccattcaaaaaaaaaatccatttttagggatgaatctggacatacaaaggttcaaattcattcttagaattagacttttttatggagggagtaggttagtagctaggattaagttttttataggacaaagtagtatgtcatttcacaatcctattagctcttatatatttttaggttaaaaatgtataaaaatttagcccatctcattttaatcccaaccctcaaagaaaaatgttagacccttcaccacccttaagtactctttttttccccttttactacctctgtcttaaagagattttgactatgtatttggataaccacttttaaattatagtaatgtttatagtaaacacaaatagtaaagttatactactatttagcattcaaaatactttaattaattataaaacttttgggaggaaaaaaaagaatagaagtgatcaatgtcgttgcatgcatgaatagtatctagtgccaactactccctccatcgtaatataagtgcaacctagtatagatgtgatatatcttaaactataaatctagacagtatgtttatttagatttgtagttttaggatactgtccaaattcatactaaattgcatttatattaggagagagggagtaggagtaaaaagcacggagggagtacaaaataaggtgcgcgtcaatcacattgattggggcatgcatgtctggggtccctgcagtactggtcctgctggtagtagtttcctctgtcactcaggccatgggattacaagggtcctactagtatttgcatcccgctgattctgtttgaagcacttcaatttcttaggaatggaaagccctcctatgtgacttcttctgggctttctatatgtgtgttataaagctggattgtactaatcatcgatgattaaaagaacaccccaatgttacattgcaaacatcgaatgtgaacaattaatatataatagagcggggctgcattgggaaattcggttgtaaggaaattcgggccttgtggtgtaaggggagaaattttggattatcttgccattgggagccagcctgcgttagaaaacatatgattgctactctgagtcagattggtagggactcttcatcatcaaatttgcctgttaagattgctatcacagatatgaccttgaggaggcacctttttattgacctagaaatcatacgttattaatatatatgaatgcaagaatagcttgtgtcagttgaccactactaattttagaacattttgaccacgtttggaatttgaatttttctaattcctttgggatttagattgtttttatgcaaaattaatgcattgcaaataagagtttatattattgtctgatagcggaattattaattaatactatcataatttatgtattactatatattaattaaatggacaaatactagctatagttatgagataagggttgcagtagatcgagttgtcaaatgatgtgagagtgcatgtcgggtgctcactgatcgtcatgcatgcatttcttcaatatttcgatctgtctgagtctgtccaactcagctatcgtcccaaagaaggcggtgcctatctagtcaatgcgagtatatcaaggccgagtgagtttagctccaaaatttttctacaaactttcaacttttccatcacatcaaaacttttctacacacacaaacttccaacttttccgtcacaacgttccaatttcaaccaaactttcaatttttgcgtgaactaaacacaccccaagtttgggggacaagtggagtagtcgacgtgaacgcaaaaaggagattcggagaaagatatccctccaacattttcttaagaagaaattatgagcgcgttgggaattgaacatgagacatcagggttgaaaccacacatcccttgtcactacattatcaagtgcatctcgctaatttaatttagttgctatgttcatctccatggccctgtttggaagattagcccagagctaattttaagagctaatgtttagtcttgaattagtaggctaaacattagcttaggatgatatgtttggatctatgggctaatatagggctaaaaggtggagagagagtagagagagagaggagagaggaagggagatagggctacttttttatgatccccacagaaaattagccccattatcaccccttggaggagctaatgttttgagggtggctaattcacttaagccttaaattagcccatatgtttggattttttggggctaattcagggctaaaagatgggggctaataattagtccatgtaaccaaacagggcccatgtcattgttgataaccgaggaacgtaatgcctcccgtcatcatattgtttttgtgtcggtaattcacttctatttcttgcgattgcaatcaggtcaacgttttcatacccttggtagcactgcaagtacgtcaaaccatgcaaaagagagaatccacgggtagtttgtttaatccttggggatgtcactgaactttaacatctcctgctcagctgcagcattccagctagcggcctagctatttggccaacatgttgtgttattacatgtttgatttattttggtgacatcccaaacagaagagaattggttgatagtattagtagttgattatggcatgtccaatagtccttagaatttgacattttatcagaagttctatatatttgtcaggggaaaggaggccagggaatgtgtcatctgttttgcaaagggtcatagagagcctggagacgaaaatcaaacacacaggacagattctgcgcatataaagacggccaaaagccatatatacaagtcagaggccatcattaatgcttgctgcctgtaggacaactcgatcaggtacgcattctttgcttctacggtattgctgcagcgtaaacggtcaaactaatttactacagtagtaatttattggcagaagaaatgttgatcaaaagtacctttccaaagttcaaaaatgaaacgtgcatgaggtgtacacagcatatctgattttaaggagaatagatgcttgaattgaatcaacataaccaccaccttcttatgctagctctactaatcaactactacaaaaacatgttctggacatctcagcgctgtcctaaaaatgactttggtagctaatatttattgtgaaacatttgaaaactcaataagttataatactataaaagtacttttcaaggaaaatctataattatatatatatgtaatactatgtgatttttcatacattcaatctaaataattaaaattgtattgatgtccaatgtttttaaagtttgagataaacatgtctaaaccgatatgtttgcgtgactggagggagaagaaatgctccagtgaaatcaaactagtatttgactttctgttcttaattggtctatatatattcatatgtcgcaatacaaatagatcatgcacatggataaaatattttcaccaaccgagctttccatgaccagacaaatatgtgcggcttggagcaaagctttcaacggccaattcaagcaatcagcttgaccactctaccacttactgctaaactagaggccctgtttcgtcgaatttaacgcaagggctaaactaccttacaaagcttcagatatggaaatcagcatggctattttaaaatcctaatacctctcttcaaagtttgccatgtacctcctctcagatctgtccaaggaagagactagagagtaaacaatggtcatgataaactaagatcaactaacttcatcgaattaatggaagttcatcggagataccattgtcgtactatgaacagtggcaaagtaaactttctttaatttttgggtgggatattggtaccttgtcctcctccaaaatctgacatgtaattaatcaaaatgcaagtaggagttctcactgtacacacagtgttagctcttgctaattggaacttcactactgcaaggcaggagcagggtctataactagtactactatgcataaaccttcagccctgggaggtacgaccatcacccgtcccatccatctcctctgctccaagaagcaaacaccaagaaacaaagagggagggagagagagagatagagggagagagtccttttctctcaccagctctcctttcaagctcagtacggtggccgctca

SEQ ID NO: 42119 - DNA, 1020 bp, Oryza sativa
ctgatttctttgcattaagagacagacgatagctattgtatccaccccgttgaccgatttgtgtcaactagtaaattaactacctaataagcttcctagaaggagatttattgctatagattcacctgtgtggatagaaatgtgacacatagaagtaaaaaagctaagctgccttgtcaattgaccgatctcttgcagggattgggatgagatatgattcaagctgatggatgctttacaaaagtcacttcatgtgcttgacatgcatgcgcgtgcagtcccattctgagaggtaattattttagcgcgttgattttgtcaacattatttactttgttttattgggtgtggttaactatgcatgttggtgattctttttaacagaaattctgctaatttattttggtgcatgcatcatgccctcttttcatgtgataattagtcaaattagttaatgtgatccattccttttgtgatggatccatcacaaacatggtatctgtcaaggtttgataagtatggtaaatgccaaaaaaaactctctgaataatttttagaattggccctgtagattttggaaaatgaactaattatatatgtcgaattattatgttactttctacgagttcatataaagagatcatccatatacggatatgcatttaattgccctcatcataggggacttgtataattaggagttgcatatgatagcattagatacatgagagcagacattcctaatgatctaaacaaaatctaattttatgtggacaatattaactagggtaaaattcacttttatctgttaaaacaacacagaagtatatagtcttaagaacagctcgaaagtagttgtgcaatagttttaccctttgccgacttaatagttttgttgattcgacgatgtgcttgtactgttctacggtggatgaaagaagtgtgagaagtaaaataatgtacgtgttgaaatgaaaataatttggacatgcattttgctgtatgcactggttaactaca

SEQ ID NO: 42120 - DNA, 1241 bp, Oryza sativa
tgcaccctaacctagtttttaagattcaaatgaccttttttttaaggtactaatgcctttatcagagaataattaatattggctttggttataatttttactcatgatgtgttaatgggatcgctcttaccattttgtaccttgctatgaattgaaatggtagcttcactatgatctgccttggaaaattcttttacgacatgatgttgctcaatttattttcagaaagatgacaatttcaaatgcatgcaaaccagaacgtactttggccattaacctaccgctatctcaaaaaaaaacatttatagtgtatatatactacattctggttgcatgttgtattgttgtctgtggtgcacacaaataaacaagagttgtcggtgcgattcttttgttaaacccttataaacccactgccactcagctgcatgctcgctcgtggtgaagcggcaaatgaaccaaatacgtactagacattgaaactgaatggcctgatgtcttataaattggtaattacttcttctagtctatcataaattaaaaaatatttgatgtttagaaccagataaacctccaactaataattttatattagaataaatttctaaatataatttcaagacaaatctatacatatcatttttttaagaaacacggtacaaaagcaggtgctcataacgcgtgcacacttactcctatggatgcacaaacgcacatcctacccctataagcatctccagaagaccgagtccacatatctaagattgacgaagtcaccacgggtgagcacatccggaagattaggccagtatatttgatattgacgaagtcaccaaagacgttgctgtcgacgtcgacgtcgtctatcactgaaagaataattagctgtgaatgtgagcacctgtgttaaatctaggatttgaattgggtgggctggttccactacaagaaacttaacgacttgagctacgttcatttcgccatttttcttatttttgaactaagcattgaagaaattaagagtcaaagttttaaaattggaccaaatatcgtccttaacattgaatatttattgtggatggagttcttatctcctttttattgaaaagatatcatttttttatggttgaaaaaatcttttaagcactataatatttagtttggatataaggatataatacatgcaaatccgtcttaaaaaaatacttcaacacaatagtactatagttttatattttata

SEQ ID NO: 42121 - DNA, 2041 bp, Oryza sativa
cccctcccccttactagctttacatccccttcttctcttactactacactatacaaatttgaattaaaattcaaatttgaaatgggtatgtaaactttttacttataaactttgggtctataaactaatatttgaattcaaattcaaatttaaatttgaaacaggtatgtaaactttttacctataaactttgggtctataaactaatatttgaatttaaattcaaatttgaatcgggcatgtaaacttttgacttataaactttgggtctataaactaaagtttataaactttagatgtatagaaatactatatatagaaaatatttgaattcaaattcaaatttgaacgaatataattcaaattcaaatttgaatcgggtatgtaaacttttgacttataaactttggatctataaactttaggtgtataaactttaggtgcatagaaatactatatatagaaaatatttgaattcaaattcaaatttgaatcggatatataaacttttggtctctaaattttagatgtataaacttgaggtgtataaattttaggtgcataaatttactaaaatagaaaagtaatgtggtgccaaaaaagaaaatcaggtttaggagggagggggattgatcgctagccctgtgcccaagcgatcgatccccgattagcacttccgcatcatcagatcggtaaaatttacgagtggtaattagagacgacacgtcggcgctgttgtttcagcctctcatccttctctacttgacagacgaatgcagcaggtacatgtgacttctgcatttgcacaatttcaaaaagtttattaattgcatgctactagttctgaaacttcgtccccaaatattcccctaataattttaaaatatagctatcccatactaccaatctgaaaagaaaaaaatagtacaaatatttctatgcatttttaatgaaatgtccaaatatatttaaaaaccacaaaagtatatttatattatgaaaaggaggtagtaatacttaccatttgcatatctgacgctgcacatcaaatgtaaggttatacggaatggtaattaggagctgatcaatttgttgccaaactcaaccctattttggctttatgaaatattaacaaggtgacaatttaaacgttataagaactgtcttcattatcaaagttcagtaattctaaaatctctcttataaaaacttgacaaagatggtaacctaaatagtcaaagttttttaggttttactaagtttataaaaaaaatagcaatatttacaacaataaattattttcactaaatttaatattaaatatgtgttgataatatgtttgttttgtattgcaaatgctagtatattttttaacaatttggtcaaacgtaaaaagtttgactaaaaaaagtcggacaactaaggaagtacaacctacacatttcaaccacactatgcagtaccaaattttagtaagactatcaacattcaacacgtggacgccattgtttcaacctcttattatagtggcatggatccaattaactttttctaatgacatccgattgctggtgctaggtggctgacttttgtgtttgccaaatttcaatgcactaattaattgcatgttagtactgatttactccctctggttctataataattgacgttttggacaatgttgaggttaaacttttataacgttgaccatcaataactttaaaaatatttagtttaaagaaactagaaaaacatatatagatttgtctttcaaaacactataataaaaataaacaagtatttatttattgtatatattataatagaaaaatagggtcaaaggtatattttgtagagcgtgtcattgtccaaagcgtcaattaaaataaaactggagggagtagtacactatttgcatgcccgtaagcaattgtttttaacctctcgtccttttctacatgatatacaagtaaaagtttgactttagagcttgtttggtttgataccaatttattaccctactaaaattttgttaacttca

SEQ ID NO: 42122 - DNA, 2282 bp, Oryza sativa
aatataaaaattttatgtggcctccttacacaatatggaagtttatatacaagttttaagttttttttttatatttattttttagaaaaaaaatatttttatggggtatatgagagagaatttgcttatacaagacataatagcacaaaaatatcttatgtagtgttatgaaagatgatttatattaaaaacaacaataaaaaggtattttatatagcatataacaaataagttatatcttttataaaaaatagaataaaaaagttgaaacttctatacaaatttccatgttgtgtaaggaggccacataaaagttttcatattttttgaaacaacaaattaggtaaatcaattgttaacactgtatgtccataagggtattttgggtatttttcaaaagaaggcctagcccaatagtgtattgtaaaacaattgataaagtcaacggtatattatagaaaacgacaatattgatggcaaatcgttgaactcgaaaaaactcagtggtataaaatagattctctctcttttttttacggaggaagtacatcataccagtcaaatagcaaaatataactacaacattatgattttttttaacggcgcgtagtcccttctactcgaggagcacaacatggttaggcagtgcatgatcttcgcataacactatggttagactatcatacttcaagctacaaacgtggagcggtttctttcggatgtcggagtcggtgaagacccagttcaaaaacagattataattgttggatgttacatgtatatataatcaatataacattaatttagcaatacaataggcaacactatattaattaatggataatatatcgtaataactatatacttaaatgttaaataacatgaatacatagtctccataatataaaaacgtagctacacaagtgtgagatgagacgataagagcctcagactaaggagtctaggttaattgataaatgatgtgatggctcgtgttgtatgtaaccagatctagcggttacgtgggttgacaattttaaattatccggcatatggcctatcggataacccggtagaaatatctaataatctggatcactggatctagagatactatattcgtattcctattcacaccattctatttgcatccgcattcatatccatcagatttctatacaactatactatatccgtgtttcagacatatttgaagggggagcggagcagatatttcttttagattttgacctttattcctagttatctccctaacattttttttcttttgcccgcgattgatcatcagagagtgataagtgactcaataataaaaaagattgatttggtttgctacatataccctattcccaaaaaaaaaagttctgcctacaaatatgaacataggttatgtccagatttatggttagaagttaggctttttctcttgacggggaagtaggaaatattagtaggtaggtaaggattatttgagtagagcagatagcaatcataccaaacttttgcgcttagcaaatggaataatgtcgaatcaactcaatttggtgatacatccaactaacacactctaccaagttctggtaatgcaaaaaactattcaagtatggacacttcaaagatttgatagcaacgcgatcgagttaaaccaaactaaaccttttgacatgtgcaaagtactagaataacattatatgtgttttggaacggagagaaactaattaccaaatcttttaacgacaattcattatttgcttaacaaattgcctagctccttttggccccaagtgaaacattgctttctacatgcgtgcaccctgattccaattattaacgggaccaatagactgttactcagttcatcttttcaaggcattttcatctattcctgagcaagtactatgattatagtaaatatatacacactcatcgatgcaagttagagggatacgtgtctctgacacgtgcacccatgagagtgggtcctacctaacagggatggatgtccctttaactttacgtaaaaagaactacttccatttacattatgagtgttggtagccctaaaattttaaaaataattttaggggcggagtttagaatggagcagtggagtggtccaaactctactctatcattctagtttattttaagattactctagcttgttccacttcgcttttagatgaaattaaaattgtttggttcagttttagctagaggagagatgaagctaaaggagaagcttggccaaataaatccta

SEQ ID NO: 42123 - DNA, 4290 bp, Oryza sativa
aattaaaaaataatctgatcagtatatgctcaagctatttcgtactggtcagttaaataattagtatgtagctgcaggtctctattaaccccaattagttaagaataattactagtacttcacttgtggacttgtcgctgtgcgtgttcaacaacttttggtcgattgatgcttccttgatcctctagtaaattgcacatgtcttcttcaatcatatatagcttaaattgtactagtgttaagatataattaattaccgggaacttgctaatgacttgctgagtgttttcttgtccaatcctaggaaagtttctgccctatataatactacatgcttgggttacagagtaattaagcttatcgatgacgaaaggttaatttattctatacacgcagtcaagtgaattctgaattaaacaggggacaatgtacctttcgtaaaatcttgtttaggtgatatcatacaaactaatatatacaatcattacacattcgtgcacatttagcgtaaatttatgtgccttcccacaatctataggatatgatcggaatatttgatgtatttggaattttcgagcttgtgtagagaagaccatatatggcgttcacgaaaaaagatgtgttcgggaaagaccatatatggttgtagatgtagtaaatatgcgcgttatacttatttgtcgaaagatgtggtctgcctattaatttttctagaattaacgacaaattaccatttaacaaaaagatttaacaacttgacgttaaaatgctttctctatcgacagacatctgacgcgaaatctggatcatggtgtaatcaacgtaagcataaatttgagatcaaattaagttaaatcgatcagagagtgtatttcaagatatgtatttacagtcgcgttgaaatatttacagttgatggagcatatttatactactttgagctagggacgtatttacagtacagtagatcagagatccagtgggcagggtgcaattatcgcctctgttttagtaatatggtagcgtaagttagaaaaattaatggtcgattagccaatgaaatcttgatcaagatatagtgaaaagacgatgaaaaagaaaatattggagaggagtatatttgtacaacttgtgtagcttattagctaatgaactaccaataatgctaattagatattgagcatatatgaaagcacatattgactaagctagtggcgtgttaataattaaggttgacatcgtcttgaccaggcgagcataccgggttcatttccaattaattagtgtgacatgtctacaagtgtagtaccattaacatatatacaatctcccctcgaggaaaaaaaactttataatctatacattagaggaggtcaaaaatagttgtgttcacattgagtgaagtctatatacaaaattagttagcctgtgtacaatgcattctgaattttattgcctccaggagtgctatttaatttagctcactgtctgtttgtatgctaccaaacttggccacataatttagaggttgcagttttctttccagtaatgactttgtgcagtgtcatgtgtctcattatcttgggtccaacttgtgctagatagcttattatttagaatcattcgagtggctaaacttggtacacatatataactagcaatgcaactagtttaattttaatatttggtgaagcatgatgtattaatgaataaatgatcgagatgtatatatgtgagagaatattccagtcaaatatgcaagtcaacttaagaacattcatgcggatgtcactgtttttttcttgagcatataagaatccattcaaactaattaggttatctaatcatccatatataatatattatatatatgcactgaaaataagatttgttcgtttctgttgcattccaagtcgatcagggactctagctattgacttcgatcgtcaagtactccatatacacttgatgaagtcaatgaccaagtaaaagaccattttttaaaaaggtaaagaccttgcaagacgtgtctacatcgatactggtattatttgataggtgccttgcttagaactaatcataagctttgttaaccaaaacaataaaatgagattaattaattgttaattaacacaaagattaactgtaagaataaattgcacacaaataacggagcatgttgtttcattaaccttatgtatgaaaaaaaataaaggtcaaacttagtgattactcccttcggttccattttaattgacgttttagataatgacacggtctacaaaatatatttttaaccttatttttctattataatatatataataaataaatatatgtttacttttattatagcgttttgaaagacaaatctatatatgttgttctagttcctttacgctaaatattttttaaagttattgatggtcaaaattataaaagtttgatctccatcttatccaaaacgttaattaatatggaaccggagggagtaattatgagttgcttagctagctatatgttgtacatacagacatgtgctcatggttcacattgaggattatttgtagcaactaatatagattctcctatctctccacttggagtgtacatggaatcaacaaaaccaattagtacctactaaagatcatgtcacgaaaaggtagggcacatttcgacatagcatcatgatcagaaaatatacattttggttcatagatagattgagctactgcatgcaacgatgcgtatctaaccaaactattttttttctgagataaagcctggaccatgcattagcggttagccagctgcctgcacataggctctctcctactcaggttcttgtcggtccacaggtccatctaaaaaaacactatggttcatgttccatagctagctaattaaagattcacattgtccatgatccaagtaattccgtttaaaagaatgcacgccaatatattagaagaaaatagagttttagttatacgacataaccgactaggtggccattgctacaggacaagaaaacagagttttagttatatgacacaaccggccaggtggccattatattgctacaggaagctaaacttgaaaaaactgctcctacaaaggaggggaggggggggggcttagtcctactagactcccaaaagccgtgatgcctgcagaagaccacattcagtcttctgcagctaattattttcttgtaactagctagggaccatgcatatattttttttaaaaaaaagagggcaaaactttgcctcgtatatattgatagagaagaggaccatgcatatatgcgcgcatacgcatggttatattaattactccctccgtaccaaaataaatcttcgagtatgataaatctggacatacatagatatgtcacatcctgtacgatgttggtttattttgagacaggtggagtatgtgtgttcatcaatatcattcatacatttagattgtttgtttggaatctgatcccagatatgctgtgatcaaccgcgatttaattctgaaaacgtgtacatgcatgtcgccttcaaattttcaggcaaatcatgaaaattaattcatttcatacagtttgatccggttgttgcattttgacttgaatatatggcttgcccaccagttagagaagtatctatgtatatacttctttaatatatagttttaaaaattttgtcttaacgtagctaatcatggtaggcacgtacacaccgactttaagtaaattgctcccacttactcaaggtttggttgtgtgtaattaatcatgcatgcaaagcgtgtattatatttgcattccttaattatcatcgaatatacttaacttatatacatatttgtgtcaattaggacacttaattacgatcatggcatgcacttatgcataattagtctgctagtgatcagctcatcgatcttagttggtttctgaaacgtagtatatacaccacctctatctcaagaaaaaaaaacgtacagagtactagctatatatacatatcaaggtatatctcgttctggtactattgagaaacaatttttgaggtattctctgcttaattaaggggccatatatatgtgtacagaaaacatatatagtgtaattatttgcacgatatgtttctttaaagagaaaaaaaatcctccatgcaaatcattacatcatattgacaatgcatggatatatcgatatgatatatcatgcagctacaatcaattcctaaatatctgtcgaaagactagtgttaacaaccaaatatttcatga

SEQ ID NO: 42124 - DNA, 3640 bp, Oryza sativa
tccttcgtatcacacctgtaaacgctttatagataagtgtcaacctaactttataaatttgggggactaatacatcaggaattggtaaagaaaagacattctagtcttttaattttatattagtatgtgtatatactagtacaacaattaagttaactttacaagcgctctcaaggaactacaggaatgcttaaataaatgtattatggtatttgaattcgtctcgaataatacttaataaaattggcctaatattggatattagatttataaaaattgctaatcttgtgtgcttaagagaaactgcctagcttgtaacggacgaagtgacgatcgttgtaatcaatatgtcccttgcaacaacgtggggcctgtgtggtagggagagaagcgtatatatatatgcatatggtctggcagctaaggtagtaccgccgtcataaaatgctataacctaggacgagatttgaccgatctgaatagaactttgggtatgtttagttcatgctaaaattgaaagtttgattaaaattagaacaatgtgatggaaaagttagaagtttgtgtgtaggaaagttttgatgtgatggaaaagttaaaaatttgaagaaaaagttgggaactaaacaaagcctttgtccaatttcattgttttagaagggtcaaatctcattctaatcattctaggttgttatattttagaactggagaagcagctaattaagggtgtccccacacttttgcagtgtcaaagaccaaagcaaagtgaccaatcaaaacacactttataactacatgcctgatcgatgcataaatatatcagcagccatgtctcatatcttgcttaaggtatatgggtttcacctgcaacttcctgcaaaattccaaagaaaaaaataaagatgatttaatttatatataccaactaagggctatggtagtagcatcatgtgtataggaaaatataaagaaaatcaagtagctagtagtatacatagtactatttaggagccaaataagctgttcctaaaatttgaatttttaattttaattttggaattgattttgtgagatattatcatagtttatttttcagcattacatttaaaccgcgataacatagatataaaagttttagccgcagataattagtgttctgcttatatgccatttacggcttatcagcagtagcctgtagctaggccaaacaatcaacagaagaaacatgagaatatttagtgtgtataaaagctatttttatttgcttaatgaaatcttcattatctgaaaagaaaaaacagatatgccattcttggcgaatgtaagtgttgctttaatttggatttataaattttgatatgcatggctacttgtacctcgtctggattcgtcctagctatctagaaagctagttggtacggcttaattcagttgagcttgcttttacctttaatttgctagttatttatctaagaaaggatgtgagctttcatggaaggcctcacgtttgtctccatctttctgccaaactccaagctatacgtggaagaagagaagttaataaaggtggtggctcaaaaggagatttgcaaaaggatcacttgggatatggtattttacacaggacataaagtattatgtataagtgataatactttttttaatatatgacaccattgacattttatctatatttgacattcgttttattcaaattttttatgcaaataaaaattattcttaaaaaacatttgatgataaataaagtcattataattacatatttgtttataagacgaatggtcgtcagatgtatcttacaaaatcaacatcgctatacattaaaaaaacagagagagtaatatataaattaatagtcatacatagagggtcttgatcgtactccgtaggagataagcctcagatatccatgggtgctctacaactcaattgaaatcttgggatcagctttttctctgtgtcgatcggagcgcaaaatattaattgtaccgcgtgcatttttttcttagcaatgcaatagagatagcaaaacaatattctacaaaaataagtacatgttttggccctcttctcttgtctcagactggatttaaacttttaaatacgaaacattattcactttaacaaaccgtagacctaaatgatgtggttttgtcggagatggtgcagatatattgtagtgtgtttggctggaaaagagtatttattaattctctatttgctaataatgctttcgtggtgtagtaaagcaagtgctaaccaagtgcaacgtcatgggtaacaatttttttttccttggaaataatcaaataagatgttggatttctaataaggtgacgacaggctggattcaattccattaacgaaaaaatttggtgacgatcgacatgattaactttagcgcctataatacgacatttgcttgccaaattgcaatgtatgatggatacgattaatgtaagtaattaagcacttatatagagacaaattgctctttaatttctagcattcccaaatatataaatatccttatacacacttgggaagatgtacagggggacacaattccacaaagaattactagttacgcaatatatgtttcatggaaactaaaagggctaataattaataatgtcattgagatcagcattcccccgacaggcttacataagtattactgtttattattgttcagacaacttatagttgggttgttgagaattaagcactaattagtcttttgaatggtgaaaacttgccaaggttaaaaacaaatggttttagacttaatagtcccctaacctcatttgctagctaagccaaagcttgttgttcctcttggatgctagctaggttgtcaactggcagcaacactggaagttggaagatgacttcatgtactatgaaacatgaaaaaaaaattgacatctagctggctacctcatgatgacaagtgacaacaccttgttccaaggttatcacaagcaaataacctagctaatggcatatgcgccaattgagataaaatgctagattcagcgccaatttcacatggttttcggaggaatttttcagaaaagcaactcaatttctgcaggaagatgaaattttagtcaagatgtaataggtaaagttcctataccattcttgtgttttctttgttgttttgtccgagtgcactttgcacagaagctaaatgttttttatttacttaatgaaattaatgtccactatctacatgaggaagatgaaaattttcccgacagctcaactgtagccttcagaaaatgacccaactaaattcaagcacccagaggcaactgtgcacacaccatagacacatcatcagatatatggtattaattgttttgtttttgagatgcagaggcaagaagaaaagcatcagtgctgacagctggtacatgttgcccattgtatgattgtatcctgatcagtgtgatgacttttcaagttttgcccagttgagttttctaatccaaaggctgactcagatgcacttactgaatgtcatttttctcttaagaaaattattttcctgtcccctgctgatgtgcacgcagactgcaaatcaataggtttgctgattgggtatatataa

SEQ ID NO: 42125 - DNA, 667 bp, Oryza sativa
tgaatagcaatgttgatattgaaatgagcttattcgccattagcaacaacctcagggtcaaaatctttcacctctcttagaagtgttgacatgttatggcacacgtggaaaccacattggtctccgatctgttgtgcgcatgcgaacttggtgtcatgataaagttcgtccttgccctccttgtgcctaccacccttttgcacatatgggccccaagccatatttaaggccttggtgatttcactgaaatcataatctttggacttattggagttaaggtaggtaaccctactccacttaggtacgatgactaggagaatccaatgtcacctgcgcagtggttatgtagcgttagtactaagaaccttaacttcaaaaacaatatacacgaagggtattgtcttcttactcttggttgtgtgcgcacatgatgtactccttgtcttgatgggcccataaacaccggttgacatagtcaaccacctcagtgaagctctatcgtaaattaacctcgttcaccatggatggatcaagaaacccaacctgattaccaaggcgacgactctcgatccaacacaaccttaaaacatttatgtattagaactaatttaattaggagatatagtccaatcatatcacaagtatagaaggtatgcacttacaagga

SEQ ID NO: 42126 - DNA, 695 bp, Oryza sativa
agatgagcacattgcagtgttggggaacttcaactttttttccataatcaaagatttaaacaaccacatttcgaaatacttcaataggaacttgtccatctcacttgttgggccgcatgctattagctctacttactatggctgaaaaagtttgaaatatactaacgggcaggactatcgatgtctgcatattttgtacccacgaacattaccaacacattgcagcttacattttttttcatgctttctgaagtaacacgcatttttcactttttacagtcgtagtgaatctgctaatgagttctttgcttacacataagaagacccgaaaataattgaaggatcagtgtatggcgtcaaaacagaaagtaataatacagattgatcctaggtgggctcaggccctcccagtttgtggaagtgattccctgcattatggacggagcagcaagacagaagggtcaaggaaggaggaacagcacgcttggcagaagtgattccctgcattacgtcaactgccgcagcagctctacccgtggcagagcagctggcaaccatagcgagcgaggccagagcagcaaacgccatggtcggtcgctcgccggtctgttctcgtgccgcaacgcgtcctcgtctactgtgttctatggcgccgagcagacagtcttcactgctctcttaggaggggtgcagga

SEQ ID NO: 42127 - DNA, 669 bp, Oryza sativa
aagatgcatgtgtgtatgacaggtggaccagatataaattacatagtatatgtttataagtaactattgtaagaattagctattaaattaactatatatgatttatatatgatttgtagccagcacttaactatactattaatcataagagatttcttaacaaattatctatctgattgattcagccaatccaaagtccagtgcaattaaaatgcatgctattcaatagagttggttttacagttgtctgatacgtagtacttgatccctactatgtcactgaaaaatgaatctaggctgtgtttagttccatgctaaaattgaaagtttgactaaaattagaagtttgaagaaaaatgttgaagtttacgtatatagaaaagttttaatgtgatagaaaagttggaaattcgaagaaaaagttgggaactaaacaaggtgtaggattggatgtgacgcatcctatcgctacgaatttggatagatgtatatccagattcgtagtaatagtatgtgtcacatccagtattatgctgattttttatgattttttatgggacaggggagtatgttccacgttacattgttgtattgcaactgatagccattttgtctgatatatcgaggagaaacactcaggggtcttccggcttcacaagatgttgggtt

SEQ ID NO: 42128 - DNA, 721 bp, Oryza sativa
atagctagtacccatgcatggaaatacgtacggtatagtcgttgatttttacagattaaagtttaaccacaataatttcttataaactatattcttcattgctataaaatcaatattacttgaaaacactttaaaatagtatgaatctatcagtgtaaagtttataaatcaaatatacttgtaattttagtttggttagaaactaaggaaactaaggaaatacttccggatcaacaaataaatgacattttggaaatgtgtgatcaatgcgcttaaactttgacagtcaatttctctttaaatatttcaattcaccttttaaaagtggtatatggttaaatttgccttcaaaacatgttttaaaatattataattttgctatatttttatagggtttatactagtaaccaaaaacaagtggcttggtgaaccatcacttgttgaaccatgttgctttccaaaacgtcacttatttgtgctcataggaagtagtgataagaaaattttaatcaaaagagatgatatagtttctcaaatgcagtgctatatttttcaaagttattttaggaagaggtaaactaaagaacatacctagcgcatgtacacacacacacacaatatatatatatatatatatatatatatatatatatatatatatatatatatatatatatatatatatatatatacgcacacgtgaaaacaacgggctgcagga

SEQ ID NO: 42129 - DNA, 708 bp, Oryza sativa
acagacatgaaggaaacacactcatgcaagctcagctcagtaacacagtaacagatccccgttttacagtggttggggaagacagcaagagacccaacaaagggcaaagagtgtgtgtgtatgtgagggagggagaggggccgggctaacctaagatgcgagccagatctggcaaacgcatagcgaaacaaccttgcatgccaaatatgggtcatctgttagcctcttccatgctccatttttgaccaagcaataacttgatgaaccccaccaccatggccaacaacctgcacaaggagctttagctgaaaaacaagagagcaaagagagaagtgaagagaagagatggggtagaagaagaaagagagagaagatccggttaatcctgttgatgaatcaccacagtgctccagtgtactggcagcatctccatgcttcagctcccaacgcaaggagtagtactaccactgcaagagtaggagaaataagtttggggataaggaaaacacgtagcaaaaccaatcatttatccccagtaccacatagccgggactaaccattatcaccagcatccgtatcactctcctcggtagtagttccggcgacagcacggctgaaaaagattgagaaaaacaggggtaaacatatgcatttacgcacatctaagagataaggaggtgacagggtaaagtgtgggagaaaagacag

SEQ ID NO: 42130 - DNA, 680 bp, Oryza sativa
acaacttttcgttttttatatttgcaaaaaaaatttggataagacgagtggtcaaacgttgcaagcaaaaactaaaaatcccttatatcgtgggacggagggagtaaagccaagtgatgatcaatttgatcatgcagcacaatgcaggacagtgacaacacatggcccacatcttggaaaaaatgcccgccccaaaactaccttgtttacccaaatttaaatttcacaacttaattttagcttgagtttgaggtttcctcgtaatttattttctatcgtttgcttttaaattattaagaatgtatataaagttttattcataaattatgctttgttattgatgaaacagcgtaagcgaaacaatgattgtttaagctcttctatccttctttgagaaattcagcccatcaagatcgaaacggcacgtcaatttgtttgctggattgttcacacaggccattgctatgccaattgatgggattttacaactcagcgtcaaattttttagaaccttttgcattttattcgggattttacaactcagcgtcgaattttttagaaccttttgcattttattcatatagagaactctgctctaatactctatctgcaatacaggcgaacaatagataaacagcaatatcaaagagaaatgagtagatattgttccatacccgacc

SEQ ID NO: 42131 - DNA, 1201 bp, Oryza sativa
caaatagaaacaaaatgattcattcaaatattataaataaatcatagatccaaatccataaatttataaagctaaaaatacaaagctctaataaaccttaaatataaaactatcctaaacaccccctctaactactcacgagctgcttgtcggaatcttgaaaatccttgaaacaaaaaaaagccactcctccgtttcatattataagttgttgtaaactttttcataaccaaatttatggaaaaaaatagcaacatctttaacaccaaactagtttttattaaaactgaaatttaatatattttgacagtttatttgttttgtgttgaaatgttgctatattttctataaatttaatcaaacttgaagaagtttaactaaggaaaaaaatcaaaataaattataatataaaacagagggagtaacttataactatatatctagacatagactttgttcagataatagttactccctccgttttaaaatataagagattttgaagggatgtgacacatctagagctagaatatgtcacaaacctttaaaatttcttataggacggagggagttcgagttagcttaggtattgtttagttgggaaaaaaatttggggttggttgtcacatcagatatacggatacacatttgaagtaataaagtaataataaaacaaatttcactagaaaaccgcgaaatgaatttattaaacctaattaatcatcattagcaaatgtttactgtagcatcacattgtcaaatcatggtgcaattagtcttataagattcgtctcgcaatttatatgcaaactgtgtaattggtttttttatctatatttaatactttatatatgtgtgtaaacattcgatgtgatgagtgaaaaaaatttatttcgagaagtaaacagcccctttattttgagacggagcgaatagagcacaagtcctcgcggagggtagtagcggagttcaccgttacatcgtgccaagctgaccctgcgaccacaaaagcaggccaaaagcagtggactcgccaccccaccatcaccacccaacccaacccaacctcctctcctatcgtcatccgctcttcttcccctcttccccactcgcaccaaccccaacccccccaaccgccgccgccgccgccgacgacccaccggtcgccgcgtcgccggagtcgcgtactggagaggggggc

SEQ ID NO: 42132 - DNA, 867 bp, Oryza sativa
cttcaactatacagactagagtctgaacttttgttttattactttttggaaaaggctatatgagtggcttgctttttctcgtgaagaaaaaaatactatctataactattctttttctaattactaagaaatatgatcaaaactagtcgtgatatataaccagaaagttcttcgtttgtcccagcttctcctattgtttatccagattcagcggcgagtttatacaattatacctaaactagagaaaatgttcgtgcgttgtaacgggtgaaggttattttgatcttattattattattattatattgtttacttaagataaatttcgttgtgttaaattcttttggatatatattttattagaaaatcatgagctataattaggtgtccgatcgtctcaagttagtatgtgagtttttaaagagatttcttatacgatttcttctgtatttctaaaaccgaacgaacttaaaaaccgactcaaatacggatttgtatttccaaaagcgaacggacttaaaactcatatacggatgatgtaccaaaatactagcaaaaacatctttaattttttataataatagagattaagaaaccatatgcaactagtactcttggactatgtgtcattctttaatttcatcagaactaatagaaacggtttgcatgtctacacttgagctctttctctacaaaattattttgatataaaattaatggctaaagttccaaaagtttgatcgaatattgtctcaaaagttaaaaatttgtgaccagaggtagtaattgttctagatcacatgcaaatctatccaatcctacacaaaattcctttttctaagctaggttactcatcaacagatacgg

SEQ ID NO: 42133 - DNA, 941 bp, Oryza sativa
atgtatgagccataattccatatataggttctaatttttgtgatccatacaagtcctaatttgtgcgatttatacagccacttaaggcaagaaagaacacgcacaagagaaaatggtggttcttctccttgaatcgagcgacatgcattgacccgctgaactatatatacacttacataaaagtgtataaaaccgttagagattaatcatccaaatgatacaaaaaaattatcatcataccatgaaactacttgtacatttaatggtcatatgtactatttttacttttgcaaagccatatgttactattgtcatattaacatatgccgtccccttaataatacatgccaatctatatatctctccttaatcatcttgtctttccttaaaaaaacgtatgatcaactttttctcaattattttggtataaaaggcatactatatatacttagacgcaataagtataaataagaatgcacgtttgagcatactgcgagtagaaaatggaataatacagtgaatatttagataatgaaaattgattacatgtccggccaagaaataatacaattaattcggaagcacccataaacctcgtaaaacactagtgacactgatactaaaatattaactttagtatatgaagtcgtgcatcttgaatttcaccatgcttattgaaatgttttttcctcagcaaattaacttatgttagggaactactccgtggtttgagaaggggaaaaggtttgacaagaataaaagaaagttcttgttgacatgacagtttaatttccccaaacgatcgcgtccacttggcgtgttgcgagtcgggtggaaagtgaaggtggagatgatggggattcaattagattgacgcgatattttggaccattcgaaaagggtactccctccgtcccataatataagggattttgagtttt

SEQ ID NO: 42134 - DNA, 2093 bp, Oryza sativa
ccagggagacagtatatctttagtggatgacattgacaggcatggcaggcgcgtcagaaccgtagggttaaataaagacggtgagcgaggttagagttgaggccgtcaaatctaaaatggttagaaggtggagggtgatggtggtaacttggcgacgagaccgccataacaagaaaataatggtcgtgtaggggaacctcgccgcagtttggaggaggagaggaggtgtggatgggaaagggaagggggcaaattccaatagaacaagtctcaccccaacgaggcagataacgcaccatgcttgttagaaatcaagtggcgcatgcattgtgggacagaaaagaagaggggaaatgttactgtagctgttcaaatttgcgcaatttatatatgctgggaaaaactaactttaagtttgaatggcgtactgaggaatggatagtctcaataattagtatgcatattaataggagttaggagtaatatctacagaatcccttttgtttgtatactctaaattcgtgcacatgccctactggcatgctcatttaattccaattaaatttatatatataatattaggaataattttaggaagatagcccacttgtcttcttggcaatcataagggcattaataaggggtgaaagtttggttgaggtaagattaaacaaaaattaaatgaattgcactgcaattttgaacttgagaattagctacaggagtacattttaggatgggagtagtagctatttgttctatggtgcatttgcttgggggagttgagggcatgcgagtttaaagggataaagttattattttcttgcttagttttagagaagaataaattgcattagcggtacatgaacatgtcaagtaggtgaaatttagtgtatcaacttgtaaaatactcattttggtttatgaacttgtctgatacagtaaactaaggctaaaatggcacggtaagacccatttttatatggtgaacattataaattataaattagtagatgatgtgcgtgcttacagtatgtaggttatatttgtaaacttagtttccactttatctttctttgtttctttcccttacactattacttggtttttgtatgcaatcattacaccttattatatgtttatccttattagacacatgttcacagtgagtttaaatcaacaaaattaatcttgccatgtgattttgatgttcttcacacacaccaaacaagtttgtgcatcaaaacgagcattttacaagtccatgcatgcaatttactcttttgagaattaaggagagagcctcctactcccttcatacttatcgtagtgaacaatgctattgttaaattttaaaaactttatctataatggatttgccggctcagttttcgaagatgctcataggggtagggtttacgtacgtgcgttcatagaggtgaatgtgcgtgcgttgtgagtgtctgcgttgtactgtgtaattttaaaaaaataacatctaaaatatttatcttaaaattataaaaactagtattaaaattaattcaataaaatcatatatttattattttttatatgttgtaataaaaaatggtcaaaataatttttgaagaccaacttcttatctaaaccgataagtattatcaactcggaaggaacactttttaatatctagataatgggtgagaggtgagagggaatgccctcgatacatcttacaaatctcagttcttacttgaaatctattacatagaactctcaataattaccaatacttcagtcaaactagaggatgggacttaaaaaaaaatcaaactcatatcaattttaccaccggtaatttctctagactcctaatattctcatccaaagtcgatactccgtttaggtttgtttggcaaatgggataagaaaatagtatctcctgatattctcatctaaaatcatagccatctattcttcacacctcattcaatcctagccattcatccactttctttttttttttctgatcccacatcttataatccatttgtcaaacgtaccctctgttcgaaaatgcaaaaactagccgagatttgagaaaaaaaaac

SEQ ID NO: 42135 - DNA, 1852 bp, Oryza sativa
tcacccatcaccccccccccccccgcgctatcagaggctaagtgtgcgccttcattcttgcagaaataatgaacaagaaaggacgttttcacgtcaaatagactcatgaacttagctagataatttattgtgatgtaaaaaaatgatgtttttataatttcttgtgatgtaaaaaaatatgtttttatggagtgcaatgtaatttactttcatatgtgcaatatttatggtagtttactaaattgtcatccaatttgatcaactacaatttacgttgtactattcatctgttttctccttttttttccttattgacaggttgtggaggttgaggacattatggctttaatccatttggtaagtatatatgcggttctatgagcaacgaccgaaattgtggctttcaaggggtgtgaatttgctgtgcaaaattgtggcatttgaactgcatatgtgaatgatgtcaatttttgatatggatctgtgttgttggggatctgtgatgtttgagatggatctgtgatgttatattgaggggatgactagaatatatctgtgttttagagggcatggctagcaaatcctgaggctagccaatatttagcattttttttctggaattaactcatcagtgacgggttggaacaaaaatccgtcaaaggtaacctcacctgtgacggactagcaaataaaggcccgtcagaggtgacctacctgtgacgggcctttacttttggggttgtcacaggggtcgtcacaggtagatcacctgtgacagcttctaactacggagaccataacctctgatggcctttatttaaagggccgtcagagatgagtcacctgtgacgggtcccaactcgtcctaggctagcggagacctacacctctgacggccttctagtaacttgcccgttagaggtgggtgtcacctgtgacggccggccactcgtcaaaggtgattgaactcaccagtgaccacttatcattgaccatgcgtgaagccgtcaaagatgagggtttaggcccgtcacaggtgaccttggccagtgtagtgttagttagtactactcatgcatgtaattggcataatgctggatttggtgctgaaatttcgtgccttgttcatcaggatggacagtgtcatatctgaagttgatgtttctcttatcctgattagccctgagctttcccagagaagactcaatgtgaagtgtgaactgctggtataaatgcattcttttcaggagtttgttagcctcacttgattaagctaatgcttcaagtagattctaggagtgttctgctgctccaattgattaataccccatgatttggatctgatgagtcaactagtttcagcagtagtggctgcatatatataataagcacgcttgttgattactcatgcatattgtcatttcaggtgctatagaactttgtactacttaacaatggagggcacactcctagtagatcaaaatttgatgacctaatgcatgatatatggatttagacatgggaataatttggggacaagtgtagttgacagtcatgctctttaggattctagtgtgttgattactactctgaacatgtagtagtgagcctatcccaacacacatccataaaaatattcagattgacattgactcaaaatgcatgcatgtatatacatacaaaatgatacataatttggaaagcactaatgatggatctaggggttatgtcgggctccaataattcttttctttttgtgcagattcaactcgtcttcagaggaaaccagctaccttgcagctgtttctgatgacaagcttagctactactactgtcctctactgtactagtg

SEQ ID NO: 42136 - DNA, 706 bp, Oryza sativa
attcctgcagcctaaccggtggctggtgttccacaacgggagtaaagaagtggacaagaattagtggtcattacgctgtcctaggggaaatttttaagccgtaatgacgcagcatataccaaattggcagcacctctaatcatttagtgcagcatatctttaggtcctaatgccccatcaggaaacatgtgacaaatttgatgatggcatgcggctcagcaacagttcaacaagataaacaagggattaaagcaaacaagccaatggcagaattgacgaatcgaattactgccgcagcactacacaaaggtcatgttcacagcctgcccagaggctgaagattgaacttggtactcttcaggagatagattataggacgccgttcttttcctcccacatatagcagtacaaacgatcacatgtacatttcccaaacccctaaacgcaacgatttttttcaaaaagaattatatataaggttaaatattgtttaaaaaatatgttttcaaccttgcaatagttaattcattcatttataatcttgtaaatattatcacaaaattagataatctatcatctattcggagcaaaataactgtgcagtggtatttttgcgagtaaatcgtacttcggactacaaattcctaccaaagtttcactttgtaccactctcacaatgtttttttttactttacactaggtattg

SEQ ID NO: 42137 - DNA, 611 bp, Oryza sativa
cacccgtacgacctctagcgcagccaaccaacatcccgcccaacctcgccagcgaccaatatcgccggtcagttgcaaccaatgcctttgctgtactaacacgattgaataaagcattgacgatctgaattgaccacccctctgcctgattccatcgcttgtcgtatgtacgccttctctatagcatgtccatcacgcaattacctcatcaacaccttcaaaagctgcctctaggaaccacccgctccgacttccgattaaacaccatcaatctagtcgcgagccgaagccgacaagttgcatgccgtcttctcagccgcgaacgacccgagtgctatgtttagccgtctccctgtcgaacgcaactcatcgaaaggcccaggccaccccgcccagagtgatcgatccacccaccgagaacgccgatcgcctccagcttcaatcaacccgagcgtgcggccgcacgtctccctattgagagtagctcaccggaaagtccgagccacccgctcgaagtgtccgacccaccaattggatcaccaatcgcttctgccgccatcaaccagagcaccacgtctagtcatctccctgttgaaagcagccatcgaacg

SEQ ID NO: 42138 - DNA, 4076 bp, Oryza sativa
aaatagcagacagtttgccgtttcgcctatttgaagatatgacaaaccaaattcagatttcttctcagtatgatagagttaagtcccagtactcacctgcgcagatgtcaactgaacttttctgaaacaaaaaggtgcttgctttttttctctagagatgttgcggttctttgaaatgtacaaaagtacgtaaactttgatattcttctacaaatgtaagcttcttagacatcacttggcaattatctttacctttttttttccttgatgattcaagcatgtcattcctatggtgctatactgctatccgaatctctgtccgctggaactatacgattccaactagactagtttcattgttgcgctttctttacatttgatggaggctataaaatttgaattcaagactgaaaacctagtctaaatgctggcttgttggccgttgtaacaaatgcacttaccttctgattaacagtgctaaatatttatctgtgactgcagagaagtgcaagcatctggatctctgttttgcttatgattgtctaggactaacgagtcatgtgggcaagtcagttctccacgttatcactactttgctttggcttaatataatgctaatccaattccccaacacgagagagaagctaagttgtcattagctgccaataaccacaacggacatagttcctctcctagttcattgtacttgtacactgttcagagttcagcttaactttgtcgttgctgcaaaacaattgcttgcttttggacgatgcatgaaccttgagaaacgcattcgtgaagatggctgttagctctatctttgatgcattggaggacttcacatgagtttgatcagcacccttgtcttatctgtaatatcaaaaggagagtttaatttcttcccaaaaaaatagtttaattaaggaaaaacacatttacataataatattgtgtctactttcagtaatcacaatcttagctacaacaaagagttatattttacagccataaattctagccctactgagaaagtgagaaggtgtgaacatcaacatcaaggcccttacgagtgatgatatattttcttaattgtaaactactaatgctcaacttacatttccggctggtatatgtcactttacagatcagtatggtctatctcaaactttcttttggtggtcattttcatgctttagtccatcatggaatgaacctttcatgttttttttatgcatatcctctcatggcgctagccagagattgcagaaaagcattaatgctcagccattgtcaggtcaacccccataatcacccatggcccaaagtcaacacggtgctatattagcagagctgcagaggcactcaaggagattggacagagaagtccactatgttgccacctgccactgccataccaatccctgatggtccactgtcacagctttgggttgacttgttgggtgatttcaaagggcagaatatgaaaaaaggaaaaggttatgagctaatgcaaggattagttcaacgcttaaataaatgatctcttgaaaaaggtagctgctatggagggagaagccattacccaaccatgatccagaccaggccatgagttggtcatgacaagaagatacacttgacaaaggaaaaggctaaccttagggatgatgtatctaattacaatttacaaattatctgatcacgacataacactacaacaacagtgacacagtgtacctcagctcagtagccgttgactctagtgaacgagctctgcatgctttttcttcgaataagaaaaaggaaaaggagagatgttcattcttttcagttttttaatcataatgttaactgttaagctaggactccataagctgtttggatttgatttgcctggttgaccagatcaccagtgagagattggcgcagcaaccggcggattttgatctcaggtttgtggccggaactgcgaggagcaccagccggagaatgttgatctggtcgactagctttggtttccactagccgaactctgaaagtcagagaaaaaagagagacagtttatatgcgttttcagacttcagagttgtccttaccgtctctccttctcatacattagaaaggggaaaaatgtaaattcagtagtcggatttgcttcaagattcagaatgagacaggtgtctgatgaaatgggataacctgaaagtgaagcagtgaccatgatgatgcatgaacctcagctatgataaactctgcacctgcagattggaacagtgaacctgccatcatgcgcgtaccatgctgctgatcttaacaattatcatggtcctggacaaatacacgcatatcaacgtcgatcgagagccatcagccatccatgtcggcagcgcataaattttactgtcattgtcagtcaccatgccggcagagcaaggcctcgcatggttcctgacaaggcgatcgatcgatctattgcatgcgattcttgttgcttcgtgttgggcctgaatatacttggtatgccaggcccaatagctcaggacctcgcgaactgactgagctgaaaagcaaagtctattttactttccttctttgttgttccgattgaatcgcctccctcaatactaaaaaggggtataatgcctcttgcatctctgaaaatcgatacaaatcgactcattggatagtttaaaaagcaatttctgctcacgtgatatgttaacgtgctaagtcagtacgtgagacccacacgtttgttccaactaaaaactacacgaatccacgaagaaccaaaagtagtatttcttttcgataagccaaaaagggatcggatttgctatactactttttttttacgcattttttttaaaaaaaaaatttttgacgcaaaactatactacttgtgacagcatttttgctaaaaaaaacttccgaattgtgaactacccacgtgcttattccaacttaaaaactacacgaattcacgaagaattccagcccaaaagtagtctttcttttcgagaagcccaaaatggagcggatttgctaatactacgtacggcaattttttccccttaaaaaatttcgaattgtcgaccgttagatcgtgtctacgattcgtgcagatcggcgtgaggaaaaaagatcacactgcccacacgaggaagggaatcaatcctgcgaccttagatacagagcctgcgtgggctaaccacttggccacgaacgcttttcatgtaattacatgctatttatatataagttacaatgtaattacagtcttagttacaacataactacacctataatcatactatacttatatttagaggttttctaactgaaaatttgtcaaaagtactatagctacttccaaacggagcggagtccagcctagcccagcgtgtaattgaatcgatgctttagtccccgagttgaacataagcttgagaacatttgtccaaaattcacgccaagtcaagtcccagaatttggttcgtaaacaatttacacgcaaatctcatcaaagagtctggcaatttttacacgaattcgtatgaccctatccaagctcgttgtacatgtcgtcagtttccaaagcggctcttgcacgtttgcgaggagatgtgcacgtctttcctcagcccggcggcggtgatgtggcacgacacggccagcgtcctccgctcgaagccgagcgcgccggcgtgcacctgcacggcgaactcgacggcgaggtcgagcgtcacggcgcccttggagccgcggagcgccttctccaccgccctgggcgtgcggccgtcgcgctgcgtcccgtggagcagcacgttgaagcccatggcgtcctccccgccgtcctcgggctccccgacgccgcccttcgccagggcgttgcccttgtgcgccagcctcgccgtgccgcggccgccataccacagcgcggtcaccttgttcgggttgatcgccgtgaggaagaagtcgtaggccacgtggtgctgccgcgacgcgttggtgtgcacggagaggttgtcgacgacgaagctcggcgcgtccggccgcagcacgacggcggacag

SEQ ID NO: 42139 - DNA, 805 bp, Oryza sativa
tcaccccaaaatttttcaccctatcacattatacgtttgaacacctgcatgaagtattaaatatagactaaaaataactaattgcacaaattgcgactaatttgtgagacgaatcttttaagtctaattgctccatgatttgacaatgtggtgcttcagtaaatatttgctaatgatggattaattaggcttaataaattcatctcgcagcttactgacggattctgtaattagttttttattagtgtccgaataccccatgccacaccctatataatacttgatgtgacatgccaaaattttacacccctgaatgtaaacacctcctagcctgtgtttagtttctaaaaaaagttgaaagtttgaagaaagttaggagtttagaaaaaaagttaaaagtttatgtgtgtatgaaagtttttaatgtgatggaaagttgggaataggggagaaactaaacccggcctaagcaaaaacaaaaatgcaagcacatgtgaaatggagatttgtggacatattctagggagacctagctgaagtcaagcgtcaatatcatcggtatcaggacaccacgcgtatgagcgatccgtattcattgcttcggaaaatgaaaggtgtgctaagaatgagtcaactaacttataaatcttcacatcagcttttgtatgatgtggaagagagagaagataaggagagagagtgcactatctcttcttcaagagctaagctcctaaacaaaatgtgagagtggttgtggaacccaaagcattttgaacaatgtgctacgagacaacctattaaaaga

SEQ ID NO: 42140 - DNA, 655 bp, Oryza sativa
cctgaaagagaaacataacccatattttagtctgaacattctcctaatctcctgtggggcatgaaatataccattttagtctgaacacttaggtaatcattcacaaagtcaggcaccaattcaatctttccaaaaagcagttcatttggattgtctgaaaagtttagctttcctgaagtgcagtaacagatatgcaattacaaagacacctatgacttatgcaacggactgcataatttacctggccgaggaacaacatattcactcaagaaaggagacaaataattcatggaatgaactaatgaagtgaccagagaagataaaatatttacctggtagaacaaccgctgcattgcattgttgcaatcagagacactcccacggaacctgataccagctactctcaggactatgcgatcagcactggaagtctgaaggggctgccaacagttgttcccttcaatcttcacctctgcagtggcgacgataccagctgtcaaggttaccatgagagctccttcatgaacttctaatgagagaaccagctgaagatgggacttgttccctgcaaaacgaatgagaataaagcgagctaagttaatctgaaaggccaaagaacaacagttacatgtcaaagtaagcatgatattcctca

SEQ ID NO: 42141 - DNA, 664 bp, Oryza sativa
aatattagaagtagagtatacagtccatataggaatttaaaactaactaaaattcagaataaacataataaaattaaaagttgagtttagagtttgcataaaaatacaatttacaaataaataaaattcgaaattaaaaaaaacatgggaagaaaagtctagaagtaactgaaattcgaaattataaattaaaaaatattgaaagatgagtttcgagtccacatagaaatacaattagaaataataaaaattcagaattaaaaataaataatattggaagaagagcctagagtatatatagaaatataatttacatataacgaaaattcggaattaattaaaaaaagaaatattgaaagacgagtctagaatccatataggaatataatttacaaataactaaaatttaataccaaaaataattaataactagcacatatataaaatacaatatgaatattacacattagtagtttcgtaaagttagtacaaaatttaaaattatgttattattttaatatttaaatattacattgagaaaacatatatactattatatgagagaaaaatataatgatgctagccgtacaatctgcgcgggccaccatgctagttattctattattctagaacatatatgtgcttgtttcttttttttaagacg

SEQ ID NO: 42142 - DNA, 3508 bp, Oryza sativa
ccgctatgcgtggtcgatcactgctagacctaaggagggttgcaaaatgccccatgcacaacgactccgcctggaagatcgtcgacgagttcccggttaaccttacgtagaggggttggagagagagagagagagagagagagagagaggatagaagatccacttgtccctggtgacaatctgacaatgacaaccaaaaaccggcggcgaccaaaccaagagaaggcggcaaaggcgaggaacaaaacctcctaggcaacacctccaagaaggtcatgacaccttaggtgccaccgttgtcgttcaagctggaccgggttttcacttggcgagtcttgccaggtagaggaatggtggccgctcgacaatacccctaaagggatcatgactcccaaaggcatcgacattgtcagctcaagaaaacctaagctaggctttctcctgcgacactctctcccaaacctgtcattgccaccctaaatctccttagcccaaacaacctctaccagctcgcaggtccaccacaccggcgccccatcgtgggctagcccaatgttgcctcccgcaatgtcgtctcccacgccgaccaacacttccagcagccattccaacccctcgccgcaacagccgtcattctcctccgtccacgttggcctcacccgcactggccgcctgcttcccccaagcctgaccggcatgcttgccactagccacaacaagctcttgttgccattgcccacgcgagcctcacatcactatcactgacgagagtcccccgttgtcatcgtccacgcgggcctccctccgctgttgtcggtgcggccttccggccatcgtcgttgcggccttcccactgttctcgtcgccaacgcggccttgccaccgccaccgtcgcggccttctcacggacgtcgtccactcgtcgccaccggctgctgaggcattccgctgccgccagccgccgtcgccagcgcgacagctcctgtcagatccagcgcggaggcgccagatccatccgtagggagaccggatcctcagcctctatgtcgtgctttcatcccctagctcttggcgctgacccaccttccacgcaaagatgcagagcaccatcgaggtttggcctcaccaccaccatcctagctaagctgctcggtttccgtgctccggcgacggcaaggggtgggagaggaggggagagggattgcggaggcactaggtttctcctccgagtcgcctgcacgtgggctacacgggggtcgggtttctgatttgtgctcagaacataaatttgacatagatatatctactacatttcaggggtaaaatctttactcaaacctatacttttaccgtccttttccaaatatggatgatgtttaatattaccaaagaggacaattaattaaacactatagtttattatccattctacaccctatagttagttccaaaaataattaaacaaagaactatgtaaaagtagacatagtcatttattgtatttcatttaattcacatagagaaatgaaaatacatggaaaatacacttggcatggtaactattacaccagcatcatgtccacttcaaggatttccaccagaaccagatccataaccatacccttctccaaattctaaacctgatccattacccgacccacgcccatatcctccaccctcaccatacccagatcctgaacccgacccactaccgccaccatagccatacccttatccgccacccgacccagctctagacccggccgaggaccctgctcccgatccacctgacccagcatacgatccggcactcgacccagcagaagaactagcccctccaatcgagaccgacccagatcttgacccggaggtagacccagccccagccaccgagccggaacctgacccagacccagaagcagagacacctcccgtacccgctctgaccccaagcccaagtccaatccctagcccaataccctgcccgctacccaagccgatgtcgaggcccatcctcgccacacggcggctctccacgcagccaccggacatcacgcacaggagcgccaccaccactagagcagcaaccgcgccgcccttgccgcccgccatcctcgttttttccccgagctggcaatggacgaaactccgcgcggtggtggcaagcttttataggaggcgcggtctgcactgcacgcgaggccaagaggaacaggacgatggccgcagcatcgatcgggtggtcgggcgtggggaaaaaaaccctcagctttgtgcacgaaacgtaccgggaatcaagtcatcatgtggtcgagctagcacgcgatggtggcgcggtggtgcaacgcgaaaaaggtgcctgcctgattgatgaatcgattgatttggctagtgcgtggagtggttgcgatgcatgcggtttggttagtagctgcaggagaacgtacgcacgcaccggccggcgtgtcgttcgtcctccgcgcactaaggtgatgggtttggtataacctgatccatctcatctatcgatcgatctgcaatctcgttcttagagatcgggtgatgatgtcgaaagttcgcgactcttcagttaggcagattaattcatatatcgaatagtacttgtcgtgatcgatctctccggatgcactatagagatggtgatgactgaactttatcaggatcttggacaatggatgtgtgaattgcaggtagctccatacctgcaaagggattcatgctcgccagtggactgggaatctgtactgtagctcttttaaacggcgatgttgtcacagccgtgcagtacgaaagctgtagttggcgacttggggttgtgttcggcacccctttaagaacccctccctctcgttttccacaagtatgtttttcaaactgatgaacgatgtatttttttaaaaaaattttatacgaaagttgcttaaaaaatcaaattaatctatttttaaagaaaataactaaaacttaattaatcacgcgctaatgaaccgctccgttttttatgcgtacttggtgtcgctcggactctcacacttccacacttgcagtggcaggaatgatgctgatgaatcttttctcttttactttgatcgagcatgcacgcgcttcaatctgtcaatcagacaaacgaaaatgaggaaattctcatgaactgcctcccgtaatttgctcctatgtctgtctctctttcctcagactgaggggatgatcgacctcagtcgttctatacacgaacagagttttccccctgtccaagcattaaagagagactctcttaattactccatattaattggcacgtcatgcacacaagtcaacttttttaaaaaaacaaaataagaaaaaccgagaatgcagtatgctaatatgctatacttgaggaagtctactaacaaaatccataggtccaagtaccacatgtgaaacgggaccatgattatttgacgttgatatacagctgctttgtacgtagctagcaaattaaagc

SEQ ID NO: 42143 - DNA, 673 bp, Oryza sativa
gacttagcatatatcaccaatatccattgtaaacttatccattcatgcactgagcaaagacataatagtagagtattacgtttcctagcgatccaaacctatataaaccatccgcctccactctcttttgtacctgtcccgaccacaagtttagaaattgcacccatgccgaactctcaagggagagtattttgcctttccgctagaggagttttgtgctccaacacccaatatcacaaactcttcacgctatcccacgaagttctccacataaatatagccttcaaaccccactttaaattcaatggtttacaactagaatcaccaccaacctgtatacaattattagcgatcacgccaaaacgatgacatgcaacagttaagccacatgataatcacgtcattaatgagtagccagctccgccaatcaattatgtgcccatagtatgaacgcagaaccgctaaaaacttattttttaccaaaaagaaaaaaatacaatccctaatcttataccaaaaatttaaactttgctcatccatacagaattttccgtacaattacagccttcaaactatctcattaacttgaagggctattgacatagatccattcgtaccgcacggattaagatcctctaacttactttcctctaatactctaatagaggatcct

SEQ ID NO: 42144 - DNA, 706 bp, Oryza sativa
cgctttatgtgtaattgacctatgatcgaaaccttgttgttgaccttggtcttagagtaaggtatttcaacttaagttgcaagtcaagcattctgaatacagattttgtaataattaaccaacatattaccaaatattattgattctatatatgctcctttagttagtaaaatatatatcattactgagatatccgtgtttctataatagttacaacttatcaatattttcttaaaaaaaactactcccataactgaattttatggtaaattgtaatactcttattcttataggatacctacaaaagtttttattcaagagaaccataagtgatgggttatcacttatccctcagtaatgcatgaggctgaagtattctcggtacgattgtatcaccttggtgtaattgcttggtttaaataaaatgtttcattatacagaaaaaggtgacattataatggaagtgattcactacatcaaagtagaaaaaaaaagaaagttaatgttggcaatgtttttttttctcaacagaagtcaccagtggctaaattatgcggatatatatgtccacaaacattttgatttctcaagaaatccactcatatacaccagtctttatagccaaactatacatgagcacttgtaagaatcagctgatacatcaaacctaattataattgatgtagtttcaaatcattatgtatgg

SEQ ID NO: 42145 - DNA, 1763 bp, Oryza sativa
atcaaactacttacagatttggaaactagcttcgattggggagctcccctgcattttatatggagtaagtatataaaagaaaatgtgtgccctgcgctgatgtgcttattggttcgaattgcactggtatggacgttcagaaagtgatcaagattgagtaacttttgtagggtgtttttgcctctggcgcaaacttctttctccaatcctggtgcatatcagtgaaaggccccctttatagcgcaatctttacaccactgagtgctgtgattacaacaatattatctaccatcttccttcatgaggaacttcatataggaaggtatatatttactcatttcatttattatttgggtatccatgttgttcctacttcactatacaactgcttgcttttaatacttttttttgtctgtactgttgtgtacatgaatgatcattgggttgtaatggtatcctcttgtgcagcatattaggtgcaattgcaatcatcattgggttgtacgttgtgctatggggcaaagcagatgatgcaaagagtgaggggctgaccatcctgtcaaatgattccaaaaggataactgaacctgaatgtacaggcgtcaaagttgaatgtggaaccaatctttcagtaccactgttatctggtaatgcaaatgctaatacttagacattttttcatacttgcctgtgaattgagaactgggtatttttcatactttccatcgcatggcaaatgtttatgattcaagagtccttgaccagactgaatgaacaaatggataatctggcaaaatgctcaacatgatgcttgacgaagaatcgaagattgctggaggttgctgtcaaaactgatataaccttccatgtaaaaggaaaatactgccgtcagcctgtcaccgatagagcatttcgtagttaaaacggtcgaattccttgttcaggcctccttttgaatcagggctttgtggaggaattttgtatgactcaaatgctataaaaaatttcctatcattgtacccatcaaaatcctatgaaattcttttggagtggctcaatgtatggaggttttggaggaaaattagtatgaggtcaacctcttggaaaatttcttttgagtgtatcttcctcatgcaattattgttcttttttttagcccattcaaacggttattcctataattttcatgcgttttaccatcatctgttttccatatgcattcctatcaaaatctgatatcttaaatccctgcttttcaactagtagttctgaatgcattcttactggaaactgcatcagcacaatttacacgcagtaacaatatatcaaccgatggttcaggaacttattcagagtaagtttgataaatatatacaacttactccctccgtttcataatgtaagactttctagcattgcacatgttcatatagatgttaatgaatctagacacgtatatatgcctagattcattaacatatatatgaatatagacaatgctagaaagtcttagattgtgaaacggagaaagtattatccttcaaaaggagacatatagaacttatgtccttttatttgcgcatgtagcataatctggcaagcacatttgacacaaaccagccatcaatccatcaccgccttggcattactaggacaagataagaatgggcactaccgcattagtaagactttggaacttcctaccaatgctggatttagtgaaaagcaaaaaggttttaactatgacgagattatagaaagct

SEQ ID NO: 42146 - DNA, 706 bp, Oryza sativa
ctctaaattatgttacaaatatataaagagctatctatctatagtcagttacagtgagaaataacaaaagttacagatgtaactactgtacatctaactgtaactgggttgtaaatggaatcattcttaaatttctttaaaaattcagtattcatgcagcaacattaaaacactttcccctagtataacaagctctaaattatgttacaaatatataaagaactatttatctacggtcagttacagtgagaaataacaaaagttacagatgtaactacagtacatttgaacagtaactgggttataactggaatcatcctttgatttttttttaaaaaaaattcagtactcatgcactaactttttttttgcctatgacaaaatgttctaaattatattacaaataacctaatcatgtagggtcaggtatattgcaatctcaaaaatcaggagatacacaattagatggatatgaaatgagaagcaaaattgtgtctgaagaaatgagaagcaagaagacagttaaaggtgagaatcattctcacctagcattatggaccattttttatcttgtcagaaaatgtcatctagcaaaaatttatatacaacaaattagagatagtagcatgataaatttttaaagaactatatatctatatccagttacagtgagaaataacagaaattacatatgtaactagagtgg

SEQ ID NO: 42147 - DNA, 755 bp, Oryza sativa
actaatcacggtgaatctggtcgaccgcccataaccgcgggcacggctattcgaatagttttactctgatcagaggtgtacaactgtacccacaagacacaaccccacgacacgttcccgtgcgccgacatgccaccacgacataccggaaagaggccgtgacaggacccttcgcataaccctctctaaccgatcgcaccacaccttagggttcgcccccgtccccagcaggcaacgggcagcccccctttcgttccgcggtgaatccggaagccgatcaaccggacaccccggccgacccaactccatcacgcccaccctcgcctgggtacgtcggctagagaaaagctacactacaagcccagccgttgcccacgctggcttgtggtaagtacgataagttcttccagggcatcccgcgaaccggtccttaatcgccatgggcacgtctagcaaaaccatgcacccacagcccaccatgtagtgtattttaattaaccaacaccattgcggtggcactaatccaaagctattgccaataatcaaagtctatgctttaatgtggtccccttttgtgcactagttgaactaagcatggctaagcatctcctaaaccaacatctagtcattttaatacccaagttatcaatggcgtaagggaaacaacatatagctgagtaataggacccatcccacatgatattgtaaaacaatgcaatatttaatagaaatgcgggacatttgtaaattaggta

SEQ ID NO: 42148 - DNA, 644 bp, Oryza sativa
ttcctccaagcagtccagcggatgcgatgagatcaccttccgtctgacatgtggagcagggcacggaagtctttgttttagtcatcaatggtcccacccactagccaccgattctgatgaaggggagtccatggagtgagcgctaagtgtgcatcacgttgcccaactttttctctggggcgacgtgggtacatgacaggcgacatgcacagccacgtgccccatatcaccctttatctactcacaggattcgcataaccctgattttaattaaacttgggaataagtttattttatatcactctcatctctatcgaatcgcatcccttcaatcacaaaaccgggtataacctttctctcaactttaaaaatatgtgtaaatcaactccttgaatgatttggaaaacggtttatttctaacgtgccaagttgaccatggttagacttgctgagtcagtggatgggtcccacgtgttagttatattcctttctcgctcctcgcctctccctctcccgtctcttgctctctctccggtctccacacgcaggcaagcacgagcagcggaggcgggagaggccggaggacgcatatgttccgtttcatgtattgtactacctcggtattgcggcgttggttggcgcgg

SEQ ID NO: 42149 - DNA, 1416 bp, Oryza sativa
atccacgtatctctctcacatagtttattagaactcgtacgttagctggctataaatttgtagctcgctttgttcaccctcccctatctctcttcacatacataagttataagtacaaatctaacatgttaacttgtataattcgcttatgttatcttatggtacttgctcttaattagggaagggtagccgatggctgtggcgagcttgaggaaatggacgtttcacccaaccgcggcgcggaaatcgctgaccgggccgggcgcgcgggggcaaaatggctcgtacgtaatctcgtgccgctgctttgcgttgcgcgcgggcgcggggcggcggggcaaaattaagcggcgaataatggattcaacggatcggtcgatgcgcgcgttgggtgtgtggagtggacgacgcgcggcggggcgtgtcgtgcttgagttgcgccgagctgaagcggacgtctcaaccgaatcgacgtgggcgcgtgtgtgtctgtgtctgtgtataccggcctgcatgctagctcgatccgggcaactgtttggtcggtagaaactgtactagaaacgaacggggggactcccagtgtatgcactcgaaaaggataaaattccaacgctcttcgatggtaagaatcatgtaaaaaaagtatttaagtaccatatccgtttcatatttgagtggttttctctagatttaagttttgttgcaaagaatattgttattgacttaaaagttatcatttttgtgcttttcattagatttatgtttctccttccttctgttcttctgcatacgtgtgaatgggatctcctgttcaaaacctcgaccatgtaggcacttctctcctcaactatatgtctccttttaggtgcaccttctcaaaccctaggaaaagaacatatgagaagaaattaggtccaaattcaagcgccccagatctatagtactatgagggatttatgatctgaagtacgtaaataacaaatcaactacataagaaaaagatattagagcaggtacaatagtggattataagccagctataaacacatatcgagaagataaaatagtaaagaggggaacagcgtgctacagatctatagccaactgcagcacagacttcaagacacaatgtttatatgacagatatgaccatgcattaataatatagtatatgtttatagataattattgtatgatttgactattaaattgactacacatgatttggagccaatagttaactataccattaaacttgctcttatcctaagcgtttgcctagttttgatttagaccttgtcttttgtctctgtggagactgcagcctggtagttgctatcgtctccgttctcccacctggtgaaccctacaaaaatgaattgaggcaagacaagaagaaaaagagatcattac

SEQ ID NO: 42150 - DNA, 1528 bp, Oryza sativa
gagttttgttggaaaaaatcgctccaacagtagacctaaatcacccctaaaagcttggcgtttccaaacccgcatatttcgttctccacttgtagggaagagactcggcgcccaatccttcaaccgcatgcacttcgcgcgcgctgtgtgaaaattttcctaccaggttcttctttgtgcgttcgtctacctgtgagtcaatccatcacgccagcagcctcatcttccccgcagctgtctgggaaagcagccatggctcccccaagcttccccagcgtcgacatttttttctcagcggcagcgccagacccatctccaacccaattgggcggaccttcgtcggcgctcccccagcaccaccaccgactcgaatcggccgtcgcccctattcatctccaatcgtccctcgaccctaccgcatcctgcagcacagcctgtctctcgcgtcagactggcgctgcgctccccccggtaatgtgcaggcgacaaaggccccatgcgatgcgaccagcagccggcgacaaccggaggtgcccagtcgctggccttcatcgaatcatcgtgcacctcggtcggagtcgatttctgattgttgctgctgctcaaatctggagcttgctattgctgagaactgcttggtggtggtactggaaatttgttgtttgctggctgatgaaaactgttgttctttgctgctaaaaactgctgcttgctagtactgaaaagtactattgcagctgctgaaatatcttgctgcttgctgctgaaaacttcaagttgttaacaccgttcacactaaaaaagctgaaattttttttctgggctgaaaaccccattgttgatgattgcagaaccaatatttttccatgtaaaatacaggagatcgtggtaataatcaagtgaaatatcattttggggcaaatactcagatcgtacctgaagccaatggaaacattgttcaatgcttaaactgtcagttatgatgtcaaagagattgatcactgaatgtcctgaaaggagccgtgaggaggatgcagcattgcagcgtgcgcgagcgtgagtggaggagaggaatgacgattctgttggtagttgtcgatgtggcctactttttttgttttgaggattaaattttgggaatctcttggagataaaaggtattctcataccttaaatcctttttagagatctaaaaaaaatgatttaggggattgaattttgggtggctgttggtgatgctctaagttgcacatcctggggaaaaacctccctaatccatcagcaaaccgatcaaccacccacgacaagtcgacgccaccgttttttttttctccctcctaagtcctaaccccacaaaaatcccgcgaactttcgtctcaccacgcgccgcgtgccccctacaaataccaaacaacacccaccacgttcactcacaaaccacgcaggaaacctcagaaaatcaccgtacgcgacgcgggcccaagaaaaccccgacagaaaccgcgcagcagcaacaccaccaccggcg

SEQ ID NO: 42151 - DNA, 735 bp, Oryza sativa
tcctgcggccctttggtgggatgtaatacatcgtaatacgataaatttggactgactatttgtccagattcgtggtactagtatatgtcttatctaaccaaaactctttataggttaggacgaaggaaataaattcttatattttggtacggatgaagtacattttaacaatggcttataattgaatctaactctgatgacacatacaaacgctgttttttttttccagcttgatgggagcagctgctgtgatcaccgggttgtacgtcgtcctgtggggaaaagcggacgacatgaagcggggcagcgagccggcgacggcggcggcggcggcgaagccatgcacggattcgtgtcgcgacgtcgagcgcaccgccgctgaggagcctctcctgctggcagacgccgtctcaagcgagcagctctgattgtttacacattacgacaacactagactattttgtatgattagtaaaaacggatcgacagatctgtgcagttttgctgtttatgactagtttacctgttgtctgttccgacattcgagcggccagcaaatggcctgatttgttaaagatgtggggccgaattgccgatgccatcatgaagtatgattgatactccctccgtctcattttaagtgtaaccataaattttttttatgcccaactttaaccgttcatccattaaaaaaaatataattattgttgtgaatattactttatacgtgactta

SEQ ID NO: 42152 - DNA, 739 bp, Oryza sativa
ttcctgcagcccataattaaccagtacagtactaggtatacttgtgtagaagtggtagtattaggtagattggccatggtcaaatttgggttcagtcagagagaatttataggctgaaaggaaccgggtacaaaaattaaaccgcaggtgatccaccgcactgcacgaacatacgcaacgctcatgtacaggacaacaggtcgtctctgcaataaagcctgatggtgcttatgcagttcgttgcccttttcaggacagctgaactgagctacagtgagataacacacacctgctggccaaatcctctgcaattagttgagtttgatatctgtcgttgttcagctaggaacgcctagctgcagtacgtgttattattgttctatatcacccccaattaacttgccaataatttggatggcagctacttgcaccgtcgagatacggatctctctttccgactgcgaagtaacagggaaatgaggagaaatccaacatctttcttgtggatagcaagcaagagagatgcgcgctcacacaatttcttcctaaaaaaatatttggaggaacgtatctccctcaaatcttgttcttttaattagcaatcaagaaaaatatgttacatagcatcatcctagaatatgctaagatatacatgacagtgattttagagtcgttgaaaagataccatatttttaagggggtgtttagatccagtggtgtaaagttttagcgtgtcaca

SEQ ID NO: 42153 - DNA, 690 bp, Oryza sativa
tacaatttagaaagagttgaaattcggaattaaaaaataaggaatattggaagaggagactagagtccatagagaaatacaatttaaaaatagttaaaattcagaattaaaaaataagaaatattggaggaggagactagagtccatatagaaatacaatttataaataacaaaaattcgaaattaaaaataaagaatattagaagaagagtatagagtccatatagaaataaaatttataaataactgaaattcggaattaaaaataaagaatattagaagaagagtatagagttcatatagaaataatattaataaataatagaaattcggaattaaaaataaggaatattagaagtagagtatagagtccatataggaatttaaaattaactaaaattcgaaataaatataatgaaattaaaagtagagtttagagtccgtataaaattataatttacaaataactaaaattcggaatttaaacaaaacaagggaataagagtctaaagtcaatataggaatacaatttagaagtaactaaaatttgaaattaaaaattaaagaatattaaaagataagtttagagtccacatagaaatacaattagaaataataaaaatattagaattaaaaataaataatattggaagaagagactctatatagaaatataatttacagataata

SEQ ID NO: 42154 - DNA, 739 bp, Oryza sativa
  unsure (1)..(739): unsure at all n locations
tcctgcagccccagggagtttgttgacaacaaagatggatcgtatactacttattatgtggcgaaaaataccggtttatatagaatttgtattcagttgaggatgcacaactgaaaccttgcccattcgaagtgcatgnttgttcaaggggaaacatttcagttggtcagatgagattcatagttaattcaaaaaaaaatcatagaaaaatttgagcatcaatacttctgtttaattgttaaatagctatgattagctgaaaaaaaaaacatatctcatgcagatgaagacttctccacggttcaaaacgatataatttcagtacgggagaatgaatctgtttcctttgatgtattgtcaaatgactacattgcaggaggccaagctgtagttaatttttatccggtaagcccatgccgtcaactaattccccagatcagccccaaaactatctaagaaccacccaagggtctttcggctagcttcacaaagtggtgagcttttcgaagccataccctttctaattatttgatattaggtcattccctaatattcgcgtcttttcagccccaaaactatctataacttcttagtgataaccacaaaattttctcatgcgatatattagtcttgtacatgttaacactttaacaacacaacttataatatactacaaatctagcaaaaaaagtcttttaatatgtggatcggagtaatattccaacttaaaatatactat

SEQ ID NO: 42155 - DNA, 727 bp, Oryza sativa
atctgtcctcgagtttgtaattcgtccttaaaccacaataataggtatagcccgtccccgacttgcaaaaccgtatcaacttacgtaaggcatatggctcttggttttcgtttgacgtggagctttgagtacggtcaactgtgctgagccagtgtgggacccacatgattcccacatatcagcaacatttccctctcttccccatcctcaccaatcaaggaggtaggggtggcctcacatggagaagggccgcggccggcatcccagggaggcgaacaggcccgtccttgagggcgtacgacatgagcgcttgcacaggtccccaagcctatatatttgccttccgtgattcaatcccattgatccaattgataacaacagaaggcatggaggctgctggagcatgagtgtgagctcaattaatgagagaataacgttgcacacgcataatggttccttttttcagatcgatctcaacgcgtatccgctggcctgctgcccaatcgcctcgctccctcgctacgtttttctttattttaagatcaatcccaccgtcggtccattcatctaccgccctgccgccctatcccttgccggatcaccctgcttccgatgccggagcgctgcatctctgtagtctgcacgatgaaaccaccacaccggcaaacatcacgacggctgtaggcgtcgtcttgtgttttttctagagaagattatgtgaaggtat

SEQ ID NO: 42156 - DNA, 714 bp, Oryza sativa
ccaaagaaggggtagcaactggtgtgacttttaaaaactatatgtagaaacacgaggatgataaagtttggtctttaaagtcttaagataataagatagctatttaataaattttaagtaaaatcatcctaaaaaatatatgaatttgtttgggtgctagccgcgcaattgcgcgggccacccagctagtttatattgattttagtgaatctagatagatatatatgtctagattcattaacatcaatatgaatgtaggaaatgttagaatgacttatattgtaaaacggagagagtagatgttatcttgtgaggcggtctggtgattgtgtttacacagtaataaaactgtagctctgtatgctatctcaggtactgtagtttgctgtttgcagttgttccaatcttgccaaatcttttgttacgatgtacatacactgtccgcatatctttgtccaatgtgatctgtatgagtttccacggactgtatctactgatatacagtaattgtgagcgccgctatttgaatcttcagcgacttgattggaagtaaaatcaacgatcttttttttagctcaagccaggccagcattgatagttactcccttcgtttcaaaatgtttgacaccgttgactttttagcctatgtttgaccgttcgtcttatttaaaaaaaatttgtgaaatatgaaaaattatatatgtacatgaaagt

SEQ ID NO: 42157 - DNA, 684 bp, Oryza sativa
gtaagagtgctattgatatttgttaatattgtgctcacatttataacataatgatttctttcacctatacgaacaaatagtacaaaatccaaatacgacatatataacacaatacattataattattctgtaattaactctcggtttcagtttaaacagagctaagtattggaaaaaaatacacaacccatagtgcttaattcatctctcgctgcatcacacttttaattttcttttcatgttattaacaaaattaatcatctccatatatgatttgatatgtggcaaagtggtagtgctgcggtagtcgtgatcaccttagatgcctcagacacgacgctttgtcaagcgtgcaaaaggcaaagctgcagacgtgcattgtgcagcgggcaaaaaagagaacttcggacgctttatttattagcaaataatatatcagatgatttaaataatgggtccaccggttctagtgtaagtgtacatttgttaatatagattttaaattgttaatttaatgggtacataatataatataatggtgtagactttattttgaaaccatgcattatttgagaataatagtccaatgtaacaaaaaatagttccgatgatttaaataatgggtcctcggtttaagtgcacgtataaatcaattaatatagatcttaaactgtttatttgata

SEQ ID NO: 42158 - DNA, 1324 bp, Oryza sativa
ccatcgaccgccgagcgcgccgacgacaatgctatctcctgtgtcctgttttctccctgcgtgcgagtgctcgtctcggctagtcggcgacacgtcccgttgatactgtatgattttgtcccgttgccaggtggccgtgccgtgacaaaaaaaatacagtactactagtaattagttctcgtaattacactcaagtctgctgggagagtttaacatttcgagaagcagctgattagtagtcagtttttaagaatttaaaaaaaatgggttttcctgcttccggcttatagttcatttactaaaccctataacggcagcttctcagtatctagatcaaaaacttttggaggaatttataattttgagaaaagctgcagcattaaaatctccttaaaacaggcccttagtttggcatgcatctgtgcatgatgatttatttgcgagttgagaccgaatagttaatttgattgctcgatggatcatcaatccattgatagacgtcatgcgtgtctctggttcacttctcccatgacgccatgtaacgtgttcttcacacagatccctgcattcccatggtctcaaaggcgctttaatttggacctattttgtaagtgataaaaaaacagagatgttactgaaaatatgtttatggagtggctggttgatccgaggcaaactttaaggatgaacttttgctgctcatgttgagtgaaatattgtactactatactagtatggcactttcccttaaaaaagagagtgcaaaagtaataaagaacggctcgatcgtgtgcgccactgcacaacaccagtgtgctcgagaaggcttctgccgcatcctctccacgtgcactgatctttccaagcgtcgttgctccaagatttgctggtgttcatcacgaacaagacactgttcatgccgtgatgcaacttcggtgctagtagctttcatcactattacctgcagaagcgttcacttgcattagcagatgggggccagatatatcgatgcaatccaaccatttgcaaattgcaacgacctcttcgcatcctccctccgtgctcacgtctttatcagaaacatgacaccagcaaggcaggatgtgggctttacatgtgtcctaacttaaatcatttttaacttttgcaagtaaaatagttgaatatatatgctgcctgtaagttagcacgtatcaatctcctcttagaaaaaatatacaccgccgactcttcttatgtagttggtagatgagctaagctagcacaagaaaagctcgtagttaaattcctggtttggcatctgattcgacacatcacggacgga

SEQ ID NO: 42159 - DNA, 645 bp, Oryza sativa
ttagcccatttaattgcagagaaaaatttaagcccatctggaggtttaatccggccggggatcaagttaatttctgatagacttggcccttttcttttctccaagaaaagttggtagccccatcgtttggcctaaacagccaaagaataagccaaaatttaaatttttgaacttgattttgaagttgattttgaaatacttttaacgtaatcttttgttaatgttggcttttaagtcgctacgaacaaacctacaaaagttttacttataaattaattttaattttctaataagccaaataagccattttggccaaatggacaaccgatgggagcctggataaacttttggatactcgtggcatgtttttcaaactactaaacggtgtgtttcgtgcgaaaactttctatatgaaagttgttctaaaatatacgattaatctatttttcaagtttataataattaaaactcaattaatcacacgttattaccaccttgttttgcgtgaaatatttaatcttcatcttcattttcaggagattcaaacaccacccgcctcataaaaggcttattatgtccatgtagtgctaaaaaaaatggaaaaaaaaagaaatcggcgttaaaaaaaaagaaaaggaaaaaaaa

SEQ ID NO: 42160 - DNA, 1290 bp, Oryza sativa
  unsure (1)..(1290): unsure at all n locations
gttctaatcgtgttagtggaagcaacactgacgtgacgtacgtcccctcgaccaaaagaaatagcgatctctccacttcatcaaaaggtttgtatgcattgtagaatattgtaacaaggttttccncaggtgttatcaattccacttacactccatcgatcggacatgagtttgtctccttcacaaatttgaaaaagaaaagagaggggctgtcgatttataaaaccttgtaagaatcgcagacaaattcttcttacgttccaaatgtttgatatgctttatccgataaaaataataaatttcatacacagtaaatcatttatttcaagaacttaagaagtgagtatgctagtgcagtagtttagtacgtaggtataatacattacaagaacttttaacttttaagtgagcatgtaggtgcaacaatttataaggtgtgtgtgattttggtataataacttaaaaatgatacaacaacttaattattttgagtattttttctatacgctacttattttatcaatatactcatacatattttattttatcatatacttgcacatatttatataagtatgttattttgtcaacctagttattttactatatagaaaattttttatttatgatgagatctgagaaggtgagagagaacatccaaacggatggtgcaaactgaatgatcaacctaattcttatagattaaatccataattgtaagataatatctgcagctggagcataggaggtgtttttcaagtgctgagagcatcagaccaagcagcatgacacaaaagaaccaggacctgcaaccctgaatctttgtttgaccagttttgttatggtgaaaaaaaaacaaaaccggatgccatagtgccatgccgctcctgcctgtctttttctgtgccagttttcgcttgccctcaactgaaattctgaaaagcttcctcctttgctttaccaaaagtcagcaggcagcagggctagttctcttgaagagcacgaaaaatttgaatattttttcctgaatactgagacgctcttttgatgggactaaaacttttaattacttatcacatcggatgtttggacactaattataaatattaaacgtagaccattaataaacccatccataatcttagaataattcacgagacgaatctattgaacctaattaattcatgattagcctatgtgatgctacagtaaacattatttaattatggattaattaggcttaaaaatttgtctcgcaaattagctttcatttatataattagttttata

SEQ ID NO: 42161 - DNA, 741 bp, Oryza sativa
ttcctgcagccttccgagatcacggaaatttcggactgataaaagttgaaatttaaacaaaatttgattaaactttgaataaaatgtgcttaattaaataaatgaatatgtaacccgaaatttccaaaattttggaaattacgatccgaaacattgaatcccctgcgcacgccaagatcataagatcaaatgtcgactgagaattaatcaacttgctcttccgatatacgagtctaaccatgtttgatctctgtttgactgcagggcaacggtaaaccaatacgtgtactaccagggcctgcatctgggatcgtcgtcgatggcgacggccatgagcaacctgatacccgcgatcaccttcgtgatggcagcgtcagtagggtgagttcatgcatctctcaaacagatgatacacctctctgaatttctgtcagttcatgcactgtaaaacacagcaaattaaactgcatgcattgttctcttcgcttctctctgcaacggcgtatcctgtgcttgatcccttctagctagttccagaatttggttaaatttaattagttggtgtccatcaatcacgaacgggaccaagtaacacatgcatatcgtaccactcaataattgcgttctctccgagctagctactgtgtacgtacgtgcagagggaacaagaggacggatcgacataatcaccagagcacatgatcgaacagcatttgccatcattctgacctgtaaattcag

SEQ ID NO: 42162 - DNA, 1798 bp, Oryza sativa
cccttttttttaacgaaaggcaggagctctgccaatgaatggccacgattttgtaccgcgtggaggtattggacgataaaaaacctctttcaaaaaacaaaccttcccgctggcctgccagttgttgctgctctctgcaaacctgctcgctcccccggcgctgctgctgcacggctgctcctccttgcgggcagcgcgctcccgcggctcagccggcctgctgcactgatgctatcgcggccgctccgtcacggctgcgctccgatgctccgttgcccgcctacttgccggttgccgcagagccactctcgatcgcctcgcggcctcgcgccaacgcaccatcgcccgctggcgttgcacgccgcggtgccgccactcaaagggggactcagggggaacaatgggtccggtggatgtaggggggctcaagtcctcatgtacccacgttgaatttgcccctgactagtatataacttgcatgtgagatgttaggtaaattttgctataggacatcgcgacttcgtggttttagttgtaggacaccgcgtgaagtgacttttaggaagacactctcaaatgtgctataggacatcgcgacttcgtggttttagttgtaggataccgcgtaaagtgacttttgagaggacactctcaaacgttggatattcgctcattaaaataaaaatttccggttgaagaggagagaaatcacgcgaaatatcaaaaatacccttgggcccatatgtcagctttcctatctctcttcttttctctctctatcttcctccttccggcgtcactatgagaggcgagggggcgtgcggaggaccgccacgagcgcgacggccgtgcaggcggtactgcaaggcgaggcggcgagcggaggtccagcgcgggtgcggcggctatgcgggtggcacggcgaggcgtagtggcgcggcggcggctgcagtggctcgtggcgacaccgtgtagggtgcgtccggctggggctcgtggtggccgtgcgggtggcacggcgagatgcaatggcgcggcggctatgcgggtggcacgcaatctgcctctgttccacgacattgaacttcatcgttccttctttcctcggcaattcttgctcctgtgactcctcctagtccccttggaactaactcccccatcaatttcatcgatttgggccataacagtgccaaacccgagctccaaagctccgctcatggaggtcaccgtggacatgccatcttggggactctcccttctattttactggaaaaacagaacccacgtgcgccgtagatgctcctgccccccctcaatttggtcggagaactcgccgttcgtccaaaccccaaaccgccccaaagctctgccatggcgttgcaatgccgcaacgctcgcccctgctccgcctcgcgccgccgccgaaggtggagggccgccggaacccgtccgcacctctcctggtcgtagccgagccatcgctggccgagtccgccccacccaagccagtgctcatgcgtctgttgccctgtccgcaccaagtcatcttctagtagtgcctttggtgctcttcgttgtccccggtggccttcgtcatctctagagatggcaacggggaattccccgtcggaggttacaccaccagacccgcctctgtggaggagaattttctccgcccccgcccccgtgaaatgcaatgaggcaacatctttcaccatcaccgcctccgtgcgggtaatttatccccgtggagccttcatccccgctctcaggtttctcaacagtcaatagtcaacat

SEQ ID NO: 42163 - DNA, 1078 bp, Oryza sativa
aatagagggtggagaaggagcccgacgcccggtggccggtgccgagtcctcggcgtcctcggcgccaccaagagatcggacatggtcgacgaggtacgagcaatatagagattgaggagagacggcgcagcgctgtgacctgggaggccgggaacgggatggcggtgtggcactgggacctaggcggcgcggctcgggcgttgggacctgtcggcacgtggagactaggggcggaagggacaagggagtggataagagatggctagggtttctagaggctttatatactctgcgtcttgggcttgtttctatggaccatatatacatgaaatggaacacataaaatattacaatgggcctccacagagagcggggacagggaacagtgaacaaaacctgcccccgttagacccaatggaggatgttttcactccatttaatcctccatggagacataattcataccacccccacctcctaatgggaggattcaccacggggaatcggtggacggggaacctttgccattcctaatcatctctaatgggctttactgtctgtatgtctctaatggacttcgtcgcctttagtgatgactagctatatatttattgtcaaattttctctcaaaaatttgtcagatgtaaatataggacaattatattgtaacttatatttaaatataatataacctataagtaacactctttccgtgaagcgggtgtcttgtaatgaaatctcctcacctatacacacagctatgattttttttcctccctttacttgcatggatctagaaacaaatctaacgatataaaagttatgtaaaaagttacatataaattacattataattacactatgattacaatgtatttatatctgtgaaaaattttgagagaaatttgatgataaatatatatagcaaaatcgtcctctaattatcgctgaaccgctatctgccagggcccaccatagcgaagtcaatacgatcagccgctgaagcgcacgagagcacacgtcgacgcacacgcaagaaactcaaagttctcagttcatatctgaagaaaccgcctag

SEQ ID NO: 42164 - DNA, 504 bp, Oryza sativa
catatttctggtttgtctataatatttacgatatcaaatgagtataatcagattgttatgagatatattttcatagtttgtttatttaacagggtagatgctaatactcttctttataaacttagccatatcctaacttagccaaacttaggatagttcaacttaaatcaaaactatatatacttatatcttggtaaggggagtgtagtatgtattagttgggatattagtttaaacttttgggttgtattttttttaatgaattgcagtttgggcctttttctaccctcatctttcttttattagtagggcatattttgttttgctaggacacgagacttttaactaacaattactttactaatatattatttatgtgatatatataagtaaatgtataacttcccattacaaatctaataacattaattaattttgtatcatataaattaattatattttaatcgagtaattgttcatcgaagtatttcgctaccggtacaa

SEQ ID NO: 42165 - DNA, 712 bp, Oryza sativa
cgcgccgaggttatcccatggccacgacgacaagaatgcggcacccatgatcgcaagcccctcgacttgatcttcttcttcgtcctctcagctcagctcagtagtacgtaggggttcaccggtgttgtgcgtgcggggagagggagagccgtgaggggagttagaagatgttggcggttgtggttttgcacccaacgcggctggtcatgcgcgctgcgtctcgggatgcttttatatacgtgaaacacttgcacagttgcactgcgactggtattagccaagggacagacagcgcgcggtcacagcggtggagggcggggaaggtgagagtccgattcgggcagcgagaggttgacgcgaatcaacgaaggatcatcgatgggatccatccgtccatccatcgattggccggccggccgccaggccacagcacctgtcagtcgggctatccgccaccggcttccccaaccagacggagttaatggcaccacacacgatcgagatttgaaacgggattgcgaccgctacgtaccacacacacgtacaggttgtgaacttggggaaatcacgcacgcggctgggccgggcacaagctaagctagcctcgtgtttttttttctacaagtaaattaatccattgtccatgtataaaggagagagacgcgtggacgcgtggtgcgcgcgcgagccgctgggcgatcacgtacggagc

SEQ ID NO: 42166 - DNA, 1723 bp, Oryza sativa
actaagtcggttgattattttttaaaaaaatcaaagttatagaaagaattgttacttgatgtagtgatttatttttttattaaataaaataattttaatgcctggaacacacgtacatatcgtcgttatgagccgtagctctttacgtcgaccatgatcctcaaatacttatctgagtagaagaaaacaagacagttgtaacaaaattaataaaagaagaaccaataacttttaaaaatggtactataggactttaattacttcggaatttatgattgaaatataaaagcgtgagatccctaatttttagagcaattacaatagcaaagtataagtcagctataaacacatataaagggaacgatagaagaaaaacggattacagatttatagcacatactttaaaacgttgtatgtataagaggtgagcctagatattattagtgggcagcatatacctatagggttactgtaaatgatttagatgacttttgggctcacctcacagtacactctcgttaattgtcgagcgagtagcatggagtagcgagcgcaaaagtagaaaagacgttggaaaatggagctgccgtaattaagaaggatgtcctattcccgtacgatgaggttgcgagtctcttgcgaaatccgaaattttgtctcagagatttgaagtgtgtcggtcgtgtcggaacagggtttaaggagaaatgggcttgggtggcttaagctgctggtgtgtgctccctccaagatgtggaggcatccactgttccatacttccttccatatacttccatacggtttacaacgagacggtgagtttgttccatcttctctatcgcatccgtgccattcgcccatgccccgtgagtccttggccaattctatcacctgactacctgatgacgcttttcctcgtcagcagctcagcaccttaccttttactacatgctgcacctgccggattcgcccgtcttttagatggggctgatgcgcatggtgcacacgctactggtttgccggtttctgtttggtccaatatgtggcgatggcttggaccagaccagcccagcccaacctagaagtgactgagtgagcgaggcacaagccggaataagttcactttgtgaccctcaaatgtgatcgaaatctaatctgtgaccctaaaccataaaaccggatatgtcgacccctcaactcttaaaaccggtgcaatttaactccatcagcggttttggagggtggttttgctgacatggcgtctacgtggcgatgttgactcagtcttcggtccacgtggagttaacgtggcgcttatgtgtactagaattaaaaaaatatgttcagtaccatttgtcattaaaaaaaaataaatgtggaaccactgacatgtggggccatgggccctctttccttcttcctcttcctcctcccttctctctctttttctctctctcccatttctctttgtcttcatctacaggctgcggcgggcccgagcggccgcggcgagcggaaggggaggcggcgacccggcggcggcggtatgaattgacatgccaccattagcagcaagacccaaggaagggagcaggagacgacgacgaggagaaggagcgcttgagccaccaagaactccatcccaatccctctccctctctcagctcctcacactctcctttcaccaccttcctgcgaaccaggtagtggcaaagcagagtag

SEQ ID NO: 42167 - DNA, 2578 bp, Oryza sativa
agggctgatgtggacaagctgacatgtggggtctacgtgggtcccacgctgccacgtcggaaaaaaccgggttcaaaaccaccgaaggacctaaagtaaatgtttttgtaagttgagggatgttatatatctggttttgcggttgtgggacgattctgtaactccatgataagttgagggaccttcggtgtactttttccttccagtgttccaccgtgttatggtcaggctcctctttcacgttgggccgtcagaacacgcggcccaaataggctcgtccctctctgataatttcacagcccaaacagggccgattgtcggcctgccacattccaggccgcctaaggcctgcgtatcggaattatggactggccgatatatgcccatcgctgttacgatcgtgggcgtgaacgtgaatgcgtgatccttgattggaataagttcaactgagatctcaacgaatccgattttcgtccttcaaccggaaaaccatatataacatgtccctcaactatcaaaaccggtgcacacaaaattcctcggtggtttagattgcggttttggcagacatggcatctatgtggctagtttgactcggtcttcatttgatgtggcattgacgtggcgtttatgtggcaattcgatccagaaaaaaaaataaaacacatgggaccccatatcattttcacacacacaataaaaaaaaatggtgggacccacgtgggccccacaagtcagtctactcacccctcttcttcctcctctctccccatctcccctttcttcatctctctcttgcgctcgggggggggggggggggaccagacgcggccggcgacgacgacggcggcggagatggagaagagcggttgccggccatctctctcttgcacacgctcgccggtatgccagggagctcgaggaggggggaagggagtactaatttcactccagtagtaatgatttatgaatcaatggcgtgacgcggactagattccccttcgattatgatactcagtctcgcaggcgaggtaccgcatcctcgcactctccaacattctcccaccgtcggccgattccgacgtcacggtgctccctgactctgaccgcccggcgcgcgcgcttctttggtcacccaacaagaagcgaggagtcaacgacggtggcgcccaacgagcttgagctgcgaaaaccaccatgtgacatctggggccatcgtaaataagtgccacatagctgtcacaactcacggcagataaagatcggatcaacataccattaccatgtaggtgctaagtcaatcaaaacttctggaggacttgaattgtactagttttagaagttggaggatgcattataaccggttttgcagtgaggcatgcgaagggaactggacatatagttaagaggattcagaagtagacttttgccttgcacagatggacgcgtgcgtaggattgggccgagcatatgccgccgtaacaagttagtaaaataagttggaaaaagtccactttgactcccttaaatgtataccgaatctaattcgtacccctcaaccagaaaaccggttaggatgactcttccaattactaaaaccggtacaaatagactccctcagcggtttcaagggcggttttgctgacgtggcgttgttgaattggtcttcgtcccacgtggcgttgacgtggcactgatgtaagattagatttaaaaatatatacgtgggaccaatttgtcattcacacacaaaaattataataggatccactgacttgtggggtccacatgtcattctctttccaacctttctgcctccctctttctcccttatctctctctttctcttcccgtcggcgagcagcgcggagagcttgccgagggcacggatggcggagcagagggcggcgagggagcggagtggagggcgccaagggagtgcgcgaagccgtgaagccgtgggcggcggtgggtggagaaggccggcgtgaaggccgggcggagcggcggcatcgagagctgccagtcgccgcggtcgctcctgtcgtgtatcctacagcgaggcgacgacagcggtgggaagatcgggagccgggtgcggctgccgtggcggtacagctccacctccgtgttgatgcgatgttgttaacactccgccaccgccggtagtggcggcggcggcagcggtgggaagttcgggtgctggatgcggctaccggcgccggccaaggtcaaggtcattgggagggcgccggtgtcatgccctgaagttcccctcccttgctctaaattcataaaataaatcgtccgaagaaattgtttaatttaacctagagatgaatccctaattaataaatgcaaataataatcggaatcgacatgtggaatttttcttggattctacatgtcaaaatatgctaacaggatttttactggaattttcagagcattggaaataattttaaccaattaaaataagcaaagtgcaaatattaaatccctgggaaaatcctttttccttttttttccctctcttttcctcctttgggccgccggcccatctctcccgggctgcagg

SEQ ID NO: 42168 - DNA, 698 bp, Oryza sativa
attcctgcagccccaagtatctcaaaatacacgatctaaataatatagaagaagatttttattagagaaattatttttcgaagcatgtggagtaataatatgatttaatgatcgatgaaaatttgaccggatatgtgttgacgtgaaatttttcacctgacgtgtcagatgtgcgtcgatcgtgctaacactgaggcatggaagatctgcttaactctagtgcaagatcctagatcttgatgaggtgcggacgtgctagtcagtttaaccctgcaactgacaatacgtcgatgtagcagcgattagctgataggttgaacgatcggctgttagagacttggaggcccagacgttgatgacaattgtaggctcgagtctcaaatgtgccaaaagcgtgtgtcagccgatggtttgatgtagaatcagctagaggatctgatgttagtacctagcgttgaacacctttgatctttgaagatagacgatgttgagggcactctaggttgtaaggttgttgtagaaatagattggctagaagtcagatacaaatagattcaaatagttagataaacaatgaagcttttgctgcaatcgactaaaatcaacttgtgtataattatcgacaaacatttatttatcaaagagttgatgtgggacttagaaatagtaacaagatgactcactggctaacactctaa

SEQ ID NO: 42169 - DNA, 1530 bp, Oryza sativa
agcatatgaatcatttcgtttcagagatgtacggtttgatttcccagtatgctgagttgcttggttaaattaaacccaaacccctacatgcgttctgctttcttcagattgtattctactgtactatttggtttataaaattcctgtacatgttctgaacttttcagtgctgatctaaatgagttagcagcaagccaatacctgaacttggtccctgttgctttgagaaattatgggctattggttgcatctgctctttcttctcttctgaacttttgttcattgtcaatcgctcgtaaatcgtaaatctgtttgaattggcgctatttctgaacttgggaacataattggcactatttctgaattgggaacaggggatagcacgctcgtaaatctatttgaattgtcagtattttttgaatcttggagcaggctattgcacagtttcagtcgacatgagctttttaaaatctcatacttcagcaaactgaaaaataatttggagggtttcagtctaatgttgatctaatgcatttcaatggtagcaaaaccaaggtcacttgggtgcctggaggtattcacatgcctgaaatatctgtatgattttttttcttctttattctgaatgacccatcgtcccatcccaatattgttcccatgttaattatgtgtggagcttgttagtcagttaactcatttgctgtgaaatttaatcgggaggctcaacaacaacaccctgtctggtccattcccttctgcatcagctaacttgtcacatcttgttgtcgagtgattttaatatatgtgcacggaagtttgagatatgtgcaaattatgtacaaaatttaatatatgggcaaatttgtacacaactggagatatgaccgtttggaccacaatgctctgttttttttatcctaggctctaatctaattgttgtgctttgttaaacaccactgtctgaagatgattttcacttgaggaaaatcttcagtccattgtgacaaagtgactccttttctgaagaaattctttattttttgaagaaattcaagcatgcttgcagttttagcccagttacagtctatatgtattgtagttacatatgtaacttttgttatttctcactgtaactaactatagatatatagtccttgaaaatttatcaacgctacaatctctaatttgttgtatataattttatgctagattatattgtctgccaagatcattttatggtgcataatgctaggtgagcatgataactgacctttcaatgttttcttgcttcttatttctctggacaaaattttgtcactttcatatctctccgattgcatatcccctgatttttcagactgtaacccatcagaccctgcatgtttatattatttgtaacataatttagaacttgttataataggggaaaatatttaatgctgctgcatgagtactgaatttttttgaagaaattcaagcatgaaagctgttacagcctagttacagttcagatgtaatgcagttacatat

SEQ ID NO: 42170 - DNA, 704 bp, Oryza sativa
ttcctgcagcccccaaattcaaccacttgtggtctctcttctcagaggcaggatgacccggccttggcctgacagaaaacaaatagggctcaaaagcaacagcacattaagcttagtataaagaaactagtactgttacgtatcctgtcttcaaatatgatggtatttcagggtgcccacgatataactggtgcaattaatttcaaccatgcgagagaggttaactatctccatcatgtctgggctcgccatggccgcaaatatggcacttttactttgcagtttccacgcacctgctgtaacttctctaactagctaggtcaaaaatcacgttgcttattgcccaagacaccatccctgataataacactcggggacaagaagatcttccattattctgggcgtgtttagttccaaagtttttttttcaaacttctaactttccatcacctcaaatcttttatacacacacaacttcagtcacattgtcttcaattttaactaaattttaaactttaggccaatctaaacacagcctctatcacatccggtggttaatttgatacagtttgattgaagcgccgtggcctcacggtaacgcgcgagaaccagcaagttaacaaccgatcgagacgcgtacgtgcacagccgggatactactattttgcgagcaagcgagcattcatgcatgtatggtactcaac

SEQ ID NO: 42171 - DNA, 668 bp, Oryza sativa
gaacgcacgcacgcacgcgtgaccgcctgagcgcggaagtgtcgacatgcacactatgtacacctcctactctctcggctacttgcgcgacagcgtccacggcccgccgctccgcaaacttggggcttatttggattgctacgatgccaatttttttttggtagtgtcacttgttaccaatataagccaacattcgaattctggttaagattgttctaaattaatgtgaaatctaatatgggcattactaataaatctatctattatattattaaaacagctttaaaaggaggctccacgttcactgtgggggctagaaattcccacattaatcagagaaaaagagaaaaatattagccattggattaaaatagatctagattaatggttgtgatttaatatgagtctacatattttatggaaacaaaagactcggaaacagcatcaataaaccaaaccggaaccaaccagactccagtctgatttttggaagcttggaagctcaggaaccaagccggaatataaatccaaaattagcaaaagaaaaaaaaaagaagaagagttcaagtaggaatacaatttaaaattagctgaaattcagaattaaaaataaacactgttaagattaattcaatttagaataaaaaataaaataatatccaaaatta

SEQ ID NO: 42172 - DNA, 2821 bp, Oryza sativa
attcctgcagcccagtgagatgtttttttggtaattgagacggataatatttctaacctctgcatttaatattattttggaatgatttgcaattacaccctccagttaaaaacatttggcattggaaaaactaaactcagtttagcttacaccttacgtcaaattagtttgactgaagagagaatttaatgatgtcaataactgaatcgaaatggcatgcccagctgggagcgagatcgaccgatcgatatatatatccatcgctttctccagtggagcatcaaaaaggctagcatacacatgctgtacatgcatgatgcagcatggctatctgatctgtgtctgtcggtctaagactcttagtgtctatccatctacatctaactgaaatcgcctacgttgcatgcatccatggctgtgtcctgtgtagtgtttgcatgtcatcaaaaccgcctcttcagcatacacattgcctaatgccaagaagcggcgacgcacatacgcacactttgcacaataacctctctagatatatttagctacttgcacatgtttatccacttggctactctgtctaccgctataggcagatacatgtgacatataaaagtcgagaacttttataattaatgtttgcatttcaaaaaagataaaaatccaacgcttctcgatatgataggtactacgtaaaaagtatttaagtattggtacagatatttacgtaccaaagttaaaaagataaatgcacttagttgggagaaaatggtagaattgtccctaatttaattggtaccgcataggtactagttaagtcatttactaggtcttagtgtttcttatttgcgtggtttcctctagatttatgttttgtttcagaaaacacgttagtagtgtaaaagttattgtttgtgttcttttctctagatttacgttatgttctaaagaacacgtcaaaaattatccttttaattcatttgagacttatatttattttatgcgaagagattatattgtgttttaataacataacctgttaaaatataaccgaatgtttgcatcgttgtaagttatacattttattgatttatccgtataaaacatgaagtaagcttcttccacactatctctccttgtgggtgcacccgttcaaaccctagaagaacataggaggagatctcgattcaatctcttattcaaggaatttatgaactacataaatagctaatcaactgcgtaaatatgccctagatatcttaccgatacgcttgcatctagccgtcgaccgaccgatctcatctcctcttcaaaccctcaaccatatcggtgcttctccctttgtctcctttggtgaaccagttcaaatcctataacaataatgaagtgaaagtagagaagaaaggagacatgatctttgatttttttccctcagtacagaccgaatcaatcgctaaatcaacggattatccatgattcacgcttttttattgcatcaataccaatacgtacaacaataccaatcaatggagcctagtattcaattcatatgaaatgtccatattttactagttaattactccactgccatcacattattataattttattctgtactttgtccctctcttgatcaatagttcatattgccccacctctaagtatatctaattacgccgcaaacactgtaaaaggtctcataaaagtcatgctttatacgagacaccgaaggtctgacatgatgatatacgtggcaattgaggtctactccggaaagatatgagtgttttccgtgatatgatgtgcttagagcatggccagtatttggtccataggccctattggtgggccctacagtgagaatagtatcatgtgacaatttttgcatcgtataggagtagcaaaggtcctatggatagacccactatggatggcgacaacgagttcatgatggatgcgacaacctctgatagatgagtcttctctctctctctctctcccctttaaagcaaggtactatggttgtattcggttcaaggttgaaaacggctggaacaagtcccatagtgtatagagtcggtccaatcccattttgtctcttatataacccccttcacattgaacaccgcaatgctcttagtcacgtggcatccatgtcacttctgcaagcaacacatgaatgtttttgcatgatatgctactttatgtgggcacctgtcatacgtccaattggcaagggatgattggtttattatggtgcgatgtaactagctacgctttgaaacataggcatctatcttgcgcatgtacgtcttcatatttttttccatatagtcattagagcatttgcattgttgcatttggaggggtactagaggtgagagagaaatatggagccgccctacatattgcaacattttctccaactagtctcatcaatagatccaacactagccatagagccatattcaagtggagagaacatgcgtagcccacatgtcatatccaatgtgcaacttgtaagttggagagagttatgtaggtatctaggatgatacttgtatgattggtttacacaatgcagcgattctcattggttactttatttgacatgtaccccacacctaacaccccgcatgaattatataatgtggatgcttttatatcccaagttgtatacgtacgtgtatagtatactaggttgtatttctaatgtatgtttattgaagatatctgtgttgatttgctttgatatatattacatatttcctatattcctttttttattaccatagtaattattttaatgtttatctatctcgagaag

SEQ ID NO: 42173 - DNA, 2443 bp, Oryza sativa
atgtaacgaccctcattgtttaatgccacttaaatagttataatttttttttaaaaaataaaagatatattaacatgtgatatatcacttagcaaatatacaagtttgtccgaggtatgggcctgagggtatgcggagtgaggggaatttaccttcccatcctgccacgtggtcctacagcttggccctacccccacacctcgcgaatcgcagaagcagccaggggacctcggggtgccacgtcatgcccctcgagccctcgcgccgttttgccccgagtcccccgcccggctgccatgtggaggggggagcaagcggagaagggacccatgttgtaccgctatcaatgcgtgcggcgccccaactgcccctcgccgcattaaatgcggtaggggcagacgtgcggtgccgcccgactgacgcgcgtcagtcagaaatgaccggtctgtgaccggcctgtcgccggtcgcatctgactggacgggcgaccatgcccccacgtcacctctgtccccggcggagtggaggtaggtatgacccgtccctcccctgtgtcaggcgggggacggcgctgggtcccactcaaggacgagctgcggcttagctttcaagcgaaggcacggatcaagatccggtcaaggtagggtgggtccccacccggtagaagagtagatagaggcggtgcatgtggtatccccttgagctatgaaaggaggaccttacccaccgagaaaaaggatgattccaagcagacctaagctctagggaaaaagaaggagaacgttctccggagcttagggacccttgtgattcaaccataatcccacacacaggagtagagtattacgctccatagcagcccgaacctatataatcctctcgtctacgcgcaactagtaacgttgagggcggatacacgatctctagatgcgagccctttcccccgaccgaactcacaaaaggggatctcacgatctcccgctagagaggttcactcctcgacaaagttaaaatttaacttttacaaattaaaaaagacaaattaaattgcagttagttaaattacatcccctctaaaatttagaatacccatctacatctaactgaaactgccaacgttgcttgcatccatgcatggctatgtgttacatgtcatcaaaatcgtctcctcacacacgttgccaaatgccacgaaacggcgacgcacatgcttaaaatgcatactcctacctccctagcaattgctacctgcacatgtttatcctagatgaataggacaagagtgagcagcagtccggccaagtctacttggctcttttggatgtacgctgctaccagttgttctgccgcttgctaggtatatacatccatgggaaactagctaaaatgtgacttagaagttagaagtagcggttttcgaggaggtaaatgcgtgacgtggttggcaattgggttcaaccgaagaaatatgaatgttctccgtgttatgggtgcgttttactcactcgtcatctatggtatacttctagcaaaaaaaacgtgtgttctccatgatatgatacacactttgtgtgatatatatgatatatcgagttgataagacaccattagttttttatgataaagttacattttcaaacttagacatctatcttaagcatgttttgatatgtttctttctatagtcattatatctcgagttttatgactacgatatgcttggttgtatttgtaacgctcgtttccacgaacaatatctttcttaatttactttgatatttcgtatttccttcactactttattttaatgtttatctatcttaagaagggtttgatgtatttccttccatagaaataacgcataaccgtttgtacatatctgtttattgtgtttagtcaaatctattagatatgtaatgaataaggtgcctcataacaatttattatggtcaataataagctcatccattttaaaacttgtaaacttatctctagaggtgtatcaaagcaatcgagttgatcaaaaaacaagtacaaagaaagaacttggttgcaggccttgaccggaaaccgctcttgagcagttttatcggttcgcaaaaacaattgaaaaccattgaaatttgaacaaatttggtaaaagttttgaaactaagtttggagttttttttgtaaaaaaaaaagcattgctgatttaccaagcggtttgtcaacatgagttagctcgaaacctcaaaatttcatgaaaactgatcatttttatcaattttataaatccggctaagaaataggaacctcaattcaggtatctgaattcagacgaagaggatttccaaaaacatgcgaaaatgattttctacaaacagctagttaaagtcgggcgtctgtgaaatggatttccaatggaaaattttttcataggtggctacgcaacctaccgaaa

SEQ ID NO: 42174 - DNA, 770 bp, Oryza sativa
cccagatgcagcccttggtaggtcaggttctggtttaccgtcgccctgttcgtcagaatcaatccaagattgtcgaaaacaagctcgcaaaattaactactagcagggcttcgcgcagatgagaaatcaaagcataaatactgcagagacgtgtacgtacgtgcccgagcaaagccgtcacaaacaccaagaacaagcctgtcgtcccaaggctcctcgtctccttcacttttgccctggatttctcacaagcacacaaacatgatcaatcgaacagaggagggtgatgactactgaccagctagacatgaccaaattgatcaatttaactaactatttaagtgtatcaatggttcaattgaacagaagagggtgatgatgatctgactgatgatcagctaaacatgatcgaaactgaacaatttaagtgtatatatcaatgattattgctatacctgttggcgaggagggtgatggggacgaggacgagggtgccgatggcctggcggtagacgacgaagatcacggggctgacgccacggccgaacatggccttggcccagagcgtcatggccgcgtagatgcactgcgccgccaccatcgccgcgcacggcgtccactccctcgccgcggccgcgagcatgagtgccatggtttggctatggcctattggcctagctcgatctcgatccggcagcgcagaattgatgagatcgccggcgccgcatacagatgcagatgcgcgcgcacaagacgctgggctgcaggaa

SEQ ID NO: 42175 - DNA, 684 bp, Oryza sativa
ttcctgcagcccagtggtagccatacgttgcgcttaattaagcataagagtggggggaggagacggagataggggtggtgggggcgctgggagtagacagggactagagaggtgagagggaaatgatggtcacgtcggcagggcgggggtagtgttggctggcgcgggtgcccggccgccaaccgacacgtggcagggggtacggcaggggccctgcgaaagcaaccgccacgtgatgcccagcagggcggtgtcagacccccgaaagggactctcacactcacgcacccaaatgcccaacccatggcctcctctctcatctgcgcttcggagtacagtacagtacgtacccaagtgcgtgcgaagtttccaaccgacaccccccgcgcccggcacgcccgcgacgacacgctacgcacgccgcccactctctctctcgcgagatcacctcagtaccacgtacgtacgcacccgacccgcgtacccggcaacaagcgggggtgcacgtagaaaatggtaggagtggctccacacaggctggcgcgcgtatttggatcagttaactaatccccgccccctcgtgggcgctgctgcagcgcgcgattagttagtgtatagttttagttaatcacggcgtactcggctactgctgctacggcgacgaggaaacggagtcacgtgtat

SEQ ID NO: 42176 - DNA, 677 bp, Oryza sativa
taactaccaccgcagcagcggctgcccccacgcgccagccatccgcaccgcacaccaaccaatctctctcattggcaactgcttttgcttcctcttccatggccaccgccacattcccacctcacctcacctcatcattgattactgcgtcaaggtagtagtatcagcagcagcagcagcaggcttgcagtgtcatcacaagtgaaagtgactggcttccggtgtgtagatatagtggtctgcagtaactttatcacataccagcatttctcaattctcaggccacgaaagcaactgccatgccatacacactgtgcactactaatctcccttcgcgcactcattggctcatctctcatataattttccattcccatttacacagccacagaaaactaatcactgacaggtggcccgtgaacagtgggcccatggggagtcatctgttgacaatataatgggggtagctacctaggtagcgtgtagatgtaatcgcgtttcgcatggaaaaaagtcattcatagaaagggtgccgggtatatataggatcctagctatagatagctggctagcgcccttttggagttttgaccagacccgtttagagtgtcaattgagcaagctgtggtcaagctgagacagctcacttcaagctcgctagctgtatataatgtata

SEQ ID NO: 42177 - DNA, 709 bp, Oryza sativa
acattagcgctatacgctattagcgccgaaacccctgcgtcacgagtcaagcgcggacgcgcacttcttccttatccttcgcgcaacatgcttattcccgatccgttgtgttgccagctgcttgtcgccgcacccccggaaaagagggtggcagagccgatggaggtgtggatcagtggatgggcgcggaggttagaaaggacattggggccgacggggcggtcgtagcttgctagatctccagatcctgactgccaggggcggatccagcatgggggcggcgggctcttgagcctccactactgtcgtgaagactatgaaagcccccacgaaggtcccagcaaatttttttatcatatatagatgggagggggaactgtaactttatctagtttgtttagatctgccgctgctgaccagcgacggcggtgtaggatatggctcgaaggagtaggggattgtcggccatagctgttgtcgacctcgagtactcgacagacttgacaatgacgaacggtcaaactatggcctgttggtgcacactatggccttatgtggagcaagtgcgttcttcttcatctttttgctctactaagaaaattggatttggtcttatggttcatgtgcatgaacatacagaggaagaaaaaaaaaatccaattgtgcttaaattatgttgaatttgttttgtctatctactacttgtttc

SEQ ID NO: 42178 - DNA, 552 bp, Oryza sativa
tcatcatggaagaaaagaaatgaaactaaacaatgaacaatcacaaaaaacagaatagctagaacctttttggaaagggacttctttgttcggagggaattcaggaaatgatggggaagcctttgcatagaagccagccttgatgaactgcagcaacaaattccaagcgacaggcgacgggcgacgcggcttctcccacgccgctacgtccccgccgccgccgcccccgcgtccgacgaggggaacaacaacaacgtcgctacagccacagccggcggtgggggcgagaagaggagcacagcagcgcccacggcctccgcgttgccgtccccatcctcgtcggcttcctccgactgctcatctgaccgcgacgagggatgctcctccgctgacgccgcggcccagctttcgctgccgtttgaggcgtcgacgaccgccgcaatgtggccatccctggctgggcggatgcgcatcctggaggtgggatccaccatgcggcagtgacaggcaaagacggaggtggctgaggcgggcgggaactgcagcggctga

SEQ ID NO: 42179 - DNA, 670 bp, Oryza sativa
atgtatcttgtttattttttctgatttatcacctcgccatgtgctatggagtcaggagttcgttcatctgatccccaccaccttccatggtgatctcaccagcaagagagtaaatacaactctaccagtcagcaacgtcagcacaaaggaccagcacaacgctagtacaattattattgtcacacaagttccatttcatgtatactcgttgtctgttccatttcatgtatactcgttgtcttcttcagttgtgattgctgcaggatgagaaattggaaggtcactggcattttggtactgcttgtaattggcagaatgatgtgtttgtgttgtgtgtgtaatgcgtgtgaaactgatggttactttacctctctctctctctctctctctcgcaccaattagcaatggacccgttcttggattgtccttggcgtccatctttctgtcggtagagagacaggcttggtgggagcactgtttctgaggagatgcagaaaagcttttgtcgtagggcgcctttgaatcaaaggatttataaaggaattttatagaatttaaatcttatagaaaattttcctatttgaccatttgattcaaaggattgaagttttccaaatcatatgaaattcctatggaatgacacattgtatgtggatttgggaggaatttt

SEQ ID NO: 42180 - DNA, 672 bp, Oryza sativa
tcgtgccacgtctggctacgtggtgtagttcttatgttctatgtcggcatgtggatttgcttgtaattcgtttcgaacttatcgatgtgtttatgtttcgtcgtgtaatgtcagacttcggcatgtcatgtctttaggtctcgtgatgtaacgtcggactaaggcgcctaacgtctttaggtatgctgatgtatgtcggacttcgacacgtaatgttatgttatattattgaactctacatatatgttaaattgcacgtcatcgttatgtaccattagtaacgtttgctatatttaaatagcctgtactcttgttgtacataattaatctcatgattttattactatttcataattttgcaagttatcttttgttttacattactattttttgaattgttctaacacgaaacactatatttttcagagatggcacgtcaggatacacctcagttgttggacccagcgatagatcaccgacaccggtctcaccttactgcagtgtagggggctcagcttgggacgttccgggcacggacgtgcggtgagctactcacggttcacgactcctttgtcgagaggtacgaacagtgttttactataagttagttgcacgcggtcgacaagggactcgtgcactacgccaggagcatcgccgacgccgcggtaggcg

SEQ ID NO: 42181 - DNA, 699 bp, Oryza sativa
ttcaaggtaaattgctgctagtagaactgtgggtttccagcccttttaaccatggaaagaatatttgctcgtatgtcacatcaacatatgatgtactagtgatgatgacagagttacgtcgaggccagatcttaccataggacatgctacttatgaattatccaggtgtgtcaaaactgcaggcttttcaacattcagcaaggaaacaaacatatctggcatttttccagatcaccagtatgtactaaaaatcatgctcaatactatctacttgctacataataaagtcttaactcttcatgcgatcactaaaaaaaattggtgactgataggaacttgcaacagtactcaataatggtcaataaattttaataggggatacagaatgacaagtgaaaggaaggctagaggatcccaagaacttatcgaatccaacattcgaatcgacactacgttactaatccatgtagcggcatcaaaggtacaaagaggactgcatagaagttgcaataactgcttgtgaaaatatatgtaaccaacattctcaaccctcgaatagctcgggcatgactaaaatcttaggaaacatccttattgtacccgcatgcacactttaacaaactctgtagaagtataattagatccgttcatcgtctactgtgacaaccgacttttggcaaaactgaattccttacttat

SEQ ID NO: 42182 - DNA, 1295 bp, Oryza sativa
agcagctgccagattgcaggccttgcttctcgccatcctcacaagtcacaaccactacttgatgagcaaaatcactgtactctttcagctagatagcgtgtgcctctgcaagctagaaggcaagtgcagtgtgtgcagatgcagtgatgctagcgttgcttatgtaggaggagaagccgcaaagaacaacgcaagtggaagctgacgcgatcaatatccggccatgggagtcaacctttgcgccgaacgtactgacgtcgtgtggctccggccatactgccgcctagtgcctactggctaataactgtgggcaaaccgcgactcatcgaggttgagatgtcgcggtggtgggtgattaggagaaaaaaagggggagaaagatatatgtggttgttgtctggttgattggaagctagtggggagagttgttgtgaacctgtgaaaaatcgtgatgcgcctgccggataatatgccggtgcaggacggacgccgccgcgggatgttgggtgttgccgtgtgctcggcgcaggcagcgacgaccgtgaccacggctagccggctggtccgtcgcacggggttctgaccggtaattcgtcgccaccgccggccgcgacgttctcgcccgctgcccgcgctgctggatttagccggtgctcatgctgtccgctgcctgttgcagagctagcactgacaggtgacaggttaaacctcctttttttgagggaaaaggttaaacctcctgtaaagcagaatttaggtggtagacttttgtgctcacaaaattccatcggtttttccacgcatctagctagtatcgtttataagtcatcaagatggacgccacaggcagcccacaagtgaaaactttgtagcgttgacacagaaatcaaattaaatgcctcaaacggtcaaaccaagtttatttgtacgtaagtgtaatcgtgtttttagtcgttaggggagtgcttacagagcgtaaccaagagattactaatcacctcctaaaaaaatgtctttaggttttctagtaaataaattgatctggatctttctgttaaactaacgagtaaataaactgatcactttaaaagaaaagcctaaattttataaaaaaataaaaggatatgttggatccaatttttcacctaaaatccttaaaaatcagttttagaaacaatatattagatgctcaggtcacataaggagattctgaagatcttgcaacaccaaagaacaaaagaactgtgattggttgagtaaataatataggaacaagaatctgtaggggtgcagga

SEQ ID NO: 42183 - DNA, 709 bp, Oryza sativa
cgggatggggatgcgccccatcgtcttcgtcgcctaccgccaggggatcgccgccgccacgctcctcctcgcctcgctcgccgccagggggtgggacctccgccgccacatggccgtcggcgccccggcgttcgccctcctcttcgccgcctccctcgccaggtacacgaaacttacttcgtggctgattttggtacgcacacccttggatcgaatcgggcgcaggccgctcatctcccggttgattttggtcggcagcgcgacgggtctgtacttctacttcctggggctgcagctcgcgtcgccgtccatggccagggccaccaccaacctcgcccccggcattaccttcgccatcgccgccgtaatcgggtaccacttcttcatcgtccccatctccggcggcgacggcgccgccccctagtccggttgccgatttctccccctttcttgggctggattgccacgtgtcaccatgacatgtggcccactacgacggcccagttgaagttttgggctggatcgtttgaggcccattatttaagcgattctgaagggttttaatcgttcaaattgcatccgtgcgcgcgcaggttggagaaggtggatttgaggagttcgaggagcttggccaagatcgccggcaccgtcgtctgcctcgccggagcgatggccatggcgttcttcaaggggcccaagctactcggcg

SEQ ID NO: 42184 - DNA, 645 bp, Oryza sativa
ttcagccatgcggattcaattggggaaggatagctatggtgatcctgcaggtaaaccataaaatgtgacactgaaccggcaactgaatgtgctaaaccagatccattagcaaaactgtttgaaccatcgcaataccctgttcagattgaactaacgaagagttagttttgtgattaattagcaaacggatagttgaatattgagaaaaaaaacagtagcaacctcttaaatcatgactaaacaagtagcaaaccagactctactgataagaaaatcaccatataaaaaagagtgaatttcataaaaccctaggttttgaggtacttataacacaaacatctaagttctactatttgttttgagaaaccccatgttttggggcaaaatgtttcaagaaaccccatatttactcaaatactcataatttaaatattatatatgatttttagtatatgtttaagcaccaaatacacatctcatcctatataatttatctttttcctcactcttgagttgcacaattgataaaaacgcaacataacctcattgataatggcacataacatattatttatacctataaacaatcatactacccatgacctatgctcgttaaaatgaggctagcatttatatatactcaaa

SEQ ID NO: 42185 - DNA, 772 bp, Oryza sativa
ttcctgcagcccatactgaatttttaaagaaatttaagaatgattccatttacaacccagttacagttagatgtacagtagttacatctgtacttttgttatttctcactgtaactgactatagatagatagctctttatatatttgtaacataatttagagtttgttataattggggaaatgttttaatgtcgcagtataagtactgaattttttaagaaatttaagaatgattccatttacagcccagttacagtttagatgtactatagttatatatgtaacttttgttatttgtaactgtaactgactatagattgatagtttttgttacgagtttttctgaaaaagttacatacttttaactacttgatctaaagaaatttcctattccaagcacttttctccaaaagaaattcactattccaagtgcttttctccaatatttttacagaactgagttgtttttgtttgatttaaaagatgactggcagaatatggtgaagtcaatggggaaaggtaaaggtggattttgtgctaggtaatttgttacctggaagattatgtcttgttgatttcaacttcttgacctcaatgttcttggtaagaatttgcttcttcttctttttctcgttctcctcactgtctatggcgtgctcgatttgttttgctcgatctaggggatttgtgcgaactggtgtggtctccctgtgttattttgcttttttctaacctttattggatgtgaagttatcattatgggccatgatgt

SEQ ID NO: 42186 - DNA, 629 bp, Oryza sativa
atctagctactttaatgtcaaaagaaagaatatccacggctcaggcaacagtaattaagatgatcatggaagaaggaaaatcatttaagtcaactacagagttgacaatcgaaattgacaaatgaaagggacttgcaataggccaacagcttgataaggtttacaagcgaacttgcactgattaccaatccaactaaaagcaagagcttctggaaacctccaatgccatgcttcattgagcttcaaaagtcgcttcacttatctttgcagattattaggtaaggccttaagcatcggaaagacttttttaagcatcgaccttagtggtggcggtggtggtattggaattgatacaaaattataaaattcgatatttcgatgtagatccatatatatatttatgccgctcctttatacattcatggaaaatttgatgaatgctaagaaaaataaagttcagcaatgcatgcttgtagagtgatggcatcgtataatataagttgtcaattaacttttcatattttttaataactattcaatggcatctgtgaaacaataacatgcctcccttaacgtgaaataatcatatgttgaacatgttattatctgtgcatatgctacaacatgct

SEQ ID NO: 42187 - DNA, 703 bp, Oryza sativa
ccaaatgcatctcgtcgtaaacgaaaatatggggactaaatgccaagagcttcaacaatgcgaaaatataaatgctttctcatgcgaaatctcctacggaactgattatcggtatataaaggattggtagaaaaatatttagcaaacaatctgttgtggtcttctgcatgatctctattgatgtacctccagttgtagcctctacgtcgattagaagtaccagcttcttgtgcttgcatttgagcttgaagttcagcttcaatttgagcttccatctcagcttcaatctcagcctccataggatcattgatttcttcccacatcaacccttcaagattgtcactagagctagaatcatctgactgactagattggtttggtgactcgctggacttttgtttgaaagtgggaggaaagctgttgggatgaagttgaaggaaatgaggatgactggtcctgctgaaccacatcacctatttgtagatgatacattccaatggctagattccaacaactagtttatttagtttacaacagctctattttgcttttgcttttatcagtgctccaacagctagctcttgctttttgtcaggttttcaatagatatgtatgcttttggcagtgttccaccatctatcttttgcttttgtcaggtttacaataggcacagtacaagtgatgtaaaataagcagatttggg

SEQ ID NO: 42188 - DNA, 698 bp, Oryza sativa
acatagtaagtagggtaaatacgtatttattgcattcgtttgcgataatatgttttgtatgttttatacgaagctaggggtattgtgcagcctacttaacactatagtttgtattagccgacgttggttcgatggacatcctccagaccacgatcatgttcctccatcgtcggttttaacatcccgtatagcttttaaactaaaaaaacagtagctagtcacactattgctactccctccgtttcatattataagttgtgtatatttattaaaaagaaatatagcaacattcagcacataaaataaacatattattaaaatatattcaatgatacattttataaactaatttaacgttctagatgttgataattttttatataaacttggttaaaatcaaaataattataatataaaatgaaaggcgtaagaaaaaaaaaactcgtgtgaaattcatgtttccaacggaagaaaaaaaaagaaaaggtgtggagaccggaccaccggagagactgaacgtctggaacactcaaatcaatcttccaaacggaaaaaaaaaagtgcagtaaagcgcaggcagaagaaacggcacgctatctggcggccgtccgtccgttagtccgttactcggttaggcggcgggcgtccgcgtgcgtctctctctcccccctccgcttcccttccctccacctgcctcc

SEQ ID NO: 42189 - DNA, 2143 bp, Oryza sativa
gtaacgttttgtttggattaggtcaatgttcttttagggttaggtttaggatgagcgacttcgtaagtccgataagattgattcaccatggtgaaaaggagagtggcatttcacctattaaaccaagctaattgtttgtgacatttcttacgtttctccatattacatgtaagatgtcggtaaaagttaaaaatcacaatcacaaggaatcgttatgataagctttcaatcgatctaacggaaagaccaaatcgttatgacaagcttccaattaatataatagaaagacacatgtctacgctataaaatatcttttctttgaaagaaaaaagaaaatctatggcacgattgtaatagtaggcatatttatcctgctaattcatatatgttggatgtagctaagagcccctttgaagtggattattcccatggattatttacgctatgagcctatgattaaaaaaatgatttttcaaaaaaaaagtacatcatttttgtttatatgcttgttctaagattttacccgttaggttttaatgtacaatattcagatgtcccaaaaaaatatgtagaccatctgtcagcgttcatcgatatttcttgagctccacaatatcgcaatcgatcctacatgtaatatataacaatatttttgaaaatgtaataaataacaatatttttgaaactcattaactacatgaccattgtttgtttcaacctgctgcacataagcacattacggatgccctcgcagcttaatttcgtcggacaattgcacattaggatggccttctaacgtaaaatatatacagtacaggtcaaacttaattgttacccttgtacttaagttgctgtactttgttaattgttacccttgtacttaagttgctgtactttgttaattgttacccttgttcttgcaaacgcagggtgtagtgtttatcaatcagatggaatacgagcatatagacaaccaatattttcaattagaaattaagaaaaaaaatcaaattagagataagatcacaattcatgacagtatgatgcaaactctcaaaaaaggagagcatttcatgatcattgcaatttgcaaactccaacagaacattttccagcacgatcaatttttttgaaggttcctattttgtacgcaaaatgaaagattcacaaaactatatccgatattctgattgctagccaaaaaaacagaaaagatattctgattgctagccagaaaaacagaaaagaggggaagagaataaaggatctacggattcagacagaaatttaacatctccccgaaagtctccagccacactaaacttccaaacgaaagaaacaaagttacatcaatttaaagatttgagaacttctcaaatcgaacatgcaacatcctacagagctctggagtctctgcccaatccaacaacccaatatcaaaattcttaatgaaccggcatgagcattcttctgatggtttgagttcaaacaaatccaagaattcaggtgtcatcgacctgggaatggaagacaaagcttggaaatgtagtggtgatgtccctgcacacatgtggcaagattagcttgtgctatagaaaaacaaaagtgtctacaacatttttatagacttgaacatttttatgaacacctaatcttttttaggaaaaaaaatacttctttagttaagaacaaaaaaggcagtgtgttattttttgtcaatatatgaagtgctgttgtatctgtgaagtggattgcttgaatctgaaacatggagcgaccaactcatccagtagttcaacacatgtttttttagaaataaaaatatgcgcagtgagttgacaaggcatgtatttaaaatcatgaacttgttcttttcctcttacatattatggattagataaaacaattactatttaaaatcaagagatgatacaacatgctctcctcactcctccatgcgactctatgtgcatgcgcaattttaattagaggatgcttgatttacacatttcaagcatgcatctctctccgtaacattctttcctttgcaagacattgcaatggcaaataaaatttggaatgggaatccgaatccaaccatttttgttcaagaacagcagtaaacattgccagggctgcagga

SEQ ID NO: 42190 - DNA, 637 bp, Oryza sativa
gcacgcttaatagactggcacatacagtcattctctgtttataaaaatccagagctgtcccatttttaatttcagtaaggcagcatgctaccccaggatcaggtgagcagttctgttctgtctgacagactggatctgttgggtgacaaaaacttctttttcttgttgataacatgatctcacctaagcctccagattaattgatgaaaactaaatagtattatcacatatcccccctcctgatcgcgtttcattttgcctattttaagcaatttcagttctatagttttttatcttacaagtggtgccagagctggttatctatgatgacaataggtgtgcagagcatcgactcaagcctgacattgatgtggacattaatcaaagatataaattctacttcctccgtttcataatgtaaatcagtctagcaatctaatagatatatatgtctagattcattaacatcaatataaatgtggaaaatgctacaataacttacattgtgaaacggaggaagtattaatattacagttgtacttgcaaactctcttgactaaatcttcaccacatttatccccacgtcggattcgtccatttattctcgcaatgaattgccacctttgttgctctacat

SEQ ID NO: 42191 - DNA, 857 bp, Oryza sativa
aaaaggtactagataagatgtcggaaaagcctagagaattctggacaaggccaaattagagcgggaaataatgaaatggtgcaggccatagggcggaagacaagccatggcagggaaatgactaaccaacggtcagatgttatttggagacatgtttggcaggaaacaatacaggaaaggaaaaatcctaaattaaagcatatgcggtatatagcatatccgaaacttagaccaatataatcctagataactaatactatttccatgcaattagaagcattcaattttgtccagtatagtcaaatagtctctagtgttcaattgctcatgcttcattgactaggcgcgcctaaatctgtcgcttttcaaaacttccaaaagagaagagcgcgatataccgaatcagagcaacggcatgcagcaccatacaataattaacaagtttgcaatcaatgcagacttacacggtcggcgaacaggctctccttcttgctggtcttgaacagcgccaactgaaactcctcctgcacaaggtcaacggacaaacacagtcagtgattgcatacaggttcacaataacatgccttcatcaatcaaccaatcaatcaatcccaattctacgatacaaaatcgtggcgcgaacagaggactccacaccaaccttgttaatcagcccgtcatcaatcacagcactgcttatcttcttgaagagctcgtacagcgcctcgacctcgctcacgctgactgcacaacacaaggccacaaaatccaacccaaccacacacaccagtcaaattcccccaatgagacaggctcagcaacaaaaggaaggaggagtacggcgccccaaccaatgg

SEQ ID NO: 42192 - DNA, 1748 bp, Oryza sativa
aaagtgatactagatacaaatcctatgtgcgcttcgtctccacagggtatgcgccatgtagctttctccacaggtgcagcatcaagatctttaagcaaccatgagcaggattcaggaacagtatccttctttctgtaacgtagaagcagatctgggctaccaaactcaaccgtcgcataaccactggcatcaagaggctacaaaataacatcatcatagtctgctaagtgtctttcacagaaatattctgacaaggaggcatataactaaaaggcagcgtattgtcagacaaatttgaaaattctttacaaaatctgcacatgagaagttgaccatgatataaaacctaaaataggaccagatcaagtaaaaggccacatgttttttgacatgcttcagttgtttatactaaatatgtaaaattatatatatatatatatatatatatatataggtaaattaactggtgctacatggagtatgggctccaagattcaaattgagtatatacccaatttgaatgagtatgaattttttttaaatgtttagatatgaacattaacttctttactaacaagttcaaacaagtttgaactgagtttgaacttttttttggttagattttggttctaggtatataacatccaaacatataattcgttaggtatgtaataatgaattgtgaaacaaagttgagtttgagttgttttgttgttaggtatttgtatgaatcaaattcatatacctagatatctacttacaatttgtaaatttttaaaaatttgagagaatttgtgtgttttataccttggagcccgggcaccatggagtcccatatgggtatatatatatatatatatatatatatatatatatatatatatatatatatatatgaagtgaccacaatatatcataggactagaacaattccaactattgcatgcatccaactttgaaaaccaattggacagaaacatatggtgggagaactatatattactttcattacaccatgtgagttataaggcatgtgcagcaaagagaaaacatgcaaatggcacagcagcgaacatggtcactgccagagaacttagcttatttgttttctttattttgttattccttgaaccatccactaattacatgttgaaatttcatatgcaagtattctgctacatattgatgttagaattccatagaaaagcatttttaagtgcactcatagatctttcttttcacaatctggctttgttgatcacatcctgcagagtgtctcttatgtatcctgcctttaaaaggttttaaaaattctcaagtatatgcgaaaatatatatgatagggatgtacagtttgggaaagtttcaaactcaactcccaaagtaagaggcagacacgaaacaaaaaatatagaacgaatggtgattttcagtgcttaattactaatcttctggcttgtccctttttggtatattgataaataatacatttgaagctaaattttgccaggatatgacattgttctaccttacttcaatgttctttttagttattctggaaacctattatgtctggatgtgcaagaatggtacataaaggtcactggtaatatatggcctgtgaattagaggggaaaaaaatgtagccatgatgtatttctcagtgtctatggaggcaaaatgttcccgtaaaacaaagatggagctaataaacacgtgaggtgttgaatatttcagattaaaaaaaa

SEQ ID NO: 42193 - DNA, 1329 bp, Oryza sativa
cacgatgttgagcaagctggccgatcaaggtatcgaggtatgaatcagcgacatatctcctagagcacggcatacacttgttgaatttctggctggtacctgcctgttcagtactataattagtactcacccatgcgtacatgaacattagacaactactagctaattaggagcaaaaatgtgcttaaatattcaaagcagcacttacatagttattaatagcaaggcatattttatattgcagacaatgtacagtgaactaccactgcactacataccatctaagtcacttacagcaacctaaatctaacatgggatagcttcaaagttcctgctcaattttgggactaactacatcatcaacgagaaagacactcccacgaagtaaattataccatttccacagttttctgtattctaatctgcactaataatacaatggagcagcagcatgccagcatctccgtgaattggtcaatcaattgacagtaaactaggggatttggcattcattctcaagtgcgcagccaaatccaattgaacaatttaacacaataactccgcataaatctgcagaaaaatcagtatgagccaagagcatccaccacaggtacctgcccaggcgatgacgacgacgacgaggcggccgcaacgcccaagacccaagccacgaccacgacgagcagccacggtccgctcgccgcggccatggattctctttcagcagcagggcctctcacacagagcagccgctcagagcgccggaggccgtggtggtcgagccggatctaactacggggacgcccggtcgcaggcggcggatcacaaacggtagctcctccctccctcaactgtagtacaaccggccaatcctccctcccacgatccaacggcagccgccggggggcagtgttggggatcgccgtcaggcctcgccggcggcgagtgtggtggggtagagggagaggtgggaggccgcgacggcgacggcgacggcggcggcggcggcgggagctcgcgagtcgcgtgaccgtttccggggaagacgacggagtgggtcacagataaggagggagacgtggaagcgctgtgagacgttggattttaatccgatggctgaaaaggttcgcaatattttgaggagaaaaattcttgctcctctagggattaatatttcttctatccacaaatataaggcatttctagcgtataaatttaactacaaatattagcattttctagtgtacttttgttatagttccctgcatttgtggacaaaaaatgtatttgacgttttggacgagattttatcaattttttgaaattcga

SEQ ID NO: 42194 - DNA, 1705 bp, Oryza sativa
ttaggtaacaacccaatatatttaatcaccaggcacttaacaagaggagataaaatattcgtgagaaattattcctatggtcatcctcctcaccgaaagagggcattaagagcaaccaagaaacacacattgagataaaaaaaaaaacaaggtgcaattctgtaagaacatgcattacgatttcttgcaactggcaagtaatgaccaaattgtcaagcatgattcctatgcagcagttatacatatttctaagtcagtgctcagtggcaaaaggggagcttttagtccctaaacttaccagaagacaaaaatctcacaaacttttcgccaatcgagaacgtttccagtacttcagaaaaccaaagctgaaaaggaagcaaagcaggttagcacaagaaagctggaaaactatgaagtctgaactgaaaaagagcaactcaaattgtcctagcatctaagaaatcaagaagcattcacagaccttgagcctgcaacaaactaggaattcagttcgccgtcgatcgcctcgcctcccgctcagtccgctgtgatcaaacagaagcaaatcaaatcaaatcactgagcccaacaccaagacagcataagaacacctaactttaccattcaacgaacctttcacctcgaagtgaccctgaaactcccacaagaaactccaattctctgtagtcccgattgaccacgcaccaagaaccgagacaaagggtaactaatcgagctcgggacaggcgaaccaccggccacggacagctccggttcttgatctctccccacccaagaacgccttccacaggataaagaaaagaagaagaagaataataagaggcgagaagggatgagacggagacgcgagagagacccttgagccggcgaggcgacaggtaggaatccagggggaggggaaagaggacaagggaggtgaaggaagcgtgacatggacgggaaggaggaggcggacttgctggcctggtgcctctgcgcctgggtcaaagaaaaaagggtgacgtccacctcgtgcccgcacaggtggcgcggtgacgtctcgcttgtgcgcccgcgcgcgcggcgggcggcgcgggaggcgtctgcccccacgtgggggcggcgcacgccgccgccgcgcccggcgtcgcattccgtcgaacgcctcgcgggcgaagcggggtgtgtgtgctgcgtagtaattggaaggaaaaaggcgagggagaccgtgcgagtcgtggtggagtgttgactcgcaagttgactagtcaacggtattaggaagtactcgtcacattcctcgtgatcacaatccgcatatttttcaaccaggttggaaaattgaaaattttggaatgcacaagttatcatgataataggttggttgcttatcaattttgaagaaaatttgtcaaagttcattggatttttttttttgagaattacatagtacaacgcagacactcatttgtcaaagttcattggattttttttttgagaattacacagtacaacgcagacactcataacgcacgcgcactcacccctatgaacccctacccctatgagcaaatcctggagagattgacgaagtcaccacaggcgcctcgctacgcacgcgcactcaaatcctggagagattgacgaagtcaccacaggcgcctcgctacgcacgcgcactcacccctatgaacacacgtacgca

SEQ ID NO: 42195 - DNA, 1880 bp, Oryza sativa
ttgaatccaactgggggagaggtactcgacctctgaagcgatctagccaacgatgtggatggtgtcggtagagtggggtcaaccaaacaatatatatacgttgccaacatgcttgatgttggcggagcaatggtacgagtggcaagttgccaagtaggcggcaagcgaaagccttcccttgcgcttgttgggtcgacaacgacgacacttccaaggaccatgaccactccttaacggcattttttttgcaccctgccctccgttggcgggatcctccgggtaaaaactaagtccaaatccacacatgggtggtggcgacacttttgacgtcccgttctctttggaggtgtcgtttaggagatttcatttttcatctattagccttcaggcagttggagtgttttggattatggcgggtatgtacaagggacttctctctcgccctctccttggctagtggtgtccgggaggctgcgggtgttttcaaatgattggaggtgttgggggtagtttagtcgtggctctcttgtaggtttggtggtgtccggtcgcactgagtgatggttaatgcggcgctacttctttagtgtgagtgggcgctatcggtgtgtggtggtgtgttttgttttctatttttattggttataaccttacagggttatagtcttcttgttcatttaaagaaaatgatttcgagtaaaattgatctatgctctgttcatacaaagtaattttatggtggtttctatgactaaatattttgaaaaaaaataaatgggtgtgctgtatacaatgttatatgctttttagttagaactaatcatatctaaaggcatttacaaaaaatgtagaaaacatatgtaagttagccattgcccttttaatatgtactcctatatgatttcataagtagatctctaatttgatttttttaaaagcacgtcacatttgatcattttccgagattttatttatataatgcctctacaaagaagtagtaatgcagtgtgctcagtgcctacagagtaaaatatattttggtgggttactttttttttaaggaaggattgtgataaaaattgagtaatgtaacagtaaaatatagtttctccttgactgcaatacaaactaaagattcacgttccatcatcggatgcctcgtacgtggtttgtacaaggtttaaattaattaaacaagtagttccacactttcatattataagagaaaagtacagttacagcaacatgcagatgaaagcataaacatactaggttgcaaccttgcaattggaagagacacatgtaatgtaagtccatatacacatgccaagttgcataatgctttcacaaacatttgagtgagcagagagaatgctgatattcaagaacatgaattattgaaattatagtataaacaatataccacaaaatcaagtagcgtttcctcttccaaaccacagcccaagtaatctaatttgttattgagcccacaatatgtttaggtgaaggcacacatcaaagcaattcttttgccagaatctcaactcttaagacacatcatgtggacagctcatgttaggtactcacaacttaggagtcacccaacttaggagtcacattatttaacttcttcttaagataatgaaaagttgtttacatttttctcaaccatccttctgacaaagggatcactcagctgaattttgacccttttcagcttattcaagatggtaatctccccctggtaaggcacatgcttttctttctccagatgctcaccactgaagatttttactgaatcagattccatcttgacagcaaagctttcatcatgttgggactgaagtactgagttacaacccacactataatgctgcgaa

SEQ ID NO: 42196 - DNA, 2655 bp, Oryza sativa
gcgctccgagatccgatccgatccgggtggggtggcgaggtaggtgggcctgggtggagagcgaggcgcagtaatggcgagataaatgctcggcctgcacagctcgctggctctttaatggcggggaggacgcgcgcccaggcgcgaggcgcgacgacctcgtctcggattccgaggcggcgagtcaacggtcaacgcacgcatctcagccgtccgatcagaaaacgacggtctccgtcaggccacgtggaggagcattcgttttctcatcggacggctagcttctcgtactactactcccaatgtactactactacactattctgtacttctgctactacaagaagaagttttgttttgtcacggtgaccggtgcaattctgcggcggcggcggcgatcgccggcgagagccgagaggtcgccgcggcggcgcgatggagtcaatgggtggggagaagggaagagcagagccatgcaaattcatgcatggatggatggggagggtggtggggtcggggggggggtgcgagcgggatatgcggggatacgttaattgggtgtctccgaaagcggcgaccctgggtcaccaccgacagcgtggactggggcccactcctctgtccagcgctgaccagtgaccattggtgatatgctatgcatatgcaatttgtttctgctcatcgagaaaaaaaataaaaaatgaaagatgcaatttgttttcttttgaatcgaaaatgcgccttttctaggtccgggtaaaaattctactacgacgtagttgtataccaaattataaattgaatcgtgaattagtatatcttagttggttaagtttaagccttcgacgcaccaccgatgccctactacagttggtgacgtacgccattgacacgctagcagtccttaaacttgtcataagatttgccattgacgcgctagcagtccttaaacttatcataagatttcacttaggtacacaaatttgcaaagtgcacatcgaggtctataaacttggtttatcgtcgtttgaccgtggtcttgcctacgtcgcacgccatgtggataatgacatggtgttttttccttccccttttcttttttctcctattcttttatcttctttcttcactagagccacctcaagctcccccatgtcgaagaggttgcagaagagagaaatgaaagaagaagggagaataataataataataataataataataataataataataataataataataataataataataataataataataataataatatgatatgtcgtcgtgtacatgtcatgctacgtagacaagaccacggtcaaatgagactttagaccagaatgatacaataaaccaagtttagagacctcgatacacattttgtaagttcgtggacttggatgaaaccccacgatagtttaaggaccaccagtgcaacttactctttaaaatattaccagcctacatagtgattgatccatcgatccacctgtatctttcattgaatgaaacttcataattcgaagcgaaatgttttcacacgaaattcatatgaattttagacaaaaggctcaccttgtccacacgattttctttggaacaagggcaaaattagctatagctagggaacaaggacaacgagtccacactccacaggtgggcaccggctgagtaaatgcgatgcatgatcttgtgtgggaggaaactggtggagcagcatgcatgaacattttgtgcacaggcgaaggtggtccgtccatcgccatgatcgatcggcagtgatgaacgccttttagcgagtgatgagggaggggggagggggctccatgtgcccatgcttttaattcttcgagtaatcaacacgtccatccacagtcatcaggccgatctatgcggacatttgattacttgccgtcactactatgatattttgttcaagagacatacagtacaaatacatatgctcataatgctcgcgcacctatttttatgagtgtacaccctacccgttgagttgcgctttggcttcgatcgggtcggtgtcctgacatgatgtatcttggtgaagtcggagttgcccaatcatataagtgatggtatgatgacgataacgtcgcgtctttgcccgtgcgaggagttttgcttccttctcgtgcttttggctataccgtccttgtgttaagtagaattgttgagtgttgtgcttggttggtcttgcttcgttgccgtagtagtttaggcttcaggcttcttggagggtttattgtagtcgtggttttcacttagttttctttaattaattgtgtattataaggtttggtcccattttctttttaaaacgagacatcttcttcttatatataaaacatcggcaataactttaccattccgaaaaaaatgatagttgaaggagacaatttacttcacctgatggatacgaatcacattgagtcatagttgagagaatcgaaatggacatttttcgttatttctaggaaaacatacaccgaaggtccttggacttgtcatcgagttaaaaaacatccttaaaccgctaaaccagatatccagtgtcccttaattaattaaaaccggtcacagtatgtcctttaatggttttgaccccggttttgtccgacgtggtgg

SEQ ID NO: 42197 - DNA, 1467 bp, Oryza sativa
gcaactccccttggggtacgcgatcgacgccccctccattcgctccgcccgcaccttcggcctcctcgacgagtacgcgcgggtccacgcgcagcacgcgcggggcggccccggcgccgtgcccgacatcgccgcctgggaccgcgccttcatggagcgggaggtcaccgacaccgacgagctccacgacctcttcatggtaaaaaccttgatcgcctctcgcctgcttgattgatgcgtcccctcgctcccaaccccgttcccttgccaggccctgtttgatggattggttgattatatttgcttccattttgttttggtttaattgcctgcaccgatgatatgatagttggttattctgtttgtgtagtactacctccgtcccaaaatgtagctacctagtacgtgatgtcacattacctggtaatacgattcgtagtcctaggtaatgtcacatcccgtactaggtaactatattttgcgacggaggaagtattggattagaacagtggattccaaatgagtacctgtatgctttgttggattttgacaggaaataatttcagaaaagaatttctagaccgaaggtccaaatcaggcagggtttggtaaaaccccccaacttctagaggaggcatgtacttgattacatggaattaagcatgatagattgatagatatattggcgtgtgcttttggttgcaatcgagcgtgttatcgtaatctgttagtgctaattgttgttgattaacaataagatacctgcgcattgctgtggcaaatcttagtactacacaggcacagagcacagatcgagggtacgaacaatatcaagtaatatatgatatttggttgctcatgatccgaggaatggtgatggattcagaatgtaagattgtgtgctattgtagatttattatactatgaagaagaatgctgtagggcgagtactacgtggtttgccatcttctaaaaaaatgtactagtatataattgtattggtgagtgttaatggtaaactgtatgggatgctcaggtggtagttccggtaggaactgttagtctggccgtctgggattgatttcctagtgccatggcaaaatgcgatgcatgacatgttaatgataacaagtactaaaatagtggaaatgatgccatgcataacatgttaatgataataagtaggagtataaaatagtggacatgagcaatctctttgttatggtgggtggtcaaggcgacggcaggggaacgtgtatgctctgggtatgagtatgctagctccggtatttttataatgaactctgatggtaaggcaaatggagactaggccccggtgggtaggctgtggtaggctggatcacaaggaaggttgacacgacggaatggttctggttgcgggcctctcttacgaccggctctgccctatgggtagcagaggaggtatatgtatactgagcgcttgta

SEQ ID NO: 42198 - DNA, 802 bp, Oryza sativa
gttttctgcatgatgatatagaaatttcaaccccattgtgctgaattcaacatgtattcttagactaatagtttcatccagtgaaggttccttactgatttatatttttaaaatgtcttattctattgtgtattacatattctgattaataacatgttgatagtattccccgcaaaagaaaaaaaaagaacatgttgatagtacgattggattgtaaaggaaaatctgaatgtcatgtatgcatgttaggactactttgaggtagtcaataagtttatataaacaagacatgcagaaacactatatattgatttttttaatcacaaacaccactttgtaaaaatatgtaaaatagtttatttttatactggtgtttataaatggttcagatcattcatctatgattggactatctgcaaagtttttttaaaagaacatatctgattgcacaaacttctccaagttttatttctaaatccattttgttctctgctgcaggctacagaaaattcgaccctcagataacctcgagtcatgggttggttaaataaaatatttaaaggttcagtaaatagagtttcaaggggccattatgatggaagctggcatgaaggtcattcatcagataacgccagagttagtttcttgccttttatgttgttatctgcacatattgttctaagtttctctcagagaaatcattgttctaagtgattaaacctcgatctgtagaatgcctattcctgagataaaagaatggtcactcagtgttgcatcttgattgctgtagggagcgtatgat

SEQ ID NO: 42199 - DNA, 1696 bp, Oryza sativa
cccgattcttggagaagctgcagctgtcccaaacagacttaatattgtctttttaaagttgctaagaacacatattctataaagtttaatccacaaaaaaaatgttttattcgctaataggcattgcggcctataatcaactgtagataggggtggtaaaaggcccaacatctaaagcgggcttattcgtttcaaaggatttgtaaaggaaaagtacaggaatatccaatcctttggaatgagcactatcctatcattcgtttcaaaggaaaatataaaaggaaaaattcatatccctccacttttagggggaaaacaaaggaaaaaaaataatccactccaacccaatgttttcaatcctttggattgtttgcaacccaaccatagaaaaatttcctatgttttccaattcataggtttgcacatgcattcctatattatttttatgttttccctattcctacggtttgaaaatcgtacaaaccgaataagcccttctattcaattttaaactgaaaatatatatgagggttgtttaccctaaaaaggaaggaaatatatatgaggcctgggtctaaagctaaatttctattcaattttaaactgaatatataatatatatatatgagggtaagaagaatatatatatgagagctaggtaggattgtgaataacctatgagccaccatggtcgtactaaatgtttttaaactcttttattgttttttatttttcttgacttccttctctactacagtctttttacctcttttagtttgattttgtggctcaatttgtccccgctgttccaatcttgcctctactgccactctttgtcgagcgtcagcaaatggactctgtggatggatgcttcagtgatgcctacacgctcatgacacttctgtttagacttagccagtcagccaaacaataataaaccgtgctcaatttgaaaattcccaagatcgcagcaaattttaaaccgttactcgtggattttctacgtattaaaaaatcacgacgacctttaaaccattttctttattctaaaatataacaacttagtatggtatcaaatttataattctaaatgcattttatcccgttactatacttttgagacggagatggagatagtagcttgcgagttgactcaaccatacacttacaaaagagagtaaagaaatcttcctccatggcgcccactcctcggattaactagaggaacaagtaaacacctactcttcggattaagatcctatgccttcaaaggcacaatacttttgtcactgacaggtgagctcatagttcatcgggcctgcacagtgacaaagctacaaaggcacgtacttttgaaggtaagggagcctgacccggcagaatggctgctttgaagaacgtgcgggactagaagaagaaggtagcgtcgtgatagcgagatcgcgtggccccagcgaagcacgaggatctttgcaaggtacgccgtacaactaactggtcctcctcctcctatcttctactccacattttggaccactcggccacttgttccgtacacgtcaagaacacagagatagcttgcaaattatgcagaaaacactagcttgaaattaaggttacaaactagtatgtgaatgagggtttacaattccgataccggattaaaatcgctcactagttatgggctgcaggaatt

SEQ ID NO: 42200 - DNA, 689 bp, Oryza sativa
ccattggagcagagaaaactgtctatgaaagaacttgaatgcgagaatcttcgagtatgagcagcagcaattagttctttcataggcatcatgtctggagatagactcttaccctttgggtacattctgtggttgtgttctttcagtgcgattgctgaagaaccgtgcctgaaataacgaagctattattaagtatgccagcatgattaacatgaaacttgagaagacaaaaacaaagaaaagttttaaaggacaatgaagaaaaaatgattttataatatggccaatcatatgacttatggtccacaacaggactaaaggaagagtttttatatcccttgacagtagtgtctttaccatgtggccatgttcccttgaaaattttaatacttggaaaagaattaattactcacatgttcctaatcccagtacaattgaatatgtccatccagattacataagtagatagcattgctacgtgatataagcagataatttaactacaaagatagaaaatgtatgtttggttggtggcaaaaatcaccccttgccaaaattggcaatgccaaattttgttcagaaagattagccaggttttggtttgagatatagaagaactgaaagacaatgactaccttaggacttattggcaaaaaaaaaaaatggaaaccagattagtccaagttttc

SEQ ID NO: 42201 - DNA, 891 bp, Oryza sativa
ccgtcctcctgccaccgtggcgcacgcgaaccgacgtggcaggaggagggcggcgctagcatggcgccgccccagggaggagggcgccagcatggctggcgccgccgcctccattcctgtttctctgtatggagttgcaacggtgtcatttttattttattttttcggatgttttttcacactcaggatcacgatacaaccaaccacaaaaaaaatttaaactcgaactaccacttagctaagtctgaaaatatctagcataccacttagtctactttgcactttcactaaaattagaccataactcttttaataaaaccctttgatcaaaacataatgcactctaccactatatgaaattacttaatctaattcaaaatataaccacatgaaatgacatatataagttaaacagtacatagagatgcaatttttttatttttatttcattttttgatatttttttcacacttaggagaacataggaaccaaccgtataaaaaataaactcaaacggataaaatatgtgacatgtagaattttccaaaactctaccaaaatggacaaaatatgtcatctattaaaataggcataactttctcatacggactcagaatcaggcaaataatatatgcacggacatctacagaaaaagttacatccgattctccccggcctcgccgggttcggcgatactaaaacctccaaattccgcttgcaagattgtgttttcgaggagagaagtttttcggtggagctttggaaaattccatatgccacatatttcgtccgtttgagtttattttttacatggtcggttcctgtgagttcctaagtgtgaaaaaaatatcaaaaaaataaaataaaaattaaaaagttgcacatctctct

SEQ ID NO: 42202 - DNA, 708 bp, Oryza sativa
caagctacatattatacaagaggcaaactatgtaagaaaccacaatggcttttctttacaccttgctgattgctaacctggcattgctctacatatcagggcctgtttggttcgcgaaaagaaaatttttgggtgtcacatcggatgtttgaccggatgttggaagggctttttagacacgaatgaaaaaactaattttataactcgccgggaaaccgcgagacgaattttttgagcctaattaatccgttattagcacatgtgggttactgtagcacttatggctgatcatgggctaattagactcaaaagattcatctcgcgatttcctccctaactgtgcaattagtttttttttatttatctatatttgatgcttcatgtatgtgtttaaagattcgatgtgatgttttttggaaaaaattttggggaactaaacagggccttatacacttattcctaccccatttttctcctcccctcctttctactgaggtggaaaatgtttggcacacggagccaatgtcatattagtagctaaaatagaataaaatgctgccgtcacaattgatgtgacaaaagctaccactaaaggtagtcatagggtgaaacttgtccggtttttaaatgtttggggtgaaaaataacttttttaaaggttagggtgaaaattggattaaagtgaaagtttgagacccaaaataaact

SEQ ID NO: 42203 - DNA, 990 bp, Oryza sativa
tcccccgtgcttttaatagattcttcaatatttgtcagagtattaaggtttttatggaaaacgtgaaggacggtgtaagtgacttacatgcacgccagaacaggctgcctacggtaaaagctaccggacacaatgcaacactatgccattggtatacagtgaaatgactgagaggcagcctattgccggttcgtatgtactccctccatttcaaaatgtttgacaccgttgactttttagcacatgtttgaccattcgtcttattcaaaaaaatttgtgaaatatgtaaaactatacgtgtatataaaagtatgtttaacaatgaatcaaatgatatgaaaagaataaataattacttaaactttttgaataagacgaatggtcaaatacgtactaaaaagtcaacggtgtcaaacattttgaaacggagggagtatgttacgaggagttttcacacctaagcctacacgtgtcatgcgtgtgaggagcaaaacaaatatcgaaaaattgagaaaaacggagtgggatgaagtgttattatcttatgatttggaagagccattcctttgatccaaatgatcatataggaattattttcataggattaatttcaatcgtccaaatttcctccaccttttcatttgttccgaaggagagcttagtgtacctgtagagatgaacattactacattagcatgtttatgaagttaacgttaaggataatgcttagctacccttttcttacatggatggattatgacatgtacatgaagcaaaacaaaagtacatagatttcacagagagggtgctcattgtcaacttggaaactgttggcgtatggatggcaagggccttttcttcttttgacaaatgtgagagaatctatgcacaaataattgtaactccattgcccctctgtatcttcttcacagaataaatatctttaggatacatccagttaggaacttttacgccgcaggtgcctcaata

SEQ ID NO: 42204 - DNA, 629 bp, Oryza sativa
taaaatttaattaatctcatgttgtgttttagatggtctcttctttcaatattctttatttttttctttattttttattactagttttagttatttataaactgtattccaacttgaactcttatctttattttttttttctaattttagaatttattttattttttatttctaattttaattaatctccaattgtgttctgtgtggacttttcttttaatattttttttattctggattataactatttctaaatgcattcatgctggaatttttttctttgatataatccttcataatggacttgatatctggtttcaagtatgttttaatgatatactgtaatagatatgtgcactttctgcggagtctgcaggaaattcttgggtaaatttcacaaaactacagaattttgatcaaattatccaaaaactatagatttagtgtgatatatcatagaacaatagattgaacactaaatttctcacataactacatacttaagatggagaaccgtaaaactacaaatttaataatagtattatcacaaaaatacaggtttagtgacaatttaatcacaaaactgcatgtttataactcaaatataacactagtgctaaggatttaaa

SEQ ID NO: 42205 - DNA, 1547 bp, Oryza sativa
cgtcagagcagtggataaggaagaactagtgttgagcggcattgcagttagaggaaaaatgaaattgactggctaggaggcgacagagattggggagaaaacatgcatggtaggagaaattggaggtagaagaaacactattagccatttttttttactcaaagaccgtgggggaagcccccacggttaaattatattaaagaagaaaaataagaagtacacaaaaaaacaaaagaagaaagctaagattacagattgtcaatccatgattgaaccgtgggtctataaacttctttgaacctaattaaatgtaggctcaaatcctccttcaaacccttcatccaattgtgaactgatggctgaataccttgaaaaataaggccatttctttcattccatatattctaggttgccagtagaaatagttccataaaactatgctgagaaaagaaatttctttgaacctgcaacatttgatggaattctaatgaagagttccaaacctagcccaactttctccaacatgacttgctgaactcacattgaaagaagagatgttcccttgtttctcttgcattaaccccacacgtcaagcaataagcagtggcattcaaaggaatacaatgtttcctgtcaagaagctccttggtattcactctatccatcaacagcagccacccaaagactttgattttcatgttgagcttactttgccagatccaattaaatgaacaagggggagataaggaccaaaaggagagcttataaaatcgttgatgagcatttaagtataatcgtgtaagttctacaactaataccgtacaattccacaattgttggtcaaagccttccactatcctcatccacataactatgaagaaaatataaaatcatttttgataaaatggattgtcatctcacctatcacattagaaatgccagatggcagggaaggaatatgggaattgcggatcacacgacactggccaaatcagtactctcttcataaccaatgtatccccttacgacacttaaaggccaccaagaaatccatagaagtgcttgacaaatagagaaagcgttttctatgagcaggacagaaaacatatcagaaaaaatatgcaaggttaattaaatgagaacgtgtctaccaactacacacggtggactaggggtgttaaacctggagaaatttgcaaggatgttataagtgatcaggaggctatggcatgaatgaatgcacagacatgggttgaattggacaccgcatgtgaaggtcctgatatacttctatccgcagcagccacaacaataataatagaagatggggccattgccaacttgtaagatttagcttggatgcatggcacgtgtccaaaggatgttgcaccaagagtatatgcattcttcagaagaaaaaaatagagccttgaagtaggccagtaaacacaacacatagatacaagatctcaacctcttacctaatgggggtatgaccattgtgctcttggactaattgatcaccttatgaagcacaataaaagaag

SEQ ID NO: 42206 - DNA, 3802 bp, Oryza sativa
aaaaaccaacatgagctaagacctcatggtttctcttgtttgagtcatagaattcctatattttttcctatgctgttaccaaacaacatattttgctaattactttggatttcttccttgtaggattcaacaatacgtgacatttgattcctgtttttttcaaatcctccgttctaaaatagccctaattagacacttcctaggagcgcacatgtttaaaaaaatctgaccattgattagatggattgcattatcgtaacagtagcatagactaatttaatagttataaaattcataaataataaatatgatatgtgccaatcttagtatcacaatttggtcttttattaatttaattctaaaattcaaaactaataattaacatgttgtaactgatatggacacttctttttaatataagcaacttataatttcaaaggtaactaaaaattattagaattttatatttatatagtatcagtaataatagtccattaacttacgggttgatgactaatgtatttaaatcgattagattatggaaaatagctcaatgttcagcactttactatggaatcatcatatccaggacgtgcactctgttttgtcttgaaaaaaccttcaaggattaatctgtggtgttgattgtacaaacccatgcacatgtcagagatggcagcttgattatgctaattaagtggttgcttcttttcttttgcccctccttttaaaaaggagcatatatacaatgtcaatgtaaattctccatgtccacgctatccttttacttgcttgtacattactttgtattaaactatgtataaatgtatattttctttatatcattctttgcagctggagtgatcaagcttggacattctcaaagctgcacagcacagctccacccacaagcatccatttttctcttgaggtaaaaaaggcagagcatgatgaatcatcttgctgttatgggctatgaattgcaaaaggccatgccctgaacggcattgcactagcaaggagttgccactccaggtgattattccttcctgcatccgcagctgctcagcttgggtgcaggaggcggccataaactaagctcaagtggttgaaggaggccttcctccactacttcacaaagtggccctgtgccaatgtgttctctctctgcctgcagcagcaacaaacaaacacttctttccagggaaaaggagatcctcaattatgagctcttcattaggcaaaggttagtgctcttatttccataaatggtggagccacctccaagtacatccatgttctttgcacatcgcaatttagtatagtcatctcatctccctgctgcatgtagcagctactcgtgcttgcatgctgtgtgctaagctaactggagccacactggtaaactacaattgcctaattaacattcaaatcgaagcaaagaagtttaacccgcattctctgccactgggaaacgtcaaattacgttatggatgaattatgatgttctgtatgtgttctctttacagtttacatggatgtattgctcagccaactgttgtctgagtaactttaattatattttactctggaatagtactccctcgtttttaaatacatgacaatattgacttggatataactcttgatcatttattctattcaaaaatttagtgcatacatatatataaaagtataagtcacgcttaaaatacctttaataaaacaagtaatgataaaaatagatcatatttacatagtttttctaataagatgaactatcaaacgttttttctaaaagtcaacatcatatatttaaaagcagagttagtacgtaacaaaaaaagagtagggcacaacctttcttttattggctatggtttcaagtgtgaggcactgcagccacaaattccacttatttgagggcatgttcggaatgatgtgaattagctgtgatatatttgaattgatagggaaatcgcacatgagttaggtataatttgcctatccaaacaaagccttgaagggggcaaggtgccaaggtacttgtgatacttttactgtggtctctgttgttattattttactacctgtattatttttttgacatgattactacctgtattattatcagtataaataatctaaaccattaatttatgagttctactaccaatagaaaaaaaaaatctagttgagatggtagttcacatatatttggtctactagatgagaaaatgaaatttctaggttgattttactacgagtagagaccaccacaaaaagtataggtataatatatatacccaattgaaaattttagttattaattgcaatataaaaagaaataaaacttcaaagaaattttaattgcatccaaagaattgtagtttgaacttctagtaaattcctttttatattgcaattaagaactaaaattttcaattgggaatgtatattgtaccgacaatttttacggtggtctcttgtagtaaaatcaatctagaacttccattttctccttttacatatttttttatttgtcctgagtcctgacagatctaattaatttcttacatccatggtgaaagaatttgaatctatagcagcatgcattgatcttatagattaatgcgagaattttgctttttaccatatagatgttcctagaggaatcttcaattaattatatagttagagttggtcaatgtacaatcttccaacactaaattatatagaggctggtgtaacgtgtgtaagctagctagcttatgatgattcatggccatagatcactgaatccaaaaaaaaaaaagaaaaagaagaagcgaattttaggaaatgatctaatatcaaacaaatagaagtggtgtgacttcgaacccaagccaactgacctaccaccttgtggagctagccagaagacctctactgaatcctaatcctactgtgtcatttggactttggagtttgccagtgcaaaaagaagtgtacagatcagtagatagctacttcagtaatcagtgtaccatcacttggtgcgaaaaatggaaaagacttgtttcttataaggactagatccgcattaaacgctgctttacagacaaccattcaggatgttgaaaaatcacacaccctacatactctggaagatgtaccaggtgaaggtacaaaatgccaaatgctttatcatttctgggcacatgacatctttgccgaatgttctcttcttctcaaatgcaaaagcaaatggaaaaagggtaagctgatttccatgggggaaattatgcttaatgctttcctcaaagcagagcgccatattgtcaatttgtcatcggctgatgagcttaacagccgaaaggacaagcatcagtggcaaatttaattatatatcattttgtggcaacatgtcagtttgcagattcttctcccttcagaatggacgataagaagaatttatttttcaaaagataatggatgagaagatgcgaagaacatatttatcattcttcatcaccagaagtgagcaggggataaaaagctatgttgctatatttcatctgcattggagtgttgaggtcagtaatttccctcaaatggtgaacaattttctgaaacatttttgagggcatatattttcagccgaagatggtacttaatatgaaaacattgtcatgattaatatttgtgataaatatttggttttgcaaatgatttattcaatgacttgatttgaaaagatatgcggatgttggtgtgagtgtgtgtgactaatatggatcatgttataaacttataatat

SEQ ID NO: 42207 - DNA, 3615 bp, Oryza sativa
catatggcttaaaaagtttaaagaagataccatacttcttcttactattgggtctacaccttataatgacctgaaagtgttcatcatatcatcttcatccacttcaacgaaaaatatcccgctcaatgaaactatacaatcatcaaaagatcatcacacatctttcttcatgtttcaataatcaacaatttacaatatattactacaatttaatatcagaatacacaagagttaaaacttaaaattgaaaattaaaaaagctacgcaagtagaagacctagaagttgaagccgaccgccgatcaacaatgccacgccgtccaccgcgccgagccgccgatcgctgatctctggtggttggagaactctgaagcggcatcgacaactcgatgtcgagtgccactcggttgctgactgcttgacttgatgaggcccagagacagtgtcagtgagacgacgatgatcgacgtacgagaggagacgccggtcgcgccatcgtggttgctgtcgccgaggcgaggagacggagaaacggagagtcgccgaatcatcaaggcagctagcggcgccgctgcggcggtcagcccaaagtcagtgagacgacaacgatcgagacgagaggagtcgtcgatcggtcgcggtcgccgagtcggagagacgggaaacggagagtcgtcggcgccgagtcaccgaggtgggcggcggttggagctctcgaagtcgcggggggtctcgatcgcggagtcaaggcatcaagcggtcgcggttctccgtcctcggctgcagtcggctcctctcctcgcggccgacgcggcggacttgctgttgtgaatgcgggcggcgggttgaaaaacgagaagccgagcgagaggggcgcgcgcgcaacgtttcggtttccaattccaggcgtgtttgtgtgcaccatgcgatcagttttttttcaccaaaaaagtccgattatagtatggttggttgccattctagcttttgcgtgatccgggcatcactctgcaggtctgaggtcagtgttattcaatggtaaggatcgggaccatactcgaaaggagcagaggtctggtatggttgggataccatgtgagaaagtgactagagttaggattgttcaatgtcaacttcgatcaatagtggaatcgggactatactcatagagaagttgaggtatagactatcaatgataccatgtgatcatagaaaaggagtaagcttatacttgtgggagcctctgtaatatgttgggctctgtggttgagcaggaatgatttggtttttgacaaatcaccatatattacatatatgcagttaattttcagggcaacatattgactccggtgttgggctcagctacaaaggtgtgatgaagatggcgagtttacaaaggttgcatgccataggcttgagacgacagttatgcaactttttgccaattatagttggagattcacaaatagacttcaataatgtgttctccttatcttagatgggtaattttttattttaagtgtgtgttctcaatgttttgttgaactacactcttttttagtgcaactttgtaataattggttgtagctcgttttgagcaaaagccgggatattctattctattatctaaaaaaatcaatgataccatgcgataaagttggatactacttccttcgtttcacaatttaagtcattctagcacttcccacattcatattgatgtaatgaatctagacatacatcaatatgaatgtggaaaatgctagaatgacttagattcattaacatcaatatgaatgtgggaaatgctataatgacttacattgtgaaacaaagggagtatatggcacacactagatgaataccgtgtagaaagattttcgcaacaggtttcacgaggtgtacatatatgtgcaagtgtcggtgttcatgaaagaaattgatggagaatctggaggagtattttgactgctacactccatggtgcatattatatatatggcattgattcatgcatggtgaaacggagggtgcatgcttctgtgtggaattttttcttattttttcattaaaatatttttaaaaaaactccgtttcaaaaatttacaaatctagacgtcttacgcctctaaaaaggtgttttttaaaggcgtccttctagagagcattaagggacctaaatgtaaagtttttatttgtattcaaacccttatcgttggttttaattgtataaaaattattaatgcttattcgacactcaaatgattttaaatggaaaagtaataagctacaaagttgtaggtctcatcgagatctataacttttatatagagttcatctccatccgatgttgtttacaatgtggatctaagatttatgttaaaatatgttttagattatctaacgaatatttggacatcaaaacaatcttaaatgaaaaagttcttgtatatctccttgatctctaccattttaacataaagtttgatttcattcaaatttatatgatatatttttaaattgcaaaatcattgagttaataagctatactggaaattttatacgctactgcggaaaccctttttactcccggttgggaacccccggtaatcccgatttttcaactggggctacgaatccgagattaaacatgcccatctttacttccaggtgaaataaccgggagtaaagttgaatctttagtcccggttggtgttaccaacgggactaaagatagggtaggagcagtcctggttggtccttttttctttctttttttcattgtttctttgctaattgacagtgttaatccctgtattttctctcaaatcgagtgcctgcatatcctcgaatcaaactccaaatccccaaatcaaagtaacatcccaaatcattcacatcacaaatcctaagttacttatacacacaaatcaaatacatcacaaatcctaaaaaaatacacacaaattaaatacatctcagatccatgcaatgaatcacaaattctaaaaatagaaattatacatctcaacatgaatcacaaattatcaaaaacaaaaaagaaaggacgctgccgcccgccacgaccgccacgtgtcccgtgcgcggccccgccggccactggccgcctacccgccgccgccgcggggcgcggccctgccggcctgccgccgcttgccacgcccgtgcgcggccccgccggccgctggccgttggccgcctgcccgccgccgccaaccgccggatgggaggggaggagaggggaggagatgagaggggaggaggaggaaggggatctgagaggaggagaggggatgagatcgatgcaatcttatcttaaatatctcgttgaggaggaaaatcttgtatggaacttaacggatcagagatgggagagaaatatttactctcggttggtaactccaaccgagactaatttttactcctggttggtagtaccaaccgggactcgagtggtaatctttagtcctggttggtagtatcaaccaggactaaagatcctcggccacagacctgtaacaggggatgaatcgggactaaagatcatcttttttaatcgggactaaaaacaatctttagttctggttcttattag

SEQ ID NO: 42208 - DNA, 1476 bp, Oryza sativa
cggtttaatctataccgtgatatcccatatatcttggtgaaaaaaattgatgtgccggattggagatctgtttacaacaacggaacctacatgtcgagagcattctatttttatatgattttaagttttgggtatgtacttttgcatttgagtccctataatctttatatttatatttaagtctctataatcttgcaataaggtatttaaggtcgttttttaaaaaaaataaaagggagataacaaagaaaaaaggtgcataaaaataaaaggaaaagtcgcaaaaaaataaaagaaaaaagaaaaacaacaacaacaacaacaaaaatctgtttcccctaagtggaaaaaaaaccatagattcgaaccaaaaaaaatcctattcctataaaaggcaaacaaaatgtggtgaaaaaaagctagatccaatttctttaaaaacggaaaaaaaaagtctgattcctataaaggcgaaaaaaaactgaaaaaaaacatctaaaaaagttcgtccgattccctaagaaagtggcaaaaaatggttcgtaaaaaataaaaagctggttcgtatgaattaaaaaatgcacgcgagaaaaaaaaatagaatgggtgaaacaaagtctgatttaaaaaaatcagactaactatttaaaaagagaaaatgtatgagaaaataaaaatggttcaaaaaatgcgtgagaaaaaagttagaaaaaagcgcaaaaaaacaccctaaaaaacgtgcacgaaaagttatttccatcgtcggtaaaaaattttaaaaaaaacatgcgaggaacaaactgccagaaaatcatgccatttctaaaaaatggtttgagaaaacctcgcaagaaaaaaaacaccgtctattaaaaaacaaatcgctctgaaaaaactattagaaaaacgctaaattgatggacgcttgagtcagaaagaatccatcattttttttgccatctactacacggcttttatttcgtcatatattctcctgtattggaaaaaaagcaaaaaagaacattcgaaaatacaagcaaaaaaacacgcgagaaaataattatctgaaaaaataggcaaaaaacacgcgagaaaaaaagcaaaaaagggggagaaaaatatggttttcgtcgtcagtaaaaaaagcaaaaaaaacatgctaagaaaaaatattagaaagaaatgcgccatttctaaaaaatggtttgagaaaatcgcgaacaccgtttataaaaaaaacaaaccgctcattaaaatacaaaaattgtcattgaaatcattatgcatgaaaaacgtatattatcattacaatttttttcacccgttgcaacacacgggcatttttgctagtataaataaaaaatagtttgtgaattaaacttttacatacgagttcttaacgatctaaaagcaaaggctaaaaaataaactacgataaaaaaaatccaaaatcaacttcgaattaagatcgaaaat

SEQ ID NO: 42209 - DNA, 1131 bp, Oryza sativa
tttactgagtacatatcagtgtcatttcataaccatttttatatagtactagtggtgcaatatttaagaggtataggagtagtatatgcagtagtagaacgtttggtgattgattagaacgccagccaacaccaaagtctacggttcacaaaaaaattataatagtcattagtagaaaccaaaatatagtagtagtaggagtagtattatccaaggaggaagcgtaccaggagtggcaaacgggccgggaaagcaacgaactcatcggtcagtcaagtgccctgccgctgcacgtcacgtcagattccttcagaagaacacgagccgttgttggtagcgaaaccgtttgtagcactcgaggaatcgtgcacatagaagtgccacggatgcttcgcactcgaagaattgtctgtctcagatggggagatacatgcttcgtcgtgtacagaagctccctaatgttaacagtcctgcactcaaattctgaagccgtctactaccatcaacaatcgcgattcgcgaaggcagatgcaaatggaattaatagagtggttttcgggccagacgagtaacgccagaaaccaggcccatgaaactgctgcatacgtcaagatgggctgcaaatgggctctgtgtgaggcatatgacgcctctaggaataagttcacttatggtccctctatttgtcgtccagtccgattttcgtcccttaaccacaaaaccgggtacaacccgtcccccaacatacgaaaaccggaagtccctcgggggttttgatagcggtattggctgacgtggcgcctaagtggctaatttgacccggttttcatctgacatggcactgacgtggtgcttacgtggcaattcgatccgaaaaaaaaataaagtctatgggacccacatgtcactttcacatacaaaataataaaaaaatggtgggacccacatgtcatactcacccctcatcttcttcctcctccctctccatctcccctctctccatctctctcccctcctctctctagcctccaggtgccatggcccacggagtcacggggaggtccggcggtggcggccagcgacgcgacagccgctcgccccgacgagctccacctactcccgccccccccc

SEQ ID NO: 42210 - DNA, 1899 bp, Oryza sativa
gtaggttgcaaaagttgtaacttgcaaaaaatttctttattattactataaaatgtattacctagcaactagccttgaattgaaatagcgcaaatcacacgtaaccggtaccaatattgtgttctagaaatctcacaaagccctatcgtaaaaaaggaaacctcacaagactgataactagtgaaagtgaattgatatgtatttatttaaatggagggttttaattaatttgatttcttcttttgacgccccaccttgagttgaggtagttaggaacgaaaaggagtgaaaggtgtacaacatatatgtactatacacacaaagcagctagctagctagcctgatatgccccaatcgatgtactcccaaaagctaacaagattcctgcagaccctattcattttcacatctaattgggcaattggctctcatgcttaccaccaaagttaacttgtgaagaagcgaaagctagccgcaaaagcgtcacatgtacaggtgcatatatacttaaccgcattttgcatgcttgcatactccacacatatgtgtgcagtggttaggttatcaagttaggtacttgcacccccataatttgtggaagaatttaatagtacacttcctccgccaaattttgtagacgataagggcaagaatttttcaaaattcaagattctaaagtttgctagagctcagcaattagcaaactaaataagatggaagtggatttttatctctcgaggtgtcccctcgttttgtgcactcgttttgtgcatatagcatacatatctagtttattttcactgtactgtcatagtgatatatttcctccgttcaaacgaaacatactgttttcggtatcgacatggtttttaatatgcaaattttgaacactaaatttctgctgttaaacattttaaaattaaaacccaataaaactataatatggcatatggacatagttttcgatgtgctaaactacgtatgattttcatgcatctaatctaaatatttaaaaatgtattatatcaatattcaaattgattattgaaactttgaaacatgtagatattttttgagaaaataacatgcgcatgcccaaaataatacgtttttttgtgaccagagagatcgagtaaattgtaagaaattaaatctaagtttaatgtaaaagacagtgccaagtcaaatcacacctcgtcaaaatgaagttggcttcgcctgatcgatcgcttttctggtatggttgaaaacttgaaaaatatcttacagttccagcaagaaattgacaggcgtacgtatagccgatcagatgatacgtctaattaactagcttataattaagccgttaccaaaatttatttcttttaaatttaactttgaagctgattttgttgttttatcatagttaatttcttttttcacattaatttttaaatcactaaaaacacgtatataaaatgttttacccacaaatacaattaatattatgtcaaccgatgatggtagtttgtctgattcaaattaatccaaacttttgaatgcagaataccgattaattatttacttccttcgtcttaaaatacgtaactttagtactaagttgctttattattttggatgaacatagtagttaattaattgatgggaatggaactcaaggttcctagctaattaaacgtcgttgatgtcagcttgatgcacgtacgtgtgtatactcctcgttaaattcgtcaggagctgtttctactatagtagtagtagtagtttcccatgctagacacccaattaaatgctgacagattaccgttaattctcgcatagagaaaaaaatatactttcggataagcaagtataacagtagactataaaccggctaaatgctgaagtggaggagagaag

SEQ ID NO: 42211 - DNA, 656 bp, Oryza sativa
gataatgaaaaagatctattaaaaaaaaaggctcacaaccacaatttctaatcggctccaccgtcgtctgatgtgatcgtctcctcacctctaccggtccgcctatattcccgacgcggcgccgcctccactgccgtcgtactctttgatccccatgcgcgtgtcaccgagatctaatggctgaagaaaaacctctgctccaaccccaagcaccccaccgcctctggccgtcaatggagttccagttgccgacggaaagacagaaggagaacagtagagaatagagatagaatgaggtgaaagggcatgtagcctagtggttgcagtgacctgagtagcaccccaaggtcatgtgttcaaatctccataggagcgaatttcagattgggttatttgagagctaagttccctatgcgataggctaagtttctactttaaacctattcgataggctaaccggatgtagatgccgggtaaaaaatatcctcctatgtgataggctaaatttctactttaaacctattcgataagctaaccggatgtaaatgccgggtaaaaaatatccttctctcttaaaaaaagagataggaccagggaagaactagcctaccagtcagggactcaagagcagcgacgctggtcactggaggtgccca

SEQ ID NO: 42212 - DNA, 2279 bp, Oryza sativa
taagggctcgtgtataaaacgattttatagaatggtcaaatataaaatcaaattggcatctaccctgacgcctcttgctgttgctcatgatcatcgatctctccatcactcatttttcctgccttggctctggaagcctcaggaacaagcaatccctttattatttgtacctctatccaacggtaaatcctgttttacttttagcatccaacggttaatattatttgaaagatgtggcacatccatgttacattatgggattcactttttcgtcgttaagatatggcttgccaaacaagcagcctctaacttatagcacgtacacattgttaattttaagaaaggcagttatgagtatttatattttaatttttttttctttgagacactaatttagatggcatacaattttacaattttattatgacttaaacatttatgaatatcagtgtaatttattttaggggtttgttaaacagttgatgttaaattagttgaattataacttaattgaatgctatattgaaacctgatacttgctatggtgtatataagtctcatgacaaatactgatattattttcagtggaaggctataggtaaagttaaaaagctacaagccatgaatcgtgagttacagaagctgaagctttgaatcgtgagttagcccaagctatgaatctcgagatgcattatggaatacgaatgattgtttgcttcctgaaaccgtcgattcatgttacttcatcatttatgctgctattttgagtaccagacattcactgctcatggtaaggatccattgctcatttatgcttgatcctttttttagtaaatggtaatgcatcaaacaaaaaacatgtatatattatatcaacaaaatatttttattgccacttaataataaaatattgcgtattaatgctactctaaaggaaatatcaaagatcaaagattatatgttttacaatttaatttattgtcacttaatgataaaatgttgcctattaatgctactctaaaagaaatattaaagatcatatgttttacaatttaacttgtactgttctacaggctgtgagcattaccaatgctattttcgctgttattctgcttggcatgcttatcaaaaagtacaagagctacaaggcttacagacaagagtatcgctctctttcctcgtcattagcgaatgtgtaatttgagtaactcaatgccagctatgagagcacaagcatgcattaattttgttttgtgggatgttggtactcaaaatcgattagctatttgatccgtggaatcaatcttgcatgtatgcgttcagactttagaattcagatactgggcgtgtaggtgtagctgtaatcaacagctgtattctttcttcgctggtcgttattgcccggcgagcatttgccttttgcactgtttacaacagcgtaccgaactttagtccttgagattttactgaaatttatgttgttattatctaacagacactgtgaatttgaagtagcgaagattagtttaaatatacaaatagagatctcgtgagttatgtttttaatatttttcaaaaaaatttaactaaaacggatgatagttggaagcgaaaaatcatagctgcacttaaaatgagaggaagggagacgaagggagtacatgttatacataagtactcccttcgtttcacaatataagtcattctagtatttttcacatcaatagaaatatgaaaaatgctagaatgatttacattgtgaaacggagggagtattataaagtatctaaattagtagtacctctgtctcatattacttgttgctttgagtttttatttgtaaaattttatcattcgtcttattaaaaaaatttaaaattattatttattttatttgtgatgtattttattatcaaaagtactttaagtattacttatcatttttcatatttgcacaaatttttcaaataaaacgaatggtcaaacgttgcaaggaaaaagtcagagcaacgactattatgggatggaggtagtacatacatttacagatttggaccaataaagtacaccgaaggttccttaacctcagacggttttgaaccggttttattcgacgtgacgactaaatcagcgtgggacccacgtggaccccacatctcaggaggccacttaagcaagccagcctctcctttcttctcctctcctcctctctggactctgagcaggccgccttcctcatcggcggtggctgcgttgtctgctccgccttgcacgactgc

SEQ ID NO: 42213 - DNA, 1769 bp, Oryza sativa
cgccatggacagcgagcgcccctgacgccaccgcgccagcccctgtcctcgccagacttgttgttgcctcggcttcagcctgcatctccgccgctttgttttcttgctctctctaataggacagaaactccattaagccgtcacgaggaactggcgatggcgtatattgttgtgtttgtgtgtaaaatttttagggtgtagctatatttatgacgccatatttttcatcaaaaaatagtcggcatgtatttatattgtaagtccctaaattacatatgtaattttagtgtatttacaatgtaagtctcaaaattacatatgtaagtactaaaattacatactaattatatatgtataagtggggtttaaatgaggtgtaactactgtgtaagtagctgaaaaaaatcgactgtagcatatggcaccatatttttagcaactccgaaatttttattcttgtgtttttaatatgatgtgcatgtaacatctttattttttgtcccgtgatttaggatggagtgattcgatgtataagtaaaaaaaatattcacatataatttgggggtaaactaattagaccccagtaacaccctccttatttatttttcctttttttttcttgcttgatgcactctctataagaaatcatcaaccgcaataatgcaattactacaagttaatgcaccatcaatttttatttacatcgacaataatacgaatactacaagatttgatcaactaatattgttcataatccaacaactacaagcacatgcaacatcaattttcatttatgtcgacagtaacttgattactacaagatttcaccaagcatggttgttgttaatccaattactacaggcacatccgcacatgcaccatcaatttcatttacatcgacagtaattcaattcctacaagatttggtctcagtttattgcacaccatattgtaactacctcgattggaaacagagataaaccaattacaatgattgttttcaaccgaccaccgattttacggatctgtaaatgatttacccgaatttaaatagaactaaaaaaacacgaatattagggaaggacctaatatcaaataattagaaggggtgaggcttcaaacccaggtcgtctagtccaccaccttgtggagctagccggaagacccctgggcgtttctcagaactaatctacacagatcgaacgtgggcaaccgaacaccagtttttgcggactctgggcgcgatgtgcggtgctcggaacaatattccgcgctctagcgctcggaatagcgctaccggtaaatattactatatttgtctacaaatttagccaaatttaaattattttgactttaatcaaggtcaaaacgatttgtaatttgatgcggaggaagtatttgtttggacttgattaaacttagaaaaaaatcctatttgttttactacgacgtggacgacgcggggtttggtggcaacgaggtagaggcgtagagctctcatccagggtctccaaggccactggctaggatggagatggacaaattcagctcgtcgtatcagccgtcgtggccaccagcgcaggccaccgtcgacgtcgtcgggtcggtggagacgtacgccgcgcgtcaggaagaagaggttctaggatgttcttgtcagctgcaagcagaaggttgaggccttggaggctatggagacgccggcgacggcgccgcttcgggaaggtgaaggtcaaggggttggtggtgacggtggcggtggccctgac

SEQ ID NO: 42214 - DNA, 4464 bp, Oryza sativa
agatgttatatgagagaaacaagtgggccatatattaatggtaaatagctatctattatatatgtaggctaagagaaggctgcaacaaattttatagccaacaaatcagctgtattagccttgctcgggttaattactttaagcacgtatttgcgtgttgccgtctacgaagtctctggattgtcatgcatgcatacaggtaggcatgggcatgattaaagtcactcgcaatcttccactggtatcttcacgaaggttcaaattcctgaatgtttttagaaactcatcagatgtgaaaaacaaaatctcagattcttacgggagtgaattggttcctgcccagaaactccgatataaatcaatgaatccaaacaaagggcttattcactttgataccattttcagccataccattttttaaaaaattaattaaaaaatctacgtttagtttgttgtcaaatttagtaaatacataagaaatcatataaaaaatttgacaatattgccatcttgttaaaattttagcaataccaaaatttggtaatgtttattttggctacaatctaaacagacaaaaaaaaaaagtcctgattgtttcaaggaagaatgagcaagagcgataattaccggagaaatcaagtcttttacaaggaaacactaccataataatttagttggaacagtaacagagtgagatcagtaatttagttggaacagcaacagcgtgagatcagtaatttagttggaacagtaacagagctgtagccagtaagcgaaagggcatgtagccatggttaccagtgcctcagtagcaactgagatcctgggttcgactccccatggaagtgaattttccagaatttaacggcgctgtgctttcagtggtaggcaatgtacccgtcgacagcgagacgcatgtggtgacttcgtcaatttatccaggatttgccggcccagtcttcgaagatgctcataagggtagggtttacgtgcgtgtgtttataagggtgagtgcgcgtgcgttgtgagtgtctgcgttgtattgtgtaattcttaaaaaaaaaaagagctgtagccagtagcctgtaaaggctcccagcacgagaaagattcacagctgcaggaaaatgacaagatttggcaatctgatgatctgatcagaacggcgccgcgccggcatgtgcagataaaagagcatcgggattcacgggcactgagtaaaagcagcgtcgggcccttttctagcacgaatctggatgctacaggtataccaacagcaaaacgactgaaaaaaattgggtccaaacaatatgcactaccacatatggtgccatggtcctattctccgctctttccttgccaaaaaaggggcatcgatcgcgacatgcaaccaaggctcaagtcgtgattaaaaaaaacatatagtcattccagatcattaatctaaacaagaactactgcttgacgggaggaagtaaaataaatatcaagcatgagacacatttccggctgcaacatcgaacaaataaaagaagggaaagaaaagatgctattgcatgtgttcagtaaggcacgaaaataaaatagaacaaaccgtagtcctctcttggtcaatggcaatattgatcgtaccgtgcttcctgaatccttctcccgaccgttttcatggtcacatgcacctgaaaaagagaaactaaatagagaataaagtgataattatcatcaaatcaacatgacacgacagtaccatccatccatacagaccacacacacaaaaaagaagacattaccacttgctaatacaattgagatgtgcttctatgctcctcagaaaaaaaaaagcacgaatgttaaagatggtgaatggtctaaattaaaaggtgattaacaggctaaacgttattaggaagggcaatttcgtccttgaggtagttacccatatcccaaacgttcaatcctgatgcagcgccgccccgactgccgccacattcgatcgcaagtacaagaaaaaaaaataaggcattccatgattccaaaacagcgaatcctcctctgttccggctacacatgtgcagcacctcaatccaccatttgattggcatccatgttcttgcaaaatcaaaaaatgagatgggggtagagataagaagcatgacaagaaaaatcagaaatgggtgaaggcagggagcacgccgcggtagaccaacgggacaggtggtgtggtgagaggaggaagaagggggtggcgcagcaaaagtatacgggcgatgcacggtggaggaagcgagcacgatcgctgagagtcatcgatttgtaactcctcatcggctgatcgagtatgtgataacttcacaggacaaaattgcccctccctaatgacttttactctgttaagcaacttttaatctaaatcattcatgagctttaatatccgtgcaggtttttttagtgagaagcatagaagcacatcccaatacaatttcttttaagttcacctgctactaaaacatgttctgcgacgtggataatgaacagaagataagataaaaccacgaagtatgaaagttaagcactcattttcccattctttcttcccaagtacatcacttatataaagtagcggatccagaaaaaaatagcaggtatcctatacctattaatagtttacttatcaagtaataatattgtaattaacatggccaaaaacaaacatcctaccaggtgtcgtgtgccccaggctctaggttctaccttctcttccacaaccacaaggtcctaaccaaccaaattggacgcatgtatgtgtctttcgctcaccttctactcacatgccgtcctcttttgcattggccacctcggtagttcaatgatcatgcactcgatcgtacagccgaaggactcgatgcaagtgcacgcatggtggacacatgcatgtctgcacagcacactgttggcagtttccactgccaccgagatgccgctccaaagttgccgatccggcgtcaggatgccgtagcgagatttgatctctgtgggcaacttggattggtgtcccggtttgccatactttctgtctgcatctcataacatgttgcagatatagccattgcgtttggataaacacttcagctgtagttactacattttctttatgctgcagctcaaggtaccttggaggcccggacatggaaatggaatctcaaaaatcatggatatgtctttttaaagatcagagcacttcttgtcgtgaacgagttgattgcaggtccgattaaaaagaggagatcccaagtccagatcctataagtcatatgcaatcaggttctccttttggtctgctcttatcggctctgcactcctcactttgtttgctggctctctttcaagtttgccttagccctagactcttgccttgctccaatgtaacagtgcagttcctgtcatcttggtgttctgtttctctctgccataagcccattatccgtctggtgatttcggcattggatggagaccttagcagtattggattatgtccgcatagcatcgttcgctatcttgctggtttggatccttgcagagcttgccaggctgaacaagagacatcgccgagaaggacatggcgacatggtttcatcacaaagaaaaggggaagtcctgctaccagcttatataattgtactttgcaatgcttcaatctccttgatgcatatttgtttttctgttcttgtgttctggaagcgccaaactgtctccctggatttgatcttcaaatcagtctcatggcttctagtgactctcttcttgctctactgcaaacatgaaggtgcaggagttgtatccaactggccttcagttcttctctcgtggtggttcttcagcttcttatccgaatcacttctcacttcgttgcatttgcttcacctcttcaactctgcaactgttgtcgatttcacttctcttcccttgtgcacattcatctgcctcgtggcagtaactatgagaccttccaaagcaaaccagcaagaccagaaccaaccgctgcttgtgagagaagacagtgatgacagtagcacagacaggttctccaactccgggtggtggagctgcctcacattccagtggttaaacccaatctttgagaagggacacaaggtgcgtcttgagctcgaccatatcccatctgttccacagtctgacacggcaaaccaatcttatgcattgcttcaagagacacttcacaagcagaaacctgagccaatgcctatgcggagagccattatttgtgctgtctggacacctttgatcgccaatggagtctttgcaggttagtgagccattggaagaacaaaagtggagctaccctttgacctttatattatactaacatgatgctttgcatttattaccagggcttaacactattgcttcctatatggggccattcttgatcacctacttagtgga

SEQ ID NO: 42215 - DNA, 692 bp, Oryza sativa
gattttgccttttatcttgcaatgagttcactaggacactatcggccaccacccctgtgcacgccgcccgcagcatgcctccgggctagtgaggatagtgaagagcaaagggaggatgactgtgtgagagataaggaaagagtttgctgctgacatgtggggcccacatgatacgatagttaagtagtctgcgtgtgagtaaatcagggtactatagcagtgagctacgacgcagggcaatcatctctccccaatgctatttattttggcgatcaatccctttctataactcctaaagtttaccacctgactggcgatctatacactatatttcagcaaattatcatgcttttaagatttctacgagcaaattaaagaagttacggtgtctatcggcaaagactaaaactagagatgttttgtatttgtgttgctagaatgattgcctcccctccctttacaatacaagtgacatgcatatataccgtgaaaaaaaaaaagatacaccgaagaatacgacgacggccgactcggtggcaggaagcggtgggtcctcctgaaacgcgagtgatcgcgggacggacgcatgcgcgatcagaaacggcaaaactgaggaagccccacgcacatgatcgagaccatgtgacccacgatcatgtccataccacttcacacacgtttttttatatatg

SEQ ID NO: 42216 - DNA, 668 bp, Oryza sativa
ccaattattctaacaatccccaccaagtttcatggctcataagaaatgcttctcaatgttgtgcctgtttgatataccagggttttggtggagactgttaagttgaacttccacctaggaaatgagctacatcagaccacaactgaacaatggactatgccttgaattgtcagttttgtgtgatcaggtttcactcagaaccttgactggtactgggctgccgttcgcatcccctctgtttggagcatataagtcaaactccaggcctttcatgagtatctagtgatcgcccaaacctcatagactgtgactagcagttgaactcatataggtgtgttccttctgagatgttctgcaggtcaacatctctgcttggagaagccactcggatcacattaaggcatgagccatcctaccatcctgctcggagtatctgatatttttgaagcagaaaacttcgttctcaaacagagactcaagttccatgaaatttcgtagtctctgtatcatcggactatctgatccaacatcggatactccgacacttagaaaaactcactcaaaagaattttttaaacaaagacagagagtgaagttctgtgaaaaatcggatagtccgatacatcggatagtctgatttcaaatcggatagtctgatgttgctcaag

SEQ ID NO: 42217 - DNA, 744 bp, Oryza sativa
ttgacagttcatctccatttctcagatgattaatgtggatatccatggcttcaaatggcctcgcacggttcatcacgacacagtcttcacttgcccttcaccaccggtttcggttcgtcggcgccaagccccttgcttgcccttcaccaccgcatggtccatcgcaactgagcgtcacttgcgcttcaccgtcttgccataggtagtcacttcatgcccgcatcttcaatatcttctctttaattctcatccatcgataagtccatttcctagtttcttcatcggactaatcacttgcttatacactccataagtgcattagtcccttaatcgtttgtcatcaataaaccaaaacccactaggggcatagatgctctttcaataacttgaaaataaatttatttgcttttttaagttacttttatatagattttttttttaaaaaaatgcattatttaacagtttgaaaaatgtgctaaaggaaaataagaaagttaaattttggagttgaggaaaaaatagacttgtcagggttatggataccacatacctaatagtagttgaaataaatctcggcaggacccgccacataccatgtcttatacgaaaacaactttgaatatagaaggagttccgcataaggaatgatgaatagagttctacatgaaaacgacaaggactacttgaattgtatccagtattggtttccctaattctacttggacaaggggacatctatgggta

SEQ ID NO: 42218 - DNA, 3498 bp, Oryza sativa
tgcgatgagggaacgtgataaggaagaagtaagcattgttgacaagaagtgtataggaaagaagaaaaaaaggaggttcagaaaaaagatgagaatgaaggagcacatatttctgacgaagataaagaaagttattgagagccatataatggatggaaaggtgctcattgctagtttccgggtaacaactggttacttcaggttgctacctcatcaaatctacaaaattccagaagaagatccccaatatgaattgaataaaaaaggtaatccctgttctcattgtgtcgttgttgttggttttgggattcgggacggtgaatgttatctgatctatctaaattcatatgggacttcctggggacatgacggattcggtagaatataccttgatagtgtcaggaagctttttttagctcaggtctaaactttgcgtgtaaaacagtgaaattgtaaactgaaatgttattgaataatatttcttgatttggttatctatatttctttcctatgcattgattaatgtgagatatttgagcttttttttgtgaaaaagttacttttattgcaaggataaatctgtcctaatgtcaaacatgaggtatctgtccttctgaccgatgcacgtactactgctctgttgtctgtggcgccttccgagcttcaactgcattgtgagggatttgcgtgctgttgtggtcaaggagcgcatgcaagtgcttgtgcttgtgcttgatggcgtttgaatctcatttgcctgttactgtctaaatcaagtttttctgagttttgattttctcaataaacatggtaatcctctatccaatattctaaaatagcccaaattgtaaaagtacgtgttactcctatataaattttattcaacgtggctaaataacattaggttgaatatacctggcagtatctaatccatatccttatgaaacattcacagcatgtagaaaggaatactgataacaaggtatgtattatgaaacattcacagcatgtagatcaaaatgctcacggggtgcttgactcaacgactctgtggtcgtatctcagaaaagtcttgcgctgtcatcggcaacaactgactagtctttttttatccaatgcggaattgaataaacgctaaataaactccaactaatatatgctcataaatgcatggaattcaattagtgtacatatcttgattttatattatttgagtataaagatcttgatctttgttagtgagcatatccaaacgggaaaaaaaagagatcagaaaagcagcaaggcagtgagaaagatgtcaatcaaagcttgatggcgtccacatcagagaataccaaccatatactccgtcaaaaaatggatggagggagtatgtttctaatatggcatggtacaggaggattactattcatacatcttcagttccctagtccccaagctctgttcgcaagaacaggttcccagcccaaatagtacgcatgaaaacggagcggtccattagcacgtgattaattaattatttattatttttttcaaaaatggaccaatataatttttttaagcaactttcgtatagaaactttttaaaaaaacacaccgtttagcagtttgaaaagcgtaagcgtggaaaaacgagtatagggagttggtaaccagctcttgcaaacagagcagccaggccaccgaagttcaggcatgtttggtttgtttcccaacctaaccatttcgctacgccgaaaaatcatcgcccatttagttcgtaaaaagaatggcattgcaaaacaagtaaaaggctaatcaaattttgtcagcattacaaaaattatcactcatttggtttggaaaaagaatggcattgcaaaacgagttaaaaggctaatcaatcttgtgaaaaattacaaaatgttgatatggctagcattggcatagaaccaaacagaataagagtaactgagcaagtgaaacaaagaatatattttgattcatgagtctcactcccacagttcaaataaatcaaaatttcagaaatcactgatgggaaaagctagcttcgtgaagtccaatgcccagttcacactggaccaactttgaagtttgaacgagtgaatagagatatttgctacagctatatatataacttctccagtgtatttgggctgtgtacacctttctaaggtgtagaggccgggttaatataatatattatctaaaaataatttccccagtgtatattcttgattgaagttattaaagacattgactacataatggtataatttaaaatctagtgcgtacaaatttctcaagcaaacattcttcttgtattacatattatcaatagataaatcctactgataacactggcagcttttcaagattacaagaatacatttactaatatggccatcagtggtcagcacagcagcaatgtaagctttcatccccgaacaagaacttgtcggtgcttgggtgtacaaggtaaatctcataactcatgcatcgcacacaacaccctgtaaaaaaaataaatataaaggatcagtttatctccttcagagaatatcactactagaaggaatgaaaaatcattacaagatttgttggaaaactattattggaaatatttggacagaatagatagtagtgcagtagcgtagacttggtatcagaaacaatttgcaaacaatcggcagtcaaatatgctagtagcacatattcactcactagttttcctaaaacagaacagttgcttgtaatatataaaatcaggtaaaactgtggtcttctggagagtgctacacaagtaaataaaaaaatgcagcaatgaattaaaaataataagcaatcccatacaccgttaagttgtgaagtcctcttatgtttttgctcgattattgtgtatccaaaaggataggcaaagtgatttaaccaaatgctaattttacagtaataatcaccccactgacatcatgtgaaatgaaattgtgtcccatgtcaaatgagataagaaaatggtcattactttataaatgtctaagcgaaatgccacaaaagtaaacagaataaatcattgccatacctatttcgcctgtttcgattgaacaccacgagtgaacttggtcctcacatttaacatcgtcgctcgtctcggcgaagaagaacccaaatccactgcttggggagtacgcagtgaagttgtagtggcaataggatagttccatctcaacgatcgtgctctttgcagagatctcccagagctcgtagtttctgcccggatgcttcctgttgatgatgttcaaggccatttgcacattcttggtgtgcctcttctcagccagaacttgccagtcaaacatatcatccatagcctccttctgcagctgctctttacgcggtgccttcccggcggcatatttctcccgccagcgtgttcgtacttgctctatgcgctgctggcgttgcagcgcctcgttcttgcgctgcttcgcctctcgg

SEQ ID NO: 42219 - DNA, 1812 bp, Oryza sativa
aaagtcaacggtgtcaaacattttgaaatggagggagtatattttttgtgtaaatgatggatgggtcccaaatatttttaattttaatgccacctaagcgccacgtgggatgaagacccggtcaacaccgccacgtcaggccacatcaacaaaaccgccatccaaaaccactggaggagacaaattgcaccggtttcaatagttcggggagtcgttcgggaccacctatacatttgtcgataaattttctcgtaaaaatttgacagatgtaattatagtacaatcatagtgtagttacactgtaacttatatgttattacactgtaacttacatgatactacagtgtaacttatatataactacagtgtaacttgtatgtaaatctcacataattttgaatcgttagatctattccaagattagttttggtgacgaagaaaaaaatcacagcacacacatgtgatagaatttgttcccacgacctccattttaccgaaataacatattacggagagatttttgaaagttatatataagttatattatagttacagtgtaattacatgcaagttacagtataattatactatgattgtactgtaattacatctgttaaatttttgggagaaaatttgtcgataaatatatagcaaaattgaaggagaagattccacgtgcgacatatcgtacgagtacgacacacccatctttatcacacagcatactttcagattaatttcatcccacaacacacatcttaattacctctggaacgcagtttgcttccagatcaacgaattttcgatgagaatttctcatgtatcacagcactctatcctgatccaaaatatagtgaaatatgtatacctcacaaatctgaacccatttcttagtgactgtcagccaccgaatacgaaatctctcaaacacaaattaacaacaaaaaaccaacatgtcaaaaacaacacaaaaccaccactaacatgtttctgctaatatcgccgcatgccaaaataacaaatgcagcattgagtataaatcgtagacttcatctgcgtgtaaacgttatcttctgataatgcacaaaaaaaatgtagcaccgaataaaaacctgcaggtattcactattcagcggtttcagtcagaaataaccaaaattacagtttcgaatttcgatcacacaagaatggatcgccgcttaataaccactacatctggtgcagtattcacagctcacacgcacaccaaagcattacatcaagacagtaaaaacagatatctataagaaacatacgtgcaaactgtccttccagttcagacaaaaaaataacagagagaagatgatacgagaaattacagaatgcagactcctacaatcctacagctctatcaggctcagagcagctctactataactagtaagatttgccagtaagtttctggtcactagaggatcaagaacacagttgaggagcgatctgatccgttgatgtggcaaaactgacggtgaggatggactaaggggaccgactgaactgatcagtgggaatggtcgaagctgaactccttgtgcacaccgcacttgcaggtcacgcgcaccaccagctcgccgccggtgcaggccgccgccgccgccggcgagctcggcctgggtgcctctctctccgcgctcgacacctcaacctctcgctcctgaaaggtacaaaatgttcaggtttcagaatgacagattgccgaatgacaatgacatgaaaagaagatgaatacaacagcaatcgccagtaacagaggagtccaggcaattgcagaga

SEQ ID NO: 42220 - DNA, 661 bp, Oryza sativa
ctgagaactgaaaaaaagtttagcagaaagctttatgccagttacttcctgactcctctatagggcagaacattgtagatttgtagtttcctcacatgttagcgtgcaggagaatttcgaacaaagggacatactgaagtagtattttgtccaaaataatgtcggccaaaggagatttttcacctttttgcaaatgtcagggtctaactttggtgttggagtgaaaaatagctgcagattatgtttagtttactttttagaactcgtgtgtataataatatcatgttttttcctctttgcaggaccatctattcgacaatcagttgaaactgctgaacataataactgtgctttgaggtattgacacaaatatttatttcatactgaataatgtgaatgtagtatttcttagttattgaatctattagccatccactaggcgatgcacatagccatctatctctttaggacacctgggttgaacataaattgtggtcaccttggtcacctttaattctggccaaaataacataatggattaaggccatattcataacactcgatgattttttcatcatttcacaattttacaaaccaaagtagcaattcaatcttaaaacattcacattggggtaggtgataggaactgttggcgaatatg

SEQ ID NO: 42221 - DNA, 859 bp, Oryza sativa
tgtctgtattctgcaagcatcaacgcacttccaatatccattctttgcctttctgaaaacattgttctcgtcatcatagcatagctggttatcaggccaattcaagaaccaaagggttcctgcagatgagtactgcataagcaaactacttgtcccatttagcaaagattataagcctcaagtcattataaccgactaaaagcatgattacgtacatctcacacaaaacttgcagtcatatccttaaactgcatgttaacaaattgaccaccagtgctaattagtaaataaatatatgcaagatattttattcatctgaggtccacataattgtatagtgagaatggctaacataataataccaatactctataatgtggatatagcacaaaaacttaggtgcaaattttaacgcagtaaataaattcaagtgctctatcttatccatgatctggttaaattgaactacagtttaggaggtcgtttccaactaatggaagaaattaaacagataagtaccactgtctagtgattctattagtactagaaagtagtgttaaggatgtggtatatatatatgtagtagtcaagggttagagtattatggttttttcccatgttaggatggaacgcctgatccatagagttaggcccataaattgagtaaaagaggtattcctaacatgggaaaagaccatgataccttaacccttgactagtagtacatatatacacattgacgcattattatatccttaacatttgcatgcatgaagataaatccaaagataaatgcaatatatacacattgatgcattattatatccttaacccttgactagtacatatatacacattg

SEQ ID NO: 42222 - DNA, 1696 bp, Oryza sativa
ctttcctataaaccggtggacccaacattttaaatcattagattattaattttcaccattaaatcttatcttccaaaaaaaatctgtacgttcccccactccgatcataagttcacgtaatacattttaaaacgaaaaaaaatgtgcacatgtatgtacgtactccctctctccccctctaaccctccccttccatatttcctatttttttggctaacaccaaatacgtgtagtataaaaattaattagatagctaataatctcttggtacatatgtttctatataaaaattataatacgtcacttggatgtatatacccttaattttcaggggtgaactcagaaaaaaaaatcgggacatcacttggatattatcagggacactacacatacaaattatttaattactgagtgatatgttaattaatatgacatgaattatctattattatatactaaaaatccattagatatcctacaaattctctcaagctaccacgtggcttcccataaacgttcctaatcaccacatgacgccctaatatatctttatataaaaaattttgagataaaaacatcttactcaaaccggtggaccttattttaaaatgttagatctatatcttaaaaataaaacctaccgatcgatcaggccgtcaaaatccatatgtacaatgcacatatccacttccctcctcacggatgagacgaacccactggctttcgcctcttttttcttccttacggcaattaagttaaccactgaataaaagaaaatcctaaaaaaaatttaataaaaatggtgggctcattactttataccattagacatctaacaaattctactaacttaattatatctctcaacatgtatacgaggtctatttacctatataaatatgtaaagctaaatcaatctacaaacgtacaaataaatccgtaaatccatctatgaatgaagctctttttaattactatgtctgtcctataatgaatcctaaaattttataggaattaaggaagaatgaaaaaatatactaagattcccctctctaaataagtatgtgaagagttagaagatggttagagtactgttggataaaaaatgaataatggatggttggatgggatgagtagtattaaaatcggataaaatttgaatcctttaatttatggatggaggtagtagaagcaaatagaagtatgtgattatgtctttaattagataaagaagtcatattaccatatttttaataggaaatttcttaaattaatatatcctaaaatctataaatgcatctttagtatacaagaaaaagtattacttaaaagtttaaattaagatgctaattttttttaaaaaaagaaacacatatagtataaatgatagtttcatatgaaccgtatccattgttgcgatatttttttctcataaatttaagatgacatgattcatgtaattttagtttacaatttgtaacaatccgttctctagaacaacacatcacagcctatttaaccggcactcccacttacatatatcaccccacttacactttcgttgtcgcttcatgtaaaatagtcaacacgaaaatgatatggttagagggacaatgccttacaagttagttgcactctttcttaactagcaagatggtactactgaagtgcacacaacacaaatcacatcctttaa

SEQ ID NO: 42223 - DNA, 1209 bp, Oryza sativa
tcataagttcacgatgtagattcacgattatgttgatgatatttggataaatcattgtgtttttattttaaaagaaatttaaaatttaaactactgtaataaaacatacaaacttcagatctactgtctgtacacacattgtatggtttagtttttttttccgaacaggcaaaatcatttggtttagttacgtactccctccgtctcactcagaactgtttaaatatttgaccaataaatattttattataaattgaattttatttcatgaagataatatcgttggattgtcatttcagtttacttttctataattataattttgttgctacaaacattgtagtttatgaaaaatttaaagtcaagggttaggtttaatattgtgctaagtttgaccgtgcattaatgagtgggacggagggagtatatgatatcgatcgctctctttgggtaccaaagcatcggatgtatgggtcgatacatatcgattctgatcctatgatggtttcacaactttgtttgaatttcgaagctctcaaaaataactaggttttgagtttcatcgatcaaacttcacgagatttcgcaaaattacgttcaagcagcaagccatgcaagctatacagcacacagttttggtccttatttataacttatgggcacgtacgcttctaaaaagtttgatttctataaagttttcttcatcagcatatttctgagaatactccctccatccatatatgtaagtacttatataatattcgacctcctcccagcgctaaatcaataaattctcgtccatccatatgcttcagccctcaacctcatccaatcagggaacacgagagagtgatgaagccaccatgtgttggttaccgagtgctagctattggtaatatcgtttccacatgtttttgtcacacgggagctttttggtctccggtaataactcattgactaagtggatcatatcatcacaaccttaaactgtattaaaaaaaatccgtgtcaaataaaacatgctatcgaaaataacatggaatctttggtttagttatcctaaaatataataataactaaaaccagattatgaaaatatcactctttagtttttattagcatgcgttttaattatcctaaaatttaataacaattaataaacataaaggtgtacgtgtactctcgatttagtaatatattttattgatt

SEQ ID NO: 42224 - DNA, 1971 bp, Oryza sativa
catctaggttctaggaggttgttacatgcacaattttattggatcaaactactgaccgcaccatcccacgttccgattctggctccatctctctactacttaaaaaatccgtagtggtggtattgattcctgacatagcagacgcgtctgacagacacgcgtaatctcaaccatccaattgccatatccaacggcgtcaatcgtccatctcctatccatcacgcgatcactcctctccccatcacgcgctcgctcctctctcggatcgatctcctccccacgcccactcctccttcccccacgccgcgtccttcgctctcctccctgtgtcgcctccttgccccgccgtctcgtcgcctcctcaccagccatgcccgccggcctcctctccagacctgcaatcgccgccgccctctccaatctcctccgcgcctccacctcgcatcggattgatcctccaccttcgccctcctccctgcgtcgcctcctcacctcgccgccgcatcgcctcctcagcagccacggccgccggcctactctccagacgctccctcgctgccgccctcgcaaatctcctccgcgcgctctcatccctcccctaaccatcaccggccgcctccccttccaacctcccctagccatccgcccgtcgccccctgcccaccgaagacggatttcaggtaatgtgcctcaaaccctttcaggtaatgtgcctaaagctttacgaagcccgccggccgccggtctgattatctcgatgggcgtactgaaaattctgaattagttgtcttggatgtgtagttagcgttagtgaggtggaggctttgttcgagctgttcaagagcattaatggttctgtgatcgacgatgggcttatcaataaggtgatcatctaactgtagcttgttgtggaattacaaaattaaaccttgccacattcgaatgtatatctccacatagaaaattaaagcttgtggtggatgcctttttctgtgaatcgttttgctatgcgggcaattctattcattcatatttgaagtgagcatggatctgtgtattatgtgtttgccttctaaattgtttaactttctgtgtaccaatatatgattttttttcctcaaagtttaataggaagatcttgttcccgatataaaccatctggctggacagatactatcacaatataacaacacaatgatagctcaaagtttgagtcactttcttcctgcaatgttgttccttttataagggagttaaacagtttagaagaatatgggtcagaattatgttattattgatctgtttctgttgtttgctattgtaccacctatgcatgattaagtaccatcctattctgttaatgtacagtcaattgtgtattttttatgtaacaattgagtccatgtacttgtgagaaagataattttctggttgaaattgatggctgagtgtacataacatgcctcactgccagtggctactatttcagcgaaaaatagagcattttaagaaagaaaatgcagatgcaacacttttgtagtctagattagagtaaaatctacatgcatgcatgcaccttttgtagttatttgcaagttaatgtgtcggggttagattttacctgcgatttgtgtaaatgaatgtcggttcatcacttcatctttaagaaacatatgctgtcccggggaaagatgaaatggaaatattgtggtctactgttcagtttggataaaaatatggtggtctactgttcagtttggataaaaatatggtggtctactgtttagtttgaaaaaaaaatgttcttttcataatttattattgaaacctactgatattataaaggggcaattgcaaatttacccctattataaattgtacaaaaagctgattctgacatctaccttttgaattattattggtcattctgaatataggagtagatcttctgaattccaagagggatctttg

SEQ ID NO: 42225 - DNA, 787 bp, Oryza sativa
agggaggacagcaacggcgatgtgggagcagggcaacgccgacggagggaggaggaggcgacgacgacgacgacggggagggctctccaacgctgcccgtgcgtgtgctcgcagctcgcctccgacgctgcctacgggcgctcaccgcctccggcaccgcccacacgtgctgaccgctcgcgcttagcactcatcggcgacgagaacggacgctgccgccttcaacgttcgccggtgctcccctccccctcccctctcttcctctctctccagggttggttttaaaacctctcaaagtggcaaaatatcctaattaaagataacctattgagtggcattttatgctttgcatcgtattgggtggtatttcgtcgaaacccaccaaatggaatggcgtattgtcctttttctcctttttacacggtctttagcgatatcctttaactattaatgtatttcatattatattattagcaactatataaattagtgtcacatgaaagaataatttcacaaagctacatattttatggtccaagttgcagaaaacaacacattttgacacttgacacttaactacatactctattttttttgtttgacgttccagttcatactcaaaaggtgtttttttttgtttgacgctcgcagttcagaagccctcctcccgtccgcaaatttcccctctcccccctgcagagacgaaacgtatcagtgcaaagggataagggtgaagggcaaacaagtcaattcacagcttccttaatttaatcgaaccggtcggcaa

SEQ ID NO: 42226 - DNA, 1756 bp, Oryza sativa
acaatgtgtcgaagtttatgtaatgacaacagttctccatgacagtgagtgttgtgttgacagcaattcttttttcaccgggacggcgaagatgccgaccgatgtaccacacccctctaaaatcttttatatttagatagggagtctatctagattcgtagtagtctaggatgtgtcacatcacattcctctaaaatctcttatatcttaggatggtggtagtaataaataggagtataacgaatttggatagaacatatcttctttctaaatatacagtactaaaacgtgtcgtattaggtttgtttttttagagactatgagctcgtgccagtaggacagacatatgaaatgagttggtgcgactgagtttttcatatttaatgcatgatgttacaagcctgagtatttctgtggtatgtcttcgtattcaacagtgatatgtcagtccttactcttgttcagaatttggcgatgaggcagccacgtcacacgtgatagaatagttagcattaaagaagtatacatctatacggttggccgttggcatgatgaataaggtcgtatccgcaggcattcatcaggtatgttctaaagtgtcgatgaatgatggatgaaattaagtgtataataattatttaaatgcacaaataaataaattaagaaaaaaatatactcatgtgttcatgagtttccgctcaatatgcttctaataataactaatcgatttcgctagaaatctgtcgcgtgattctttccgagcgatttcatggtatttttggccgcactatgtgtgcgccaagatttgtgcacgatggtggaggctacatgcatggtcagcgtagataaggccgtggttcgatccttgggcccggtttttttttcacggtaccaattttcgatttgcgtctgtttttttcttctctcgctaactttgcccggaatcactctttctttctcatacgttcttctctctaactaaaattacagtcctatttaactaaaattacatatgtaaattcagttgatatgatatataagtgcactgtaattttaataaaaatgatgtgcaagtaaatatgtatttgttattttaattaaaatacaaaattacagtcctgtataactaaaattacatttgtaaattcagtcgatatgacatgtaagtgcactgtaattttgataaaaatgttatatgtatttgttattttctttaaaatataaaattacagtcctatatagctaaaattacatttgtaaattcagttgatataacatgtaagtacactgtattttaataaaaataccgtgtaagtaaatatatatttgttattttcttttgtagtccgttggatgtaaatttaatggtagaaaaaatatgggtgatttcttgctagaaatcacccgatggatagtcagtttatctaatcccctatgtgcttctgagttttattttgatctcctttatacacattctgctaattgttcatgggctaactcttgacttttcatcaaaatgactatattgccatctcttatactcatgtactagcttattattatctaaaaaaaatgcaagcttattgagaaaagtacaatcctcgatataaaaaagattattttgtacgaaaaatgatggggatataattatttgacaaaaaaatttggaaatcggaatttatttcttttttaataaatttcaaatcagatttgatgaacatcatagaatattttcaccaaaatttaaatctaaata

SEQ ID NO: 42227 - DNA, 947 bp, Oryza sativa
ctaatggttaactagtggtcaactaacgaaatgagtatagaagggatcaaataataaaactcagggcaatccaagggatggtataaaatttaggggcatagaaatggttgagtgaaaacttatggacacacaaggaatttgcccataaactaaatattagagagttgacaagtgattttgaaatgttctctaagaaatgctgatgattttttttttgcatcaattagtgagagctagcactagatattgagatgaaaaagagggaggaaggtaaatatctgtcgccctttcatatctactccctatgttaaaaaagacttaaatcctaggaatgaatctagatagatatgtgtctaggcttatccctaggatttgagttttattttggacagagggagtaaccagcagcatccaaccacgaccacaaccacagagcagattaaccagagcaaccaaggaacccttccaagcaattacatccaagagctccctgaccagagagagatggaaaatgtacagctaagggcctccccaccaaggtaggagagagagaagaacctgtgaaccggaggaaactgaccatgactccatgagagcagagctagcaagcagctggcagaggtcaagaacaccagcacgagtcggccggatcgtcagtaacaggaagcaaaccctgcactcaagtcattggcagtaacaaggtgaattccacactcccaaatcccaggcagtaaacaaacacacacatgcccagatagttttctttgtcatctcattctgcaagatttttttttctaaaaaaaggaccatctggatatgtttgtgttttctggatttctgaatatttaacattagataatggttgcatgcttgaggctacgcctatgtgccaaacttccaaatcaaagaaacatgatgcttttttgaaaggttttagttagttttca

SEQ ID NO: 42228 - DNA, 3457 bp, Oryza sativa
ttcgtaatgctccgagttgattacctttattattgtttttagtcaattccataatttatcctgattaaattaaatttttagatagactcacatttttatccctacaacagatttacttataatgttgtactaacaacttacttctattttatgctaagttacttttatgatttatgtaaattactttcagattttattgaacttactttcacaaatgtatttacttgaaaatattctctacactgcttatgaatttactccacagtctctcactacaacttagtcataatatacttacttctaatgttatagagagttctattgcataactaacttacttttacaatttaaatgaattatttttaaattaataatatgtttgaatataaaaataaatttaataaagcctaaaagtaatttacatatattatggaagtaacttaaaacaaaaagaaagtaactttgtcacgacattaaaagtaaatctattatgaaggtaaaaacatgagtctatatagaaattaaatttaattagcacaaattatgttattaactaaaaatgattataaaataaacaactcacaacattatgaatgtatgagaagtaatttagtaaaatcaaaaagtaacttatacatatataataaaagtaatttacaacatagatatttcttttataaaaatatagtcacataagatcttgttctaaagatttaattgcaacgaacgtaatggtgtaattcaagagaaaattctataagaagaaaaaaatgcatgcaattttaggtgtactagtagcaactaggtatgagattgggatagctggttatgacaatccagcgcacggcctcgttgtagacacgtcctagaaataatgcggctccatcacgtttaacttttccacattatttttgtatatagtccaagataatgactacaaaatgttgccttgagacgtactccctttgtcccacaaaaattccaaccctagcttcccaaggtggatataagaggagagacaaaggaccaaaatggccctaattaatagcaaagttatattgatgagcgggtatatgaggggtattgaagagataaagcttctcgatttacagattgatggtaggtaggaaggtagaagctggtttattttaggacaaatttcaaacactaaaagttggtttattttgggacggaaggagtactgtaatatggtagcccacgagcagcattttaaatcgattgatacgacatttagctatcagtctctcatacaattaatagtgggctgtattgattaacagcaattacattgcatatgacaacaaatagctagttcttgcttgaacaatttgtacctggagatagtggggagatagcaggtatagttggagatttaaaaccttgctcatgaatgagctagtgtaatgctaaaagaactattaggtgataggcgttgtgtggagattgtaaagcaatacggggagactagcggacggtttcccacctataccgttggagtattttcgctggcggtgatcgtgtgtggccgccaaaaaaaatgttgacgtaatgaaaaatcgatattgtagtagtgaaggaacacagttcagcagaaccaacgcaatccaacagttaatttaaatcaaatatttcaatcaatcatgatgtaagtcatttgttgtacttgtacatgtagagtaaatgttttgataagccttgatttctatcatcaaccatttcttccttagacccattgggagcccgagaagagacctaaataggcggccattgtcacggcaaagaatgatatacgctttcagcaaatcatcacaagcatgatcgggaatcgcttcgagcgccaccaagatctcctcgggagaagctatccttgacacctgcagatgtttggcagatgactccggtgacaaaaattgcgactgattaccgttgatttcagttgtaattgttgatggcttgctgacgacctactggtggctttgtaacaccattgttgctactatggtttgtgtataaagtggagatcttgcaaggaatgtaagtgtgtccataagatggcttttgttggtaaacatcattatcatatcggcatactgacagcaatgtcttgtccttcgtgttcatcatgatcttccatatcgtcacgttgacgtagaaaagcagatgacgtcagagtcgtctatgccgacgataggtgctctggggtgatacgtgggatgctggcgtaggcgtcgagggaccagagcttggtggcgtcgacaatggcgtccatggtccactccatgccgtcgtcgtcgtcgttcatccttagcgtccatgtgttgatgacgaaggcgttgctagaatggttgcacagggtggtagcatgcggctgccatcgtcgccggtggttgtagggtttcgatgagtggcggcgagaggctgacttgtgctcagggctcgacggaactctgattttaattacgccttattcggatatataggacaggaccgaaatgcttacatgcatctcgcccgaaattttcggttttttacatttttttgaatttgctcatattttattcaaatttattcaaaaatcagtcaaaatttcaaaaaaattcgcacgaaaaaaatccaaaatttcgattctttcacccacctgcggcagaaatcttagtttcaaaatttcaaaccttgggtacagtacctcgagatacttttggctggaccggagcaaatctcttgtttatttgttcctctcctcccccacctctttaatctctgatttgttcataatgtttcgtcccttgcatttgcatttgcattttgttgtataattactgtctgaaatagttgtatgaatccgattgtgtataacccctcaaaatgtacatatatgtgtattagcaacaaggatggaaatttcggaagaattttgcccctctcctgcaagcaaatattttgagcaaactttttggatttttttcaaatttgtgaatttggtcataatttattcaaattcaataaaatttattaaaatttcaaaaaaaatcattcgaaatatctaaaaaaatttcccgaaatttcagaattggtgcccaccgaaattttttgcctttccaagaggaaaacccagtttagaaatggattgtcatgcgtctctgaaaatgtttgcatctcttgaattatatctgtaataattgctatgtaattatatagtcgtgagatgtcaatctcatgtttttctttgacgttttccggccagtcggagagtcaggcggtggcgcggtagtggtaggggatcgggcttgcggtggcagaatgcttgaagggaacgggaggagaggagttaggattaagggctttgcacgaatcttaaagcatatctaacagtccaaaattcgaaagatgagatgtgggattttttatcaatagactagtaatcatgcacgtgcaa

SEQ ID NO: 42229 - DNA, 1545 bp, Oryza sativa
atcaacccattcagattgggtacaactaaagattgcacaagctgaatgcctgaataccagacttgaaggaagtttgtgcaaaatatgacttcttcaagcagagcaccgctttttattaccttcccagaagctagctgatttgtccacaagtttcaattatgccaaaagggtcctgtgaccgaatttaagctgtggagcaattaaaagtagaaggccgtagggttgaaattcttgttgaatagaaaaaaacaagagaaacagttgcttgtagctagcccagaagatctatttctaaaaggggatattgtgtacatgttcttaactatttgtaatttcgtcgtggtgtagtgtgaaacgtatgtactagtatattctttttcctatcctcacaattttgtatcagtttctcattcttactccaattttatgtatgcattacacatgtatctgtccttttaacttacccatatatattttctgtgcgtcacctgcatgctgattatattatttcactctcattgtgtgttggtgctggaaaatggggttctggggagggttcaccgtcaagatttcagaactggagaatccaactgtggtgatgatagtggaacagaacaaatgactcaatcactactatgctttccctctctattggtgcagcgtttatttagcagtactccctattcaaattttttttgcaaatataaaaaacgaaaagttgtgcttaaagtactgtagataataaagtaagtcacaaataaaataaataataatttcaaaattttttgaataagacgaatggtcaaacattacaagcaaaaactcaaaatcccttatattatgggacgtagggagtaatatattgatgtataatctttttgcgcattcgtgaaaaatcagtactatgctacaccttcctcgatcgtctctgtttgatcatgcatgggatcgatccactgccctctactcatctatcattcatgagtaaaaatgtccaagtaattaatcatatcgatgctctttgattaggattttgcatgtgtctaggctagctaaactaatccaattgagatccgcagtactgcctactggcatgtgggccagagggactgtggggcccacatgtcagtgagtagtactgcagacccgcatccaaactaatcatgcatggttatcaaactcaactctagttgaggtaaagatcaggtgttgctagcaggagtagtaattgtaattgcttcaagaaaaagaaaagagcttaggggtgtttacatccatggtgtaaaattttggcgtgtcacatcggatatacggacacacatttaaagtattaaacgtagactaataacaaaacaaattacagattccgcctgtaaactatgagacgaatttattaagcttaattaatccatcattagtaaatgtttactgtagctacacattatcaaatcatggcgcaataaggcttaaaagattcgtctcataatttacacgcaatctgtgtaattagttattttctcatttatatttaatacaccatgtata

SEQ ID NO: 42230 - DNA, 2542 bp, Oryza sativa
ttcgacatatgcaaatgcaaaacacatgcatgaccattcattcattcccctgctatgcatgctagctaagctaatataagcagttcatatcagcagctttaatttaagccttggctgcacgcagtctctcggacgtccattctaccgatcaacgacccagattcacggctacataatggacggcgttttgttcaactagctccctcgtcttaaaatataacaacgtattattacactatacttcctccgtttcacaatgtaagtcattctagcatttttcatattcatattcatgttaatgaatctatataaatatatatgtctagatacattaacatcaatataaaggtaggaaatactagaatgacttacattgtgaaacggagggagtatgtgatataactagtgctatgagtctgttctgattcagtatagattcgtagcactaagatatacttcctccgtcacaaaaaataagcaattttagttataaatctaggcaactgtgtgtccagatttatagtcaaaagtagctatattttggaacggatgtagtatttccatattgcccccactgagtcatactacgacagcatgaacagttcgtgttgcactaatctagacctttgatctctgttcgaatccaacgtttagcagtgctactgctgcttaaattgcagtgaatactatataggagtatgaccttagcaaatccgaatcttggcaagctggtactagcaaatgtaaagcatttccctccaaaatttctccaatgtccctgcctgccacttcgtgcaacagatgctatatccatgttaccatatgtatgtgcatgcatgcagtactactgcatttgaacccaggtggttttgcatttactgaattggatatatattggtgcaattcagatagagagagagatgtggcaaatttctacttcatccgttttaaaatatactaccttcatactcgtaaaggaagtcgtttaggacagcgacacggtctccaaaacacaactttgacttcttatttctataaaaaatattcatcgaaaagtgatatatgtatacttttatgaaagtatttttcaagacaaatatattcatatattttttatatttttaaactcaacaacttgagagttattcataatttatattcctaaggtttgacttaaacattgtcctaaacgacttcctttacgagtacggagggagtaagaacttctagcacttaaattttgtccacaataatataaaaatttctagcactatagtactatttatcccttctcattcaattttctttttccgatcaaacccacagttaaccttcgacacacatcaattcctcatttattgaggagcagtaaaatcttttcttctcaacccccaaacctgcatatgttttgagacgaaggtagtagtaattcttagctagctacttgtgtgtacgaatatatatatttcttgctttgaggaaggaccctgtctcacttttgtaggtaagagaagagatggctttgttgattgtgagcaaagtagctgtggagtacagcctttgattgtaccaatcagtcacgtttcaacaatcgccagtatgggttgcactttctgtccaaaaaaaataaatcatgaggataaatctggagagagatatatatatatatatacactatagatggggtgcgttgtattaaaacacaacccacccccaccccgctcccccacatatttcttgtagtactgatagtaaaatgattaatgtatgaatatgcatttaccctatagtaatgttgttacttcccgcacatattagccattttctttacacctgctttgtacggttataccccgaatttttaggatctgggaacgggcggccaagggagcggcatcggcgtcctccagcggcaggcagcgggagaacggcgaaatcggccagcgacgggtggaaaggagtcgccgccgcagccgccggaggtcggagccgaggggaggtgggcggacaacaacgagcgacgcctcgagggtatctttcctcttcttgttcttcttggtcctcttcttttccggcgtggccccggccggaaccccaaacgggggcgcgtctcattctccgtccgcgcgtccgctgcggcggcgccggcggcagggtgtgatgccgcgggggatggggatggaggcggccgccgtgccggaggagctgcggcgcaaacgctctgacggcaagtagtggcgatgctttcccatctcctgcaaactcgtgttctcatttactcagatcctgtctggaaaggagggcggcgacgagcagctgtagcccctcacccagttgtcggctcgtcacagccccacacggtggccggggagaaagaggattgtggaggctgatgtccaagagagagggctgcctgccttctggatccgaaggcccatcttctccccagccgatgacgccatgccggcctcctcatttgattgaggcatcctcatcatcagccaaagcagcttgcacaaggcagcgaagttcagatggtatg

SEQ ID NO: 42231 - DNA, 705 bp, Oryza sativa
cccaaatgtatgttctagtatttctgttgcatggcttcagctgcctccctacctgcaagataaccgagtgatcgtttttctgctttaattgttgctgcctgcatggctgcatctttgtggtacgtagttcagggaaatcccatcagtggcacataatctcattgctttttttttctcacttactactatcttcgtattttaatgtatgacgccgttaactttttatccaacgtttgaccattcgttttattcaaaaaatttatataattatcatttattttactgtgacttgaatcgttatcaaatattctttaagcatgacataaatattttcatatttgcataaaaaatttgaataaaacaaatggttaaacgttggtcaaaaaatcagcgacgtcatacattaaaatacattaaaatacggagggagtactgcttagtgcattccatctcgccagctcccatgagctaatgtcaatcacttgctaaaactattactaattaaatttctaagtcatgtttatgctgctacacatgcatgtatctcaatatcttagagctagcgagagggcttcattttgttcattacgttaattgtcagacagaactagaaatatccgggactcctaattcctgatgagcagcactgctggcaataacaaacctttaacaaaaaaatgtcaaggtccagtatgtcagcatata

SEQ ID NO: 42232 - DNA, 2172 bp, Oryza sativa
caccaacaacagctgccaccacaagaatcagcacacagttagctaccacgcacatgcagccagcgcgccaccgctcaccggagctatcagaagacggaggaggaggacggcggcaacggcggcgcgggcgcacgtgcgtggcacgcgcgggtgtgggggtggagaggtgtggggctaggaggagaaagagaaagagagaggtgagaggaggaagagagggatggaggtgtgtgtgtggggttggtaggttttggggtttttgattagggctttcttctcttataatcccctcattttgggtcagatttaggagggtttaattggtatatggtattgccttgctggtgatatgatccttgcatgtggttaactaaggaagtttattaatggacagctaattcggtgattacatttagctggcgtatatttgagattcgtggttgagttgggttagtgtgaatgcgttcctggcgataaattttgggaaggttattatgttttccttggtattgttcatttatttctatatctaacattcctgacaattaatcctacctattttattttttcctaagatcgagatattttatccttgttcatcttacttagaaatagtcacgtgaaagaattgttgactcccctcactctagatgtcaaattctcatgtgacaacaacctctccactttgctaacattgttcgtactacattagttacatgttgtgatatctacttatatatatatcgttttctaaccctcgaagacttcaaaattgtaatcccgtaatcccctttagcagtgtattatgttgaaaagtacatatagcaaacgacttcataattgatcgatcgatgacacatgtagtgattattacaccgagaactcttcttttagcaaaaggcaatggattttacagataggttaattatagaccatgatttccatatggttgttcatcccaatgtagcaacaaaatttaatagtatcaactaacataaaaattttaccacaatctagaattccaagtaacatcatcactaagtatgtgatactgataggacttccatatactttcaaaccttggagagctggttgctcaatctctggtttctcttttgcccagctttctagggttcttagatctttaatcatttggagaagagaggagctacatatctagtagcttcaaattctctctagagtgagctaagatagctgtggcatgtgaggggttggatggatggagtgtacgtgtagcagctaggccactcgtgggtcctcggaatgatgaacccaaagggcaagcaaagagggacagtagagcgtcacccttttccctttgtgctaagacacaagctgagaaatattagaaagcacccacacattgccctcatctttgttgctccgatcctcacggaggcgaaaaaaggtgtcggattttttttttgaaaaaaaattgtaaaatggtttgcaacaagaaagtaaagataaatttatgagcatgaataagatttaggggatgatgttggtcaaagatgcacgcaatagctagaactcttgcatagaacaagctctaataataaatagccatcccgtcttattcatgtgagatttataggacacattactgtaacatgaataggtagtcaatgggtgttcatagtactcaagcatgcaaattcaagacttggactagaagtaataatgattgagttacaatttacatgtgtgttgtaaacttgcttttatgcaacacgactggtagtactattatatatataaagtgaagcaaggtgctgttagtgtttgtgtgaacgtatattcgtaagagtatgtaatagaatatcttgtccttggggttcccatgctccgaatccatacagaagtgcgaaattggttataacaattaaaagaaggactaaatattttattctaaaaaaataccatccctttgttgctttctatttatttttttcacaccttttgcatataatttattctatgccacagagaaatacaaacttgttcatatttatcactattcgctaacgtttcacaaaattttgagattgccatgcatgcctagtcctctcctttctcaatgtaatgacgtagcttatggtctgtcatttcttacctcactaagtctttctcccattgatgaacatgatt

SEQ ID NO: 42233 - DNA, 2480 bp, Oryza sativa
ttcatggagtaaggatgcatctggagtgtgtgaacttgacatcaattaattagtagggcttggtattatgtgcatgcatccctcttgcaacaccagtgtgatgtgatgaggtcctctatggtgttggctagcacagaatgataatgtacttgaccctctatccactatgaaatttggatttcttacccacctttgaatgtttgatagttcatgatgtatatcttgtcctatacatgatttggctattgctcattaaatttgcactagaatgagattagattatcaatttttccttaatttgtttctacttgttgatttatacgagtcatattttttatagaaaatgttctcagatagtactcaattaattgtttcataatgttcagacgatatcatttttaaaaccatcgtaaacacactaccatactcttatatcattgataatacagaataacgacataccgggtatatattctcgttggcatgggttatactaatttttttttgccatgggtagaataacggggccgtgaagccaaggggagacattgcaggtgcggggtgtcagaggggagcatctaatgctgctgacagctcatcccaacagcaccaaccaggtctcttcactcactcacacaaacagtaagtctcactctctcttatctcacacacagacacacagagagagagagagaaagatgagccaacagtggtatacagtgctactcctgtcctctccatttccaagaaaaacaacgatcaaccatccatcatcatagattaattaattaatcaatcacaggacgatccagtagtagttgatgatcctagctagatactagtactcctccagctagctagtgtgtctctcctagtagctggtacagccaataaaacgctaaagaatgaccccggtgtacgtttgccatgcagctggccaatttgctcctcagtgctccaacatcttttgtttttccctttttcttcagtttagacactactccctccgttcccaacaaaatccaacctagtttagagatgagatattatctagtccaacgaatctgaacaaacctatatccaaattcgttggactaggtaatatcccatatttaattaggttggttttttttagatatttaactatttgccactcttacaagtgacaattagggatttaccactagggctatatatcatagacatatgaagactcacatgttatagactgtgagtagcaaatccttaattgttacatcttaaaagtggcaaaaagtaaaatgccatgttttaatgagggagtacccctctctgccatgtattttctccatctaaaaagagtttaattctaactataaattcgaataacatagattttatgggacggcgggtgtagatctctatagttaatctactaccaatagtttgcataaatgatactttctccatttcatattataagtcactttgtttttaagtcaaacttctataagatcgaacaagtttatagaaaaatatagtgactctaataacaccaaattagtcctactaaacctaacattaaatatctataaacttagtcaaacttaaaaagtttgacttagagaaaaataaacatcttataatatgaaatataatgagttagtgaaattctaacattaaatatcctatagagattttcgataaaagttagcgaaattctaacctcttgaaaaaattccttatatctctcttattcgaatcatgtgttttttatgtctatttaaatgagcattttctatattatctatatgttttataatcctttgttttacagttatattcgctttcttcgttttttttctaatccttctattcaaatgagcccttaggaaggcatatctagattatatgctaacagtactacagttcttaaaaagcaaagatactgttcctttttaaaaagaatagagttccatggaatatcttgagctatctagctagctaagagtgtagctagtttgacatacatgtgaggtgtgagatagagaacaggcgtcgtgcatagttgcagcctagcttaattagctccatcaaccattcatgtagggtactcatcatatattaaccgtttgaggataaaacggagaagaataatgatcatatataaaacgaacaacaaaaagaaaaatgcatcagcctatatactttcttgatttattaattcaatccatgtgcatcccatctattgcaaaaactgcttgaagagatccaagatattttttggaatatgaagaattttctggggcttctagatttaggatggaaagaaccttcttttaattttacgacataagaaactttatgtagaacacgcccctcataaagaaacgaaaccataacatgaaacacaaatgtcgatgaagaaataaagccaaaatacgataacgaaatgagctgaaatcaagcaaaaaaaaattttttttacaaagacgccatag

SEQ ID NO: 42234 - DNA, 673 bp, Oryza sativa
tcctgcagcccaaaacaggttctattatacttgctcttatcgtgccacgtcacggcgtgtagcggttagtcctgcgtggacgaacgtggcactgcacgacagcacgagacagtcgtgggaacgtgaggtagtacttgttctcagctcatgttgggaacccttcctccccgacacagaaaacgaagtttgtttattgcatgattaattaagtataaactaattttttttaaaaaaatggattaatatgatttttctaaaaaactttcatatagaaagttttttataaatcacatcatttagcagtttgaaaaacgtgtgcgcggaaaacgagagaggtgggttgagaaaatgggggtaagggcatgtacaatggttgtcaatagtggtctcttagcgttgctaattaggaatacttgttgacatggaggaaagagaaagaggagagacaaaacatcgttgttatgcatgacaacggcttaacaacgactcttagtcactataatatggaaaaatggttgcatgaggataaacatatggaaagaatattaacaaaaggaatttttttgagttaatgattagagactttgttgtctcaactattgtaaagacatggtctctaaataatcttgtattatttaagagaccatatccgtctctaccattgaacatgccc

SEQ ID NO: 42235 - DNA, 739 bp, Oryza sativa
atcaccctacatctatgaactggaccggcatatccctttttttttagaccttttttttagaaacacagcatatcaccctacccctatgaactgaaccggcatatcatatcttgagattgacgaagtcaccacaggcgcctcgctgtcgacgggtatgtcgcctaccactaaaagaataattagccataaatgcgagcacccgtgttaaatctaggatttgaacctgggtgggctggttccaccacaagaaagctaaccagttgagttatgctcacttcgcggctacgatttgatttgaatccacacaagacacaactcgcagggtacgattttttaaattcaattggcataatttattaatggtagtcgttacaacaataataacatattcctatttattattaaaaacgtcaacggacaaagtccagtgaggtgagggcagttttggtctagtattaacccttgaattatttgacctcgttgccgtgagaaaaatacaacctcttactttgtgtatacctactccttacgtatgctggtcgacgcacgactctcccagtgtgaagtctaattaaatttctaagtttgagaattaagaaataaaaggttgtacttagtttagtcctaactatatttttattgatttaatagttttaaattgacaagtaccatatgacagtacaacaatcatgtttgttaacctttaactaactaattctttaaatcatagtaaactccg

SEQ ID NO: 42236 - DNA, 1513 bp, Oryza sativa
taatccgtgtattaatttcaagctcacataagctgagaaaaaataagtgtttgatgtaagcatttgagttctttcaaagtattcatagcataaatcttggagcaactttatactagctcctcccatccatgaaaaatatttgacttttagaactagattcagtcaaacttttctaattctctatgagaaagatcttatcgtaagagttaagccgttaattacttatgattgaaacgagtactaattgacaatctcaatggtgtatttggaacataattctttttctcataaaaattagtttgtttcctttgaatttccataagaaataaaccccatttgaaaggcctaaaaacatagggaacattgttatggatgtgcatatatgaagtagacttgtaaacctttcgggtcttgacacggaagagaagcggttgacgaatccagtcaacatcgtcaaccctgctctgctcttgcccctggcacaaagcacaaataaaatctcgtcttcattttttttcaaaaaaaaaagatccttaccgcctgccactaacttatataccatctcaatcctaaaatagtcaaattattttgacacaaataaagtatacttttctacactttagtatctatatttagacactaatttagagtattaaatatagattatttacaaaactaattacataaataaaaactcatttgcgagacaaattttttaagcctaataaattcataattagagaatgtttactgtagcatcacataggctaatcattaattatgctcaatagattcgtctcgcgaattagtccaagattatagatgggttttattaataatctacgtttaatatttataattagtgtccaaacatccgatgtgatagggatttaaaagttttagttccatttaaacagggtctaaaaagacacttaaaaaatagtattgcgatctttcgtgagcaacacatctcatgattaatcgcaatacacgttaactctacatgacaaggaaagaactataagaaagaaaagatagtgtagtgggcagagtccatgaaggtctgcattcgaatgagccgccgaacgcatttaacctcttctcaatacatatcaatatgaaatgcccctcttttcatatccaaaatattttctaaaatgaaatacagagtgaggagaaagaatgcacagtacctctgaacgaggtgaagggcgctgtacatcctgccttgctcttcagctgccctcctcaaacctcaagtattcaggtgtggtgtgcttctccttgaccgatcagtggtggctgaggtccttaaaaagggagagatatctccccacgtttctcatgaaggaaacaggattcgtggcccttatcaatggtggtatgtatgggccctgttctagaaggcattgtttgcttgttggctggctcagctcgcacctactcgatcttccagtcagctgaaatgctgaatgactgaccatacttcattcagacttgcatatgtatcaca

SEQ ID NO: 42237 - DNA, 935 bp, Oryza sativa
tcaaataactaatctaaaattcactcctataaaaactcatgatcttaagatgctactcagatcattgtaaccactaggctacatgcgatttggtagatccggttggatatagaggccggataaaaaataaccttataaaaaataataaaaaaagggcgatctctcccccacgcatgatgaaaacaacaagaatactgtttgtttgtttttttggttgcatttgcatgacctgatgatggtcctcatcaacggtgtcacgtccgtcggcatcatcccctctctgctctaactggccactgttgttgaaatggaaatgttttacctaccgatcatcaaatattcaaatgttaggttcgatttctctgctaaacaaaaattgtaggccatgtttggataataggaggggaaatcttatcccaccttcccaccttctagaagggtaacttttaatcctagccgttcattcttcatatctcgtttcatctcaaccctccactcatatccctatcccaatccccccccctaaacccattatccaaacatagctacagtaaatttgaatccatggcagtgaatttgtagggcgcgagggtccgattgctggatcgcgctgtgagtttcatctctatttattttcatttctaagttgatatgaatacttgtaggatagagggattagtggctgtgataactgaaaattcgcatctatctcatttcggcaaaattcactgtttgcggttagctcaaacgttagcttccttgttgctgtggcttttgacaaattgtgcaggcaagcagagccaaaatgcccttcaaattactgtatgctgcacagaacaatcagatacactttccagatcagcagtaaaacaactacattctttttcagtattctgttgcaatggccgcacagctgagtaaccaatggtcttgtt

SEQ ID NO: 42238 - DNA, 811 bp, Oryza sativa
tgacaatatataaaatttagttttttctaatttctttcatcatcatattgttattgacactgaatattaaattgatagttataattaattgacggccggctgagaatcgtctcctaagagatgctatccatatcaaccattatttacatcattatgtatgaaaacggaatttgatattttctagtccaataaaaccccttattgactctcataccttaattgattctcagcgtctagactgtttgcatacatttttcaatttaaagttttctttcaccaatatggtttctagatctattagtattatcatttcaacaataataacaaacaattaattgttaggtttaggttagactaggcacacaagtactcatatatacgactaaattattctttcagtgataagtgatatgctaaatagtaacacaatacaacgactttatcatcttaaagagatgggtctaatcttcggagacgtttatagatatagaatgcgcgtgtgcacgtcatgggtgagtgtgcacataaacacgtatatatgagagtgtgacctaaaccgtgttttaaaaataaacagcaaactgcataggaagatatgaacgcgattatatgatcgtctatgtacgaagatcaaagaaaagacctgtccatagtttaggtctagaatatgtatatttacggtcgatcgaatttgaccctgttgccgtgagccagcagatttcgaagaaaattcagccccatcttgcttgcttcttctacaagtatacatccttgtatatgaacatgtactcgcagtcatgggctgcaggaa

SEQ ID NO: 42239 - DNA, 940 bp, Oryza sativa
gggactttttcccttttggaaggcggaggggaaaggaagttaatcctttgtaacttgtccatacacaaatccacaaaaacacaggagtagggtattacgcttcgcagcggcccgaacctgtatccatcgccgtgtctcgtgtgtcttgcgggcgggtgatctttccacatacagagagagagagagagcttgggattgcaccctaagcccctggtcgaaccggcaaaggggggcttgcgcagtctcccggtgaggggccacgagctccgtcaggggcaccatggtgcccgggcaccatggtatctaatgcacaaaatcactcaaatttttcaaaattttcaaattgtgagtatatacctagttataataatttgattcatacctatacttatcaacaaaacaactcaaatttaactttatttcacaatccataattacatacctaactaattatatgtatggatactatatacctagaatcaaaatctaacaaaaacaagttcaaattcagttcaaacttgctttaaactagttagtaaagtagttaatgttaatacctaagtaattgaaaaagtttcatactcatttgaattgggtatatactcaatttcaacaatagtgcccgggcaccatggagcaccaaacaaatttatatatatatatatatatatatatatatatgtatgtatatatatatatatatgtatatatatatatgtatatatatatatgtatatatatatatacacatatataggacactcaccatggagcaccaaacaaatttactatatatatatacatatatatatatatatatatatatatatatatatatatatatatatatatatatatatatatatacacacatatatagtatatgtatatacatatatatatatatacacacacacacacacatacatacatacataca

SEQ ID NO: 42240 - DNA, 817 bp, Oryza sativa
agaagaaagtactggattggctaggtacacacaaaaagtgcatccccatccaaaaaaaagaaaaacccactcttagatttaaatctgctcctaggtttgaatctggatatacactatccagatttaatcctaggagtcgttttttctgagacggagggagttgtagagaaaacaaattagtttttgctgcagtagataagctaataaaggggctaaggttgtatttgagaggagggaaaaagagaaggagaaggtgtataaaatgagataagccattagcacatgattaattgagtaataattattttaagtttgaaaaatatattactatgatcattaaagtaatttttatatagaaatttattgtaaaaacacataccatttagtagttcgggaaacacgcacgttgaaaatgagagactttctcgcgtgtcattcaaactaaggcaacctaaggctgtcttcaagagagccaaacaacctgagcttatgttggcatgaaaaacgaggagagtcattatcgcatgattgattaagcattagctattacaaacttaaaaatgaatttatttgaaatttttaaagaaacgtcttatttagatcgcactattcagtaattcgggtagcatactcacacagtaagcgaccggtagcctttttttttttaagataatgggttatattaaacccgacttctacagcttgtcaaggtgtacacagctagcccaacgacctgaagccatggccaacgtcgttttctttctcccggcgccatctccgcaaccatgccgagctaccgtgcttttgggcctgattg

SEQ ID NO: 42241 - DNA, 676 bp, Oryza sativa
gtttcccaatgtaagtcattttagcatttctcatattcatattgatgttaaatactccctccttccctaaatgtttgacgccgttgatttttttaaacatgtttgaccgttcgtcttattcaaaaacttttgtgaaatgtgtaaaactatatgtatacgtaaaagtatacttaacaataaatcaaatgataggaaaagaattaataattacttaaattttttgaataagacaaacggtcaaatatttttttaaaagtcaacggcgtcaaatattttatgatggaaggaatatatgtctagatttattaacatcaatataaatgtgagaaatgctagaatgacataaaatgaataacaataccgaatctaattataagtgcgatgaccaaaatatatactacggagtagatacgaattataatgccatactaatcgtctgaccaatttcctaagcaaaaaatgcagaccactaatcctcgacaaaatccagcttactatcgcactagagtgtatgtacctggggttgcattttcaaaatggggggtttagccggaaggggccgaaattgcaatcactgacctggagtggaagaattttgagggataaaaaggatataaaataatatctccgggtagcaatcaaggccttatttcttttgcaaattgcggggctgcag

SEQ ID NO: 42242 - DNA, 2067 bp, Oryza sativa
attcctgcagccccccctgcctccattttcagcccctttctccttgttggggtgtcgccgccgcctcgctcctcgccagatccggcctgaggctcaccgtatctagccttgggaggtggtggcagccggcaggtggtcgtggcactgctcaaccgagccaccggcggcggccactccgcaccctctcctcttcgaatctagccttgggaggcggcgacggcaaactcatgtcactcgtgtctccggcgagatcaggtggctggatttttgttcgattttgggttttttttttcttcgtttgccattttgcatattgtatttggggtctaattcgaggaagttttgtaatcaatttttgtaagctgtatatgtaagttattctagtgcaacacgaacttgtttaattttttgtgtgctatttgacccggaaacaagatgatttttgtgtgttggactcaggatgttgcggatgaaaaaatttaggtgaggacggatggaaattttcaccggaatccttacatacttttttattattaggtatagattaacaccatacaaaatgcttgtggtcctttgcatgcgcagtaaccttttgtttctttcacggaaagaaaggggcattaattttgtatacttgaatacgtattacatcctatatatcggtaagcatatatttatactgatttttatgtatataatataattatctttaatttttgaattaaaaatggttcattataagatttcagagtcaataaaaatctattgaagaaagaggtgcaatacatttgatttttcagcaatggaatgtgcatggtccgtgctagtggtgagagaaaaaatttgcgcgcaaatatgatttgacaggagggagggaaagtagacttattccagaagaggcccatagacacagtgcaagtaatagacacaggtgcaaaaatgagaggaacgttggaatcgaaccctggtcgccggggtgaaaactttcgcccttaaccaagtaggcattacatggaacaaaaatatattctctccattccaaattgaaaaatgatcatcatatttgtcattatttgtgcatggaagtaaagtgttttgatttactattaggtaaaaaatagtggggaatgtgcatgcattgagtttgttaccaaaataaatgtagtacgagagagttattatattttcttggtcttaatacacccatgtaatacgatgatcaatttaaaatagagggagtagtatataaacctcggttttcgagtggattgaaaaagatccgacccaactattaagcggattaaaacggatttagcgactcgtgtgggacgacggacaaaaaaaaacacccggaatccttacgtatttgtttttattattattaggtatagaaaaattaaaaaggttcaaaagaaattcctatcacacgtactacgtattctgctggcccgacgctcgtccaaaggtctgagaccatgaacgtaacggcctacgctatatgtacaccaacacgcacgcacgttcggtaacacaacaccaccgccgtggccgtcctcgacgggcgatagcctctaccgtcggcctcagcacaacccccaacggcaccgacttcgccgcgtccaaccgttcaacaacaacagctcctcgagccgcacgaccagcgccaagtgggcccattattttcaacttgggaattcaaaattgaatgagattaaaaaaaaactacaacccaaagtttaatggttgtataacactccatcccatactccctccgtctaaaaagaaaatggcaaaccttagaggatgtgacccttgattctgtccccagattcgttgtactatactaggaggggtcacatccctctaaggtttgcctttttttttttagaacagagggagtaaggggcagttgtagttttccgcgttcaacatttgaccatccgttttatttgaaattttcttatgatttgtatttttattgttattaggtgataaaacatgaataatactttatacgtgactttttaaaaaaaattaaataatatggacggttaaacattggttacg

SEQ ID NO: 42243 - DNA, 1451 bp, Oryza sativa
ctttttggaaaactgcatattggagtaacatttcaagaaaaaaataaagtggtgaggatccctgacatccctgaaagcacgcagccatggacatatagcctctgcaagagcagttgagcgctatgtgcctatgtttctcttccctctgaatccattattcaaattaggcatatctttttgttttggcctcaatatcttttaccaggcaccacaaacaataaccagtgaccagcaaataacagtcaaattggaccaaaatgttttctccaagatctatgcatgaatgcttattttctcgaaaacacaggagaactgcgctcattacaaatgaaatatatagacaacggaaggatccaaaggaccctcccataacaccacccccccctccccaaaataaataaataaataaataaatgtggtacacgactagaacaccccgcgacgactagctagccatccaaggcgagagaccttatgcatgaatgtgaaagagctatgcaaacaataggagcaatacaaaaaaaaaatgtgagtattaactatctcatagaaacagacaaatttgagaaaatataatattaaacctgcaaggaaaccttgattattatttgcttcaacatggtcacagtagtccaaatctagtacaaggcaactgtaatacatgcttgacagtacaggtggtctagatggaaatggtacttatttagctagagatgtgagaagcaaccaaattgttgtcaaggatgctctctgatgcatataaattaacaaacataacagccagtgagctcggatatttgggtagatcaaaagtgtttttgccactcaaaaaaatgatgtgccttatctatatttatcacaaatacgtgttgaattggaatttggacaactgtagtcttatcaaaatataacttgaccactaatttctattgtaattgtaatatattttaatatccaataaatttgtaatagtatgtcatggccaagcaacggccgaaggttatatgggtggaaggacggaggctgcggcctccgctgtcgtggttggtgaggctcggtggtggttctatatagaagaaagagaataggagaacggcagacaaaggagattggagatttattattttcttcgttgccatcacagttcgattacatctccttatatagccttaattctctaacaaactcaatctaacttgatcctgatttaactcaatctttaactgaccttaacctgatttatctctaagattacattaacaaaactcatctgtaaaataaaagtactttttgacacggatctgtgcatatgatttttaactatatccacctaaatacttaaaaattattgacacttgagtttcaaaagtttgaccagagatatatccatgatcctttgaggctctgagctactgctctttacttcatttcatactagctaaatgcccgtg

SEQ ID NO: 42244 - DNA, 2199 bp, Oryza sativa
aaacacacgtgcgctaattagcaatcccgagccctttagaggggctattcagattgtagccaaaataaaccttaccaaattttggcaatatcaaaattttgataagttggcaatattaccaaaatttcgacaaaatttcttactaaagtttgacaaaaaaaaaaaactaaatgtatgcacattttttaataactttgccaaaaaatgatgtgatttgaaatgacatcaatttgaacagccccaaaaggtaatacatggtttctttcatgaattatatccatttctcccaaaacatcaacagctgtacacaaatttcagaagcagtatctaaaccaaaagctctcatattctgaatttttcagaacacatcattcggttcaagaatatagacagaaaacagataatatatgcctaactggaaaagaaataagattttttcagcattgttgatcgtcatgcttggtaaccatgcactatctgaattctgacactcttatcaacaattacatgacttgctcaaggaagtaaggaacttcatcatgccgtgctcttcgttccttcttgcacagatatctgattcatgttaagaaggtgatgaaggccagcgatgacgtgctgcctgctagtcggtacgccagtctttgctaaggctcgtccattcttgtcaagaagcacaaagcacgggacatatctgatgtcgtaatgcagaagctgaaaatgtacgaagaaatgttgctgttagaaactggaaacaactcaacatgtgtatgtgagatatggcaatactatgacaggaatacaggcatacagctcccacgtgtatgcggaaagtgctaacatctttcatatgcttggtcagttaccatgtcttgcgacaaaacgtttgtcaaacaactagagatagattactagtagctagcagatacaatggttcagtaacagggcaagtacaacatgacaccataaccaaccatggttcgttaaggcataaaagaaaatgagaaagcaggcataaaagaagttgttgttggatagccaaacaaatatagaaaaggttaggagagtagaaaaaggaaaccagccaggatacaaaatgtaagtacaaatgcaagatactagataccaatataccatgaaaactatggtctagtaggctagtagcccatcatgtgcccagccatcatgtgttgacaagcagcagcaaggggtagcaaggagatgaatacaacagcttatatgtatagttagttatttactaaggattttacaatttttcagaacttttagctgtccatagtcgtggtacttttgttgtttacgtgaacttcagtgaaaaataacatttttagtatctgagtccaagatattctttgcatatgtgtatacatcaatttttataaaactaaaaattagagcccctacactttcagaagaacctacggccatgtctctttgtatgtacacatacatacaaagagataataacaggaaacctgcaagctgaatcttgttcaacaaccttacatgacagacttaaaccctaaaagtttagcaatccttcaactatttactccatatgaaaaatctgagaaacgcatactacttaacaattttcaaaagaaatccaacacagagcacaactacttgttactatcacagcccaaagttgacgctagcgatttaattgagctccactgtaacacataacaattgtaatgaattttcaccaagacagttaataacaggaaagcaccacatgatggtagaacactttagtccccagatcaagataaacaacaccaagacaagtccacgattgattatgactattgggcataagttacatgtacattatctacagtgaggaggtcctctaaccccccactttttcactgtagacaactcattaatacattaatcaatggcaataaacgacttaaccactgaagacacaaaattggtagtttcctacacaaagattgcacctaaagcagcaatttccaatgcacaattcacacaacttgaattgcacctaaagtagcaatttccaatgcacaattcacacaacttgaagcattatagatagagttaagccaggatgcgaagccatcaacgatcattctaaagcaggattacagcacatgtctcacaaattaatcaacggcccaagtctcaattttaccatagaacctatgaaca

SEQ ID NO: 42245 - DNA, 1258 bp, Oryza sativa
ttcctgcagccctgtagacttgaaacctttaaaattttcttggagaagcaaattaaagctagctacaaattaataaagatatctataatgctgagactgacgtgcaaacacaaagaattaatttagaacactctatcagatcagaaacatgagtttgcaaagtgtttaggggaatcaaaagatattgaattcgaaatggatggcttgattgagctagggcccgtttggattgttcactgaaaggtagctgacaatggtgaactgagctaacaaataactatgaaaactaagctatagcttaattataaattagcttccatggacggtgttggcgtgcatgcaattccgttgtgccaagtacacattatgccagtaatataaaaatacaaggttttcacgtgtggaagacatgcttttaattttcttgataatataggatgacaaatgagtgtccatgagacgcaactggataaactatctctggaaacaactagtataagccacgtgtagcacaaggaattggaaaaggaatagatcgagatgttcattccacatgaatatactactaaagtagtaaaacgtagtacacgagaatagaaaggaagagagatgtgaaacatatatgaattaaaaacactagaaataaaaggaaaggaataatgttcggatcaaataaatgaaaaactcaaaattaaaaatcgatataggtaagaaagacttctatttgttaaaaaaaaagttagtttgaatctagtttattgaaacagtttcttaatgcgaactgacttgatttgaccggtaactaataaaattttaagtaaattacactttggtccacctttaattatcaaagtttcactttgggctattctagctaatattttcactttagactaggtaaggttacttttgttgtagtttagaccaccccaagtcacttttctagctgcatctaccctctagtcttgcaaagaatagtcaacatgtaagttggaagattagcagtttatgggtgtagatgtggcggttaaagtcatttatgtgctcgagaaaagtttttgggatggttcaaagtgaaacaaaggcaaactaatatagtccaaagagaaaagatgttttaacgggtagtccaaaatgaaactttggtgataaaagatgaccctaaacgcaatttactctaaaatttttcaaacttgtgcctagctcgatcacctcattctttttttactactccctccgtattttaatgtatgacgcc

SEQ ID NO: 42246 - DNA, 3783 bp, Oryza sativa
gtttaaatccaggaactttagtccctgtcatatcgtatgaatttagagtattaaatatagactacttataaaactaattacataaatgagagctaattcacatgataaattgtttaagcctaattaatctataattagcaaatgtttactgtagcatcatataggctaattataaattaattaggcttaatagatccgtctcgcgaattaatccaggattatagaataggttttataataatttatgtttaatatctataattagtgtccgaacatctgatatgatagggactaaaaagtaagttttagtcccacctaaagagggtcttagctctagctggccaccaacctttgccaacgtcgacgtggctggcaggtgcaggtaggctgcacggcctacgctctccttgctagcctagccgtttaaccaaaccgcccaaaccatccagctagccagctaaccacgcaaagcgaccgtcgccatcgtcgtcgacgccgacgccccagccgccgtcgccaccccatgcacgcgtctccgtcgccgacgccgccaaaagtgcgtagtgtatgtttagttcacgttaaaattagaaagtttggttgaaattggaacgatgtgatggaaaagttgaaagtttacgtgtgtagtaaagttttgataggatgaaaaaagttgaaagtttgaaaaaaaaaaattggaactaaactcggccgtagtttggtacaagtacagcgcgcgtgccgcggatggatggatcgctcgccgccgccgccacagcatgcaagcgcacgcggccaggggttgataaggccgtgcggttgccgcgtccgctttcgccccggagatcccaccgccaccaccaccagccgcgcgtgcgtgcgtgcgcgtcactgtaggctagctagctgttgcgcgcgcgcggccggggcggtgcggtgcgcgtcgaggggatgggggcaaaagcgatgtgtcgagggaaaagggctaattaagccaagtacaccgtacgatcaagcgcacaaccgtcgcgcgcgcgagtggggacgacggcggatgcgggggaaggcgagggtggtgatacgagggctgaggccgtgtttagttttctccctattcctaacttttcatcacattatatcatatcaaaaactttcttacacacacaaacttttaacttttttcaggaactaaacacacccaaaacatatatgagcagattcgaagattgaaccggcatatatcttaaaatctgctcaagtcaaccatgaacacctgttgtcgatgggtgcgtgcgtcgatggcggtggccggggacgaggagagtgatacaactataagggttgggtttgtagtttttgttttgagtaaattgcattggtggtaaggtgggtataatttagtacacgaacttatctaatttgtacgaactaggttcaaaatgacttggcaaggttaattttacctaactgatgttgattaggatgtggcatgtatacatatatactccctccgtcccaaaatataagtatttttagctatgaatctgtataattgtatgtccagattcatagctaaaagttgttatattctgggacggaggtagtagtgagtatacataaaacatgctatatttataaatttgttttctactttatcttgaatttcgtgtgtttctaaccctttattatttctcgtttttttatatctctctctacgatcactatatctcattctatctttttattgaacatgtgtatgactaagtagcaaccttcttatatatatgtttatgtagtatcctaatcggcacataaatcaacaaaattagtcatgtaatgtccttttgatcttaggtcgcacgcacaagataagttcatgtatcaaaacgagcattttacaagttcatacactagattgcacccatctgacacgttcgtgtacgtaccgccgatgtaatttactcttttgtttttttccatacgtgatcaaatttagactaatatatttatgtgtcttatcatcgtaatcacaatcttgttaaattttataaaatttttatgtaactgtttaaaccatgtgtatatatgtatgtgtaattatatctggggtgtacaaattaaatattttccggtagagtatggactgatcgtgtgtgccggccgtagacgtttggggtgctgttcacgctgacctggcccgatcgacggcggattcttctttgcgtgcacgtattcgtatacatttgattaattggctgttttttttttgttttggatcctcgtaaaaaagaaaaaaaaatcatgctgggaattcgaaatgatttacattttgtctttattctctttaaaaaaaacaaactcttccatttatccaaagctatctccagatctgagcattctagccatgccatgcatcgtcgttgtattcaaggtaaagtcaggcgcattaaaaaccggtagcgtgctaactaatttaatatatcaccgttgcatacatgccacgtcataagcaaggttgacaggatcgggatactagatagtatcgttttgctcaaagtaatatcgtatcgtaggatcgtatcgtagtatcgggatactataagattttctttttttaagtttaattaatatttatattaattatatatagccattctgtataaaaaaatatagtaatgatatatatcatgcaaatagagacatttatcaagagaaaccacgtaggttttgatatatttaactgattttttatataaatttaagcatatttagttacattattttcaaaccgtgttatttaaaataatattttgtagtatcgtagggatcgtagaatcgggataccacctaagattttgtaggatcgtgtagtaatgaataggaggatcgagatactataaaaattaagatactatgtgagatcggtatcgtttcggcttggtaggatcgtaatatcgtaagatactaggatacgaatcgggatactgacaaccttggccataagtcttgacaattaaccataccaatattacattgctaaatttcgacaattactaaaatcttgttaacgtttggatgcttttttttataaccttacctaaatttagtagtacgtgtttgtatgagaagaagcttccgaaaatgccagtaacttttagtagagagataaggacaagagtatatttagtttgttaccatacttaaaattggtaataccaaaaattaatagagttcaaagtaaaaaagcaaagtgaagtacaagcccttggacttgtatgtttatgtggtgtcttatatcatcctaaataatcaatcttgtcatttttgtattatcataaataatcaatcttaatgaatctagacatatatatcaatctagattcattaacatcactatgaatatgataaatgctacaatgacttacattgtgaaacggaggaagtaattattaacagtttggttatttcaatctagggtctttctttgaagtcatcctcttattgttgcaacttgcaagagttattgactatttttttctccgattagataggtactccctccgtttcacaatgtaagttattctaaaattttccacatcatattgatattaatgaatctagacatatatatctatctaaaatcgttgacatcaatatgaatgtgggaaatactaaaatgacttacatcgtaaaacggatgaagtagaagaagtacatacagatcatcacaaacgtatatcgtcgtagttatgcgctctcaatagatggagcaccaatgataaa

SEQ ID NO: 42247 - DNA, 705 bp, Oryza sativa
atctagtacatttgaatcctcatattcagagacagtttgtctaatacaatttcacagcctttattcgatataggagatcattgaacttcttaaaatattttcaccattcaatttcgtatgttgttaaggaatgaattgattattcatgatgctctttttgtacaccagaaattgacaggtggtgtaatgctttcgaggaacaatgactttatggtcttctacagaggaaaggatttcttgtccccagaactcgcggagaaactgctagagagggaaagatgggcaaagtccttacaagatgaggagcaagcgcgattaaatgcagcgtcttccttttcttccagaactgaggcacctgtagagcctactgtggctggtacccttggagaaactcttgaggctaactctaaatatggaaataaactggatgagaattatgagaacaagatgactagaactgtagaagctgcaagacatgctgaccttgtaaggaagctagagtggaagctccaacttgtaagtgagagtttgagtagtaaggctattttgttaaatttatcagtccgctttgtaagatttcatcttctgaacagtccagtttttatagcaagattgcattttagatcagtttagatatctcaagataaatatagcaacttatatggtgtacagactagccttgcatcagaaaacaaaaccaacaca

SEQ ID NO: 42248 - DNA, 722 bp, Oryza sativa
  unsure (1)..(722): unsure at all n locations
gagaggcagtatccataagcatctcttagttcaataaataaaaaatcaggtttactttcaaatatctaaattaattgttaccaacagtctaaagagcatagcctcaggctgaacaatttttcagaagctgatctgtaataatttttcacaatctgaacctgcagaaagaacaagaggaagcactgaagctgctgaggaagagcctgacgttcaaggccacaccaatgccaagcttctaccacgaggctccttctcccaaggctgaatacaagaaggcaagaacactctcaacttcatcacatccaatcttcagaagaagaaacagaaaaagaacattgatctcacgactgtttctgcaccattttctctgcagctgccgacgacgcggcccaagtcgccaaagctggggaggaggaaggcctcgacggcggcggacgcctccaactcgtcggaggagagcgacagcacgccgcggccgtgctgccgcgccagccgcgacagcctcgacagcannnnnnnnnnnnnnnnnnnnnnnnnnnnnnnnnnnccgcagcaacctgcaaccgcgaagccggcagcctccaagaagcagcccaagccacacgcccacaagctctccgaccagagcgccatgaacatcgccgtccactagctgcttctctctctggctctctctttcttgcttggctgcatggatcaatcatggaggaagggaccaacca

SEQ ID NO: 42249 - DNA, 2775 bp, Oryza sativa
ccccctcccctctacccccaccagcccaccctcctccctatgctaggtatgtacgtatcccccttccctcctatccaattttctcatctctttctttcttttaagtctgttacaattaaaaataatatttttaaatcatttacatatagagaaataaccataaccttgcacataagtctattttatcattgttcattatcgtagtcatggtgattaattaaccaatcaaataccaataatagctactacattctttaactcataagaaatatttattttttatcatattctaaccttaggatgctattgaagctgtgaaaaaaaaagaaaaaacaacaatgtatattatatgatcatgtatcactttataaaacattcataaataaattaaatatgatagatatgacaaaaaataaaaaacacttaagtcatgagtaacattcgaaaaatagttcttccattactttaaatcatatccgaacctttcgtatgccatccaacaataaaaaaatattgtgtagaacaaagataatgtagatcatatcatcatatatcacttcacagtcatgcgtaattagattagctctataatatcaaaaaataaaaaataataattagttctggttagtggttagcactccacaaaaattcattgttctaaaatattgatatgttaaaataatattatttttcacaaaacaaagtaatgttagttaaatatttcagaaaaattgacgttatcataactttaatatttaaagcaacatacaatatcccaaactagaatactctaattgtgattagcactaaaaaaacattatctccattttaaaatatgaattatcacaacaatgtaaatctagaaatgtccagataaatattttgatataattatatctttagtatttcaaggactataaaaatgattaaatcaactagaaagcttaagttaatctgagtatatagtatataaagtccagtgtactcgactcatacatgtcttgcgttacgtgtcaattctatgttacacttaaacccttctatcaattctgtgtatgtactactatccaccaatcattgaggcaagaatattattatattctaaaatgccattgaacatcgtacaaatgctcctaagccgtcatgtgacccattatttttaaacattagtttagatgtattaaagtgatccctccatattaatctcccgtgtccataccacagaaaaaaatatgtactattcatcgaaaaaaacctagaaaaacatacctacacatgtatgattaaaaatattaatctttccctcctaatcctcaaatttaaaattaaaactttattatgtttgtacctagctacatacgatcattccatcgattcctctatgactcttttcactcttgctagtagaactcactagcctacttactaatacactttttgtaagtgtgtagaccatgagctaggtgttaaaatttatatataattttaatggttttctcttattaattgatagaagaggtatttaaaaatatttatacatttagacacaagtgagacatgtgcacttcggtataaaatggagatgattttttattgtattaatgatatattcagtttgttttttaataagcaattctatctattaaaaaggcacccggttctttcaagagaacaataatgagtagttgtgataggggagtttatatataaccaggtgattttttttaataccagagacattcttataactaaatttagtgtatcatcaaagtctatagtcaattttagggtagagataagataatctatggattttaaataaaatatggtaagataacatcttttaatattcttttaataaagaatatctaaattgcccgcgcatctgtgcgggcttactccctagtttagttaattgttggttagctccatagtagagacgtagaaggaggtattgcaaactaaaaataaatttaaaatttaaattttaataacaccatcaaacacctatttaagcgactataaaatcaccatttttatgccctagaataatttttttgcccctgaaaaaaagataattcaatatctatcacttaaaaattatttcctctgacgctattggattgaatttcacatctcttacacttgatgtcaacgtcacccgttgttgttaagaacgacattatattcgtcagatcttttgagaaatggcaatgtacacttgatgttctattcaatcctgcatcttctctcttcctgtggagcgagaaacactaaacactaaaataattcataagttagtactccctccttccctaaatgtttgacaccgttgacttttttaaacatgtttgaccgttcgttttattcaaaaatttttgtgatatgtgtaaaactatatgtatacataaaagtatatttaacaataaatcaaatgatagaaaaagaattaacaattacttaaatttttttaataggacgaacggtcaaatatttttaaaaaagtcaacggcgtcaaatattttgggatggaggtagtagatgataaaaatactaatatttcgaaatttcatatataaaagtaactgtaaacgtagtgcaaattttcaagctcaaggcaggccagggccctgcccgccctccctagctcggctcgtccagttcctgcctcccccagttcctctggcacgcatgcacttgttggcttaactctgctatattcccccacatgtggaacagacttggctcacatctgcttagctcctacctgctcaa

SEQ ID NO: 42250 - DNA, 2305 bp, Oryza sativa
tgcaaatatctcgcccaaaaattttattttttaaatattttttgtgaattcggtaaaaaatattattcaaatttactcaaaattttgtaaaattttaagcaacttcggtgctggaaagatccaaaattttggaaatattggtgaccacaaatttaaatttccagaacttttgtggaaaacgaaagtgtaaacctgcatcatacaaggtatcgagcgataatttattgatgcgatccgcgcgtgagcttggcagccagacgatgtgatactaaatgtttttgtccgtttatcaaatgacctggcacagtatatcgatatactactttgccacatggttactcatgtttgcttgctacaatggctagtaatggaccatcacaattagtgcagaacaaggtgcagagttggatggaacagtgatacctcgtgcttctcaaattcctcataccttccattccgactggctgtaaagagagccggtgcactgtgctgcaatgaatcgtgtacaaattaaaggatcaagaaaactggccaactgtttgcatatgtgtttgcttggaaacctagctggtgctttagggatcagtaaccatcttctgttttgtcaggtcaagcaatttcgtgatcagttgaatatttataacaatatctcatattattatatactgatggaaaaaagtatatatgtttgaacgaatttatcacaatactttgggcattgtatcaccatttgttgaaaaattgttttctcacttggacaataatttcaaactctttatgaaatgtttcaaaagatgcaacattatttaaaaaagttactaattgcaacactggtaaccattatatgaaacattgaacgccaataagtcaaacattgaaaccgtacaatgtatttattttgcagatacttgattttgttcaaacatttttatatcccacacatcgagctgtagctattgaagcatcacaatattttctgaaacatacaagcaatgcagggtgcaatagttgcaattgaacttgtgaaactatttattgaaacatctaaaaaatatacagtggatctaatgctaaaggatagatggatttgcctatcttctcaactcgatgaatcccttcatcctttaatgtagcaagttttacggatccaattttccctaaatgtatgaaattaggacatataaaagataattattgcctctaaattattcgtactatccttactattcgttggtttctattatagtctgggcctaatcctcacttatctcgagaacacaaataatctattatgtgcttcatctaaataattacatttggatggggaaagtattttctttttttatcgaaatacacagtgcgccaattcattgaatatataagaagtgttatttataggtaaatcaaaagaaataaatatttacagacaagaaggccacctaaggcaatatctccgctaggcgtttggctcccaccaatgcccaagatctggactcttcctcatctttcgcaaaaggagaaagtattttcaaggcatggatcgctgcaataactagtaatactgcaatgatgtccatctaaaaataggtgcagagctggagagtcgtgtcgtgcctctcaaatccctcgtgccatccattcccacaagctagaggtatatacgatgtacaatatattgtatcagaatgctcaagcagatcggccaatcagtgcaccataaatatttatcgtctaccaacctagtgaacttcccgactaactttcctattcaaccactctgtgaagtgtggtctgcatgcattacttccgtccaatttctgttctattggcttctccaattccttaatatttcagtggagtgtgagtacttgcatccttggctgagacgtagaatcacttcacgatgtatatctgaatctcctgatgccttctaattaatccttgaaagcagctattgtgtaacttgtctcccagattcttcctgttagttctgtctcctcaaacaggaatgttgcatgctactcatataatactgtgctatggtaaattgaatcggccatactggtacacaaaataattaggagagattttcaggaattaaatggggaatgaaggtgcatcgacattcgacggctagcttttcgcagaatcatagtgcaacgtgagtagttaatcctgtcgataagtttggtattagtgagcagcatgcatcaccagttcactgaagagtttaagccaatggagaataaagcatcagccagttcattcatgcaggatttaatatttccgtatgtagaaatctacc

SEQ ID NO: 42251 - DNA, 761 bp, Oryza sativa
ggacgtcgcgagcacgaatccgacggcgagagcaagcggcgaacggcggaaacggaggaggaaggcacggggagcaaatatatagcgccgggagggggagagcgcggccggagagggaggaatcggccgcggagatctcggctccattgaagacgccggcgacgattgcgggattcaaatcggacgaatccgagggagagagagagggaaaagagggggaaacgggagagggaatcacggggagtgatttccccctctttaatgcgcgcggggacggcgggatgcggcggaatccgcggcggcggcggcgctagggcacgggcggcggcgggcgcggcgcgaggacagggatgacaggtgggacccacccgtcagcgagggcggcgggcgggcccgcctgtcagcggcgcgcgcgcgcgggggaggccaatgggccgcgggggaagagagagagagagggagggactgggccgagccggcccaagaagggaaaaggggagggggaaaagacttttagggatttttctttttataaaacccttttaactttgtttatttcttttcaattattatttgtgctctgaaaattccactaaaatttatttacacattttaggcttttaggaaatatacaaaaatcctccaagcctcatttgacttttatctttgcacattttaattgttggaggctttcccatgaattttaattattctttgcacaatttcgaggatgaattttagagtcgttttgggacgcgaca

SEQ ID NO: 42252 - DNA, 9105 bp, Oryza sativa
aaaatagaagtgacactggctcacaaagacgtcatgagaggtaaattcatgcacctaaaatgactttcatatatgatatgtgaaatatagtactcattaacttgcgtatctaatatatatgtgctcatggcaggatccacagtgaaagagatgactatgatgcaaatgaagatggtacctgctgatgaagggttgattcctcgtaaaacatgaaggaatagtccattgcaattccaatttcagattgaaattttgttcaccataagttctagtgattgtttaattaggcatcatgttggtgctgtctgaataatttatctagttggatgcagtgaacattattattttgtatttgcaccgagtaaacaagtggctgctacaggacaactcaatgttatattcgttgtgctgttagacaaatgtgggaatcaatatattacaaggtgtggtcgtttaaactgatccgtgagtgttattgatgtattgctaatggtaacacattatgccatcgtgaataattatatgatgcattatcatggtcactaaaaaaattaggaggctacagtttctcggtagtctataaaataacaatggtatagtttcacggtcgttaataaaaatagcgacgacggaaaagcacggtcgttaaaggaaaaatgaaaaacgatcgcatattatcacggtcattaatgagattaacgatggcaggatatcaccgtcattaatgaaaacaacgatggcagaagaacaccgtcgttaataaaattaacgactggaaaaaaattggtcggtcgttaatactattaacgacaaaacctttaacgaccactgacgaccacacttctgtagtcgttaatgacctttaacgaccacatttggacttttaacgaccaaatttccggtcgttaatagtcgtttctccagtagtgccctcccgacgacgctgccacttcctcccttctcctcagtccgctcccgactcatttggagtgaagccaaggtcagtagcagctgccagtccagcgccatcccactaaggtttgtgagcttatcccaaaatcacaactggagacacaggattggatcatagggacgcttatatatatttgtcgacattacaaactattagtgcaataattcttgatgataaatgctcaagggctaagcttatataaattgtagttgcatgaatcatataatgtacctttcatgcaagaactcaagatgagttataatctataatgtaccttttggcttattagcttcatttggattttaattttataatgcaagctcattcatctaattagagctttatagttatatacggatatactaaaaattagagacaactgaactaggtttatttaggaagaactcaagatgttaacaatcttgtttatgtgcattttacatcactgtgctgatcgagctttgcatgaaagcttgtgggggtttgtatttaacatacaacaattggcaggagggttggtaagataatgcccaagaatttcagttttgtttaggcatgtgaacttttatttgacaggcaaactagatttgtgaaatatactcatctttctattcagtttgatattgtaaatatgcccaggattccaaccttaaacagtgttgatttttttcaggttttggcggcatacatcagaaaactaatgatgtattgtatgcatggttgttagctcttacatgttaatgtaagggttgtttgacaaaaatatctgtcgcaatgtgagctgggtcagtttgcattttgccaaggtgtgtgtttggaggctgcagtctctaggcatatgtaagctgtgatgtgaagttctgtgttgtatgtattttttttcaacttcttcagggttaaatgtgataatatgtatgactattattgtggtcaaaactgctcgtcatgggtgcccatgtatagagggaaggttatgccgaaatttttaataaattatggactttctgtaattgtgtggtttgctagctcttcatgcttgtgtgtaaaaaaaccatttaagcgcctatattaaccagcgatctctcttccccgtataagcgcattagttaactgatgatctctctatatgcacataagagcatatattaacagttggcctctcttatctacagaagagcatatattaactggcgatgatctctcttatccatgcaagaacatgcacaaaccgttggtcatctagcgtataagtaactagacgatctcttttacccacataagcgcatacattaacgaagaatctcccttaaacaaataagcgtcaaaggtaaccaacgatctttatttatctacataagtgggacccacaaatcagattcgtcttcctgctgatgtcaatcgccattggaggcttggagcaaggtaacctacatcccacctgccccgctgcaaccaaggaaaacaatcccaaaaaatttgttttcttcctcctttccattccctgaattcacttcaacaccagttgatgaggcagatttcaaggggaggcggtgagagggctcgaagaaattggttgctttagtgaatcggtgctaaggggaatgaacaattcctgtccttggaggcagtggggatcgtggaaatgccagcagagaggctgattgtggaatcccctagcagtgggaggggtggggatttggaatcgctcatctgcgatgcgcagcgggggaatagaggagatgggcagaggatccattgccgtggagcccggcgaccggcagggatgaatcgcaggggcgcgcgatgaggcaaagaatcgtaggtagcgtgaagagcaaatgaaacgctcgataggtataaacggcattaggcggcttcaattattctatttccaatcgtacccacgttagattcaacggttggatcttgtttggtacctgcaggtaccggtacgtggagccaccacctgctggaccgtagcaaagctctatgtaaaatgttagattggttgatgaattgatatgctatgggaattcagcatagttctttgagaaatcaatagagtaacctctgcttcagtgctagctgatatcgtcgaataacctcctataccagttgatctcattgagtgtagccatgtgacatttttccataatacccttatttagctgtgctagtggtgtacactctgaattggaactgtcaattttagtagtatatattggctatgaaccatggatcattagtaagacccgtcgaccaattaatataaggtaacatggtgccgaaatgaaatcacgggctttaactgcacatgaccaacctgagagaaggtataaaattggtcaaatatgacgcaaggtataaaattgcatcagagtctgtatatcacccaatgtatatatacttctatagtcctacatacctgcatagcttcttgaaatggcaggcatcagtgacttgagacgcactctgctgtgcatcagaagtaggaacctactgttctttgttcaagtgatgattgaaacctgttagtcaagttggttcttgtggccttgcacccgagaacactgtagcaaccggacgaatgagaagacgaataatcaaatcagccaaaaatttgttataataaaatcaaaagcatgatggctaggatagctgtaggatctaactagcagactgttgagatcaaatatgttaaatcgcattttgaactgaaagtatctgcagataactggaattgatgagaaaagagttcaaaggatgctcagtatgtctgtatttttggtatcatgtacttttgttccaatgtttgattgtactactgtagtctattggcgtataaataagaaataaaaattcagtcacataatgtgtaaacagaaaggctttgctagcaatgcacataatgatatgacaacttccttttccaaacactggcagcagatttcatttgagctaaggatatggctagctccagactgataacaagggagttttttcagacaatattaattcaatttatttatttaaagaggtggataataattaaataacacaataaacacctacaagaaaccgacaccactaaaccgttacgtcttagagaagatcattgagattcctataaaacagattccatatgcccatatcaatgcaaccctgatcaagaattctaaaacaaattccgcgttgtcctcatacaagtcagagtgctgaacaagatttaggctctaactggtaacggagttttttaccgagggacactactgcaaaaatgatttttcatggcgtcgccctataattttcactggcggtcatgcgcaaaaaccgccaccgccagcaaaaatcggttttcgcaggcggccacgctaagagacccgccataaaaaatagctctattttttttggtggcagttcaaaagggcctatcataaaaaatcgggatttcgttggcgtccgattttcgcttgcagcaaatgacagcaccgtcagtgaaataaaatttgacgctataaaagcaccgcccccacatcagtgaaaaccctatcctcttcgcctcatccttatcctgtctcctcctcctccctctctccctccaaatccacaggcacatgcacgaaggcagcggcgctcgggcgcagacgtggagggcggatccgccaccgctggaccatggggagggccgcaccgacatcgacgccatcgaccgtgctgcccatttccctcctctccgaccgtgttgctagatgtgattttttttgtgcatgttgttccagatgatgcacatgttttgatatgtgtaaatgatgtttgatctgtggacatatttcattttcaaatttcctctacacatctgtgggcatattcatttttagttttcatatttcctcttcgttggcagctagggcagctgcatgggtttgattttcactaacggttgatttaacacagccgctcgcgaaaataaattatcgttggcggtcggtgtaagacaacccctagcaaaaatggatctttgctggtggctggcataagacgatcgccagcgttcttcactggcctttgctttgtggcggctccaaattccgccagtgaaaaccttaaatggctgccatgaaagatagttttcgtagcagtgggatacgggtaacaatctagttttaggactggttgatcttaatactccgtgcagatgaatgagatggtcaatgagttgttcatgggtggccatttagtctttgaattgatggtgatcttaatactgcatgttatcctctctcattttttcttttttgagtgcggttgtgtgttcggctgtgtgtatcttagttatgcagagatcagaagtattcctagaaaaattatatctccttgatgtaattaaatggtttcaatgaaaacttccaatatctaaagaaaccatagggtagagggactccgtgcaaacgactacgtgcaagcctgtcatgaggacttcactgcatgtggccccaatcgcaaacctgagagtgatcataggtggttgaccaactatgacaaggggtaatgaattgtttgatccattgtggatacaatgtatgtacaccgatgaagtcataatccctgttaaagggtttagccgatatagcagcgtgacgattatcctttcttatcgtttttgctattgatcaactcaaataagtcatctgacgacacaagaatacattatatttgataacaaagttgaggcgaagcatatatccccattgttctgattatggtggttctcccctgttaacattacacctatatccgctacgagtacatgtcctcgccgccatcctcttcctacatgtctacgttacattgttatcaccatgtatggttacattcactactaccaaaataattcttcacagcaccatcctttattttcactagcagatttaatgaacaatcgcttgtaaaaatatctgagaggaattccagttaccaaacgctaatgaaaatcgattttcgcttgctgtcactgaagggcacggctagcaaaaaatattgccactctaaaaaaattgtcgacattaaaaaccatcgcccaccgcaacccaccgctagcgtcctccttctcgtctgctcctcctcctctccctctcccagaaccacccaccttgtaatttcactggccttaggttgctgtcagttgtgctagctacctgtgaaaatccattttggccacttgtgaaaattatttttgtagtagtgattgtgacgtctccatatctattgaaatagttgccgggttatacagttggactcaaactgcacctcctaccaactattacaactcaatttcaactgtaacctaatattccgtagtatatgtgatacctatattctaccacttagatagccttttgaaaaggaagcatgagggatatgagatgcactctactggtatctctacgaaaggcatcaatccacctgcacgggcacttccatccaagggtcaagaacaagaatgtgtttaggaatttgtatcagcacaatcattagtccttgcaattttgtggttagtcaatccttgtgattagaagctaggcatgagattctgccagatggcgtgtccccatcagaccgtgatgtcgttaggatcagaaacgatgaaccagagcacaaaaatgcctagctgtaaaactgtatcgcggtgcggcagaaattaatggattacagcacatcacattaggtgcaaagattaatcgataaaatctgctttatttcgacaaaatcaagtacatatataccttgtccaacatttttgttcatcattaatgatccgtagcaaatgtgctatgtgtgtgaggaccaaatatagaacaattatgtgccgaactagtaaatgaatacttcagtttgtccttacaaaaggactagtaatgaataaagatatgggatgacgtgacacaggaggcattgcaattcctcgacaactgagataattaagtagcaggcatctatttgagttgatcaggctcaaggcgttacactcgcagaatagagtaaggaaggaacgcaaagtgcatatagaaaaccaatgaatcaagatatatggtttcacgacaacaggaggacataaattgctttatgaactagtatacatccaatgtatgtatacttgcgtaactcatcggaatggaaggcatcagtgatttgagatgcactacgcaagcctctggtcttggtttcacaaactgagtcatggttcttcttctggtcaaccttttcatcagcacatcacaacaggagcgcgtccagcctttcgttatctctgttaccaccggaagctggccacaagattctgcaagatatcgggcatcatggtgctggttgtcgtcatcaggggatttgtatccggtgcagtccttagtgtgacagcgacataagcagtcacactaggaccttttgatgcaaatccaagggaccaaaatctacgaagtactgttcacatgtggaaaaaactgttgagctactgtagtggcaacactgtagcatcagatccagaccgttcactgaaaaaatggatggatgagattatgtaaagtttctaacatgcagtagcagttaggactacactggatctcaattgtgacggggtgctgcatcgatgtcttttctgcacactttgtcctcactcagatgtaagcgggcctggcctgggggaaggcgggacgttacaagtagtttattagaatctagtaagtctatgatataacacaatatttttcaagacaaatatgcagatactgttctaattttttcaaatatataataagcaacacaggcagagcaagcagccagacaaagcacgccattgtgcaagttagcttaaaaaattggagcccccgagcaactgaagaaaattgaagagttgctatttgcatgaatagctttgcgtgccctataggcgaggaggccaccaagcagagtaatcagtaagctaggattacaaagtgcagagtaagcaaggcgactgcaatgttagatgattgacaacagtttgaggtaaataactatggccttaagatggactagtcatcacgccttgagatgactagtccatatcaagctccataactagtccgtgcagttgtctcaaactataatggtacggaatggaatggaagacgtgaggaagttgagatggaccgcgcatgtctgcagaggctccagatttcatccatgggcagcttgacccaggtgtgattcatgatgctctgatttatgatgctcctcctcttggatattgcaatatgaagatctcggaacctggtaacaagtcatcatgctctcgctttccacgaggaaattttacacttttttttgctggttgttgtcgttagacgccaaaatgatgaaccacataacagagtgtaagttatttcacccaagtgtgtcaaatgatgaacctgacatgatgaacctctctgtctaatgttagtgtttgtaatgtttgtattatctatttaacagtcaaattattgagcaatcaccagcataagcagaaaatatggatcaactcactggatagtgtgataaacacactaatttaagacactaatccactacatgcagcttgcttttcaaaaagtcatagcattctaaaaatacatataaaaacaatctacacatgatttttatgttttcaaactagatacttgagagatattgatggttcttgttttaaaactttggcttaataaagtcaagaatgtaatatattttaatacaaagggagtataaacttttataagatcttatgatataaaagaaggccatccctgctggcctatcactcctgtacacatcgagttactgtctaaactttcaatgaacatgcaataatactagtgtatactactatagcttccagtcgatggcttgaactggcttttaaaaaaacatattcaacgagttcggccagtcgagccaggcgtatcggctcctaactcatagcacactatcatctctgtatcacctctccctcttccttcttgtactcacgcccccccctctctcctgctcgtcattagcttgatggcgcaagaacccatcccttagccatgctactgactttttctccctctcacagtgcc

SEQ ID NO: 42253 - DNA, 2653 bp, Oryza sativa
tatattattatgaacatatttaaagcagagcccacagggacgttaaagtgtttagttcatagctgacagtatatttcattcacatagtcctcgaaaacctggtatacttttcttgtgtcattttctgccgacatattttatttacaattttaatttcctggccgacatgacatttctaccgataaacaagcaccttatatatttaggccggccagattcatcagcttgattgcagagtgcaaagccacacgggatgcaccattacacaatctagcttttaaatgtgattaaatatggaggccagctgaaggaaccgaataaattaatttgcacaccaagttgtatccggcaacagctactggcttaagagagtatgctagaagtgcaactgtgcagaacaagcaaggcaatacatccatttgggaatggaaggcatgagggatttgggatgcactagacaagcgtccaggctccagccttcatccatcgacacctctgccattgattcgtagacttcctcttctagttgtgcaggggttgatggtgatcagtcgaccatgtggtgattcctcttcatgctcgttgtgatggcctcctttatacgggctgaggtcaggtcgatctagttagaaaatcgcctggtgaaaagcagcatgtgacactactctctcggagtactaactggaagaactaattggaagaagcagggcatataaggcacacgtcttgttgtcgagcagcagaagtaagcttgagaatacatgaaagctagtgagaggcaagctgaacaagccagttttaaatagcatatactccctccgtttcaggttataagatgttttgatttttgtcaaagtcaaactgcttcaagtttaaccaaatttgtagaaaaataataataatattttcaactcaatacagatttattatgaaaatattttcaattattaatttaataaaactaatttggtattagaaatattactatatttgttcataaacttagtccaatttaaagtagtttgactttaaccaaagtcaaaacgtcttataacctaaaacaaaaggagtattacagtgcttcgaggtaccctagaatagttatgaggaacatgagacatccggagtttcagctgttcgtcgaagtacacccttatgtcgtgaacaaactaagatatgatggctttccacatcaagacggaagaacgcacaaccatgtagctttccttataggaactgtgtgggcttcctagatgatccagggtacactagcaccttcctatatttgattctcatattgctgctactcatacaggcttgcaagtcgcaaggaaaatgttgtaagcagggaacatggtcgagcgatcccgatgtcataaaacctttttttttcgaagggatgaattcttagcactggatattctttcatgaactagacatgcaaattagtcaaggtatcatgattcttttgccagactcatctcgaagacctgctttctgatggttcagccgagaaaagttaaggagaacaaaatgtcccagcaactattatatatctgtgtgctagaaattgaggaacaactacatcagtcagtataggtcaacctgcatggacatgtttgcagtgtattgaaaatatcccacattcctacccctatcaaagccgtacatgtgtatgggtacactgttggagaaagggttttcacctacggttcgtaacccccttatataaagatgttaaaataaccggaactaaaagttcatctttattaccggttagtaacatcaaccgggattaaagaggtgaatctttattcccggtttggtattaccaagtccttcagagctaacaatgttttttgttcacataattaatgcaaatctagtagatttttttttgccggttacctattttactaatcattgtaaatattttgtatctgaccatacatttgtgttgctgaatatgtagcacctatctatttgattctgagccgatcaaactctgctttgcagagtgcacagccacacaaaccatccttccttatgcaattttagctggttctgtacaactactttggatgtagaggctgggttttaatccattttcttaaacataaaagcaatttaccatttaaaaggcggagcctaggagcaagtagtgcaactacatacctattgttatatatgtggaaggccttgcacttgcagataagagtaagctatgagtgcaaatcgcaaacaaaaaaatctgcagttccttagtcagagtcgtgagaaggatgcacaataacaggaggccataacaaaccaatatacatccaatttataaacatgtctagcttatcggaatggaaggcacgagggatttgagatgcactacacaagactccggactacggcgttcttccataagcagcacgctattggcgtgaagaactgagttatggtccttgtcctcaatggtgataacaggagcttggagcatgggcgagcccatcctctcaataactttatcatcattaagccattaagtagacaatgtgactagcagttcattaagcctgccatagcatgcattgccatacatgcatgtttcttttttcttgaaaaagggattgccgagttaatgtttcctagccttgtcgaggga

SEQ ID NO: 42254 - DNA, 2769 bp, Oryza sativa
gctctttatgggcggccaaaattgcaattagccccttgccgccctctgtatgggcggcaagggcctaatcgcaattttggccgacggcggcagacggcgcggtcgacccaccgtctgccacgtcagcttgccgcccaccattagagcggcaggggctatttctgcaatttttttggtcgatagattatttctgtaaatattaaaaaaaaatcccaaatattgaggggccctgtgcaatcgccaccgtcgcacccctctatcgacggccctggcccgcataattcgccctcagtgcagcccagcttaactgtcctccagcatttcaacacaaagtgggctatttgttatttttccgtcaatgtctcgggttgaaaccggatattgaaaaacacattgcaactgcagcccatcttaactgtcatccagcatttcaacataaagtgggccatttttttttttcgtctgtgtctggttgaaaccggacgttgaaaaacaaattgcaagtggcagatgcacaataacaagtaaattataatgtttcaaatgcggaattccacattcgaaacaatataattttcttattatcaacatttaatttcattctcaaaagtattcaacttcacttaaataaaacaccttcaaacgcatcaaaaacatattgtctatggtttattcaaaactacagactgggaactcaatgagataaatgttggcgactatctttggaactagcccagtaccaacccagcaaggcctcggataatctttagaccaaacattctaatagcgtgattttaagctctatcttggtgtactcaaaatgctactcgacctatggcttgttctgtagccctctcatgcaaaatgaacatagcagctctgtccctagctaactttagaacacaatggagctaactacatggatatctttctacatggagcaaacctaaaggcaaaaactattatatccatgtgtatccactagtggatccaccgcctagtggccctgggcggccactcgggctcgccaactaatgatttattgaaattctttgtaattaaaaaaatacaaaattcaatggaaattttaactccacatcgcattatcctttagcattcaagatcataattttcagccataggttatttaaaaagaaaacaattattcttagcagcattgtactcctatccaaccaattgtgccttttgaacaatgaattgcgtgcaatccaatcatgctctcctctaatttttagatctaattcatccaattggtgtgagaaacctacagcccataacaaagatattccaaccactcaaaatacaatgaattatttttcctattattactctagctctggctcctacaatttattgtgtgaattcattgtactgaaattgacaaaacgatttcaatgttctgctcctcttcgtctagtactctattagtctattagaataaaacaaaccaaaaactagattagcaaaattgtaatcgactcaatattacacgatgcaaggtgaagatatgatctagatgttggtatttgatacgatcatagaaaattgcaacaaagccaacatactaaaatttctcggagaaactttgatatttgggggcactccttccggagcttcccctcactctctactaagccaacatactaaaaataaaactacaagtgagttgtactctaggctcaagtttgtgtgtgttgaagcgtggatgcatatatacctccttttagccagggcgataaccgggcgtaacagccattggggagtaatctgggacatccatgtggaaggccaggatgcgaggcaccagaggcggttcggccaaaccaggggttcagccaacccctgaccccacctcctggcctctcctttagtgaaatgagtcaagaagcacccatgaaaacgtgttattagctatcggataaatatttcttcaagcaatgtattctcaatatagagatcaagattggtgttaggaaatattcaaaaagtaaatttcaagtctgctcagagtggtatgtgggtttgcagcaagtatccattttactcgaattggcacataagtaaaccattaagatgggagctgattgtagtgaatccaatgttacatcccatattttcctctgattttggatctctcaatcacaacttggtgtaaagatattagacaataaaaagggattgtacaaatatgcaaatggaaaaataatgaatcatctcgttggaaatattccatattacgaccactagtcatgtcttttgactataacttcaatacttttttcatgcttaatgtgacactcataatgacagggatggaaatcttgggaaaatggtttagtagtctcaaatatccaattgaaaaagttcagaatcacattaccaagtaactcaatatgtgttatatgtgaacacaatgcatgtaatattgcaaaaaatagtaggattaccaagtacgatacaatagtttctgggacaaacctaggaatcttgtgtccataacataagaggtaaaatcatgtggtacataacacataaagtataaaaaggcatgatatatttaaacaaatatgttaattctgaactacaaaaaattaagtgactaatgaaacaattgtggtattataatcaaatttgtcatcaaaactcaatggaggttcagcatgtagcatagaaagaaaacacatgatgtgtattgacataagtttttaatgatgtatcacaaatgtatattcaacattttgtttatga

SEQ ID NO: 42255 - DNA, 699 bp, Oryza sativa
  unsure (1)..(699): unsure at all n locations
ctacatctgacggagctgctgcaccttgccttgcaaatccttcaccgaaccttccagagcatccaccctcttcttcacagctgggaaacgagattctaccgccgccttgagagccatgagnnctcagccctgctcttctcctctgaccgctccctctttctcactttcctcgcgcttcttctccacctcctccattttcttgaggaggtccagcttcccatcttggtccatgatcttcacgccctgcttggtgacgtagcgaggtttcttgtaggtacccgtggttgaaatctcgttctggatctcgctaacccagtcgagggagccgaagcttttgcggaatcagtcgccgaggcaacaattcccacctcttccgggaaaaattttgcagcaaaatccaggaagcgagagaatggcaaggctctgataccagattgttagaaccctaacccaactcctcaataacagtaagaacaagcaagaaacaagatagtttcaccaaatccaacaggattggtgcccgccgccttcgcctccagttcttacttcatcgatacgaaagaaagacagggtgctttgttcttattacagttcaactctctctcactctagacttactagtgggctcggttggtactcatttggtacaatccggcccacacacacgcgtattacacttacggactcttgctcctctcc

SEQ ID NO: 42256 - DNA, 724 bp, Oryza sativa
ttgttttgtaaaatttcaggcataacattttatttgattcccaacttatgatggtgtgtactctaaaagaaatgcatgactttttttgttttgtggggaaaaagaaatgcatgacttcaatacaaagttaacaatgcagtccaaaactcaaaagttacgatttaatttatagtattacaatgaaactgattggagcaatgcatgctatatcatatatacttgcagccacaaaaaaaaagtattacacagggctggcttggaacctaccaccagatcgacatagttccatcaccctcaacttcctttttgaaagaggaaacataaattaacactgaaaagtttggtaacttctgatagctgtaaaataaccgtaaactcttctagcaattatagaagggtaagattgcaatataaatgtttgacctactgtaccttttgtaattattggctctccagtgttgaggaacggaaaggacaaaaaaaaaaataaacgaaaatgctgccgctcggtcgctcgggggagggggagaaaatcgggcgctcccccctccacaacgtgtcgacgtgcttctactggggccccaccatgtgtccctactacttgccacatatcttcaccatatactctattacaacaaaaaaaaatcacatattttagaaaccccctattaagggaattcggtttattttttgtttcacaaaaaatgtttcacccagtgtactc

SEQ ID NO: 42257 - DNA, 693 bp, Oryza sativa
tcgggggtcgatggacattctccagggcaaatgaaggctacacgagctgcggcccggtagtcgagatgtcatggcagagggttggtgccctgctgctagggggctcagtcctgcctgcctgtcccgggtcccggccgtaggaggattgggtcggtactcttgtttatggctaggatgggttgggaactatgtcacgtcttccgtccgtataccgtggtggtatgtggcacgtggttgcacgcgaggaagatgtgtcttgtgggtaaagatgtacacctctgatcagagtataatctattcgaatagccgcgccctcggatatgggcaagccgagcaatgtacccaagtcagtgttttaattcttaaaatttgctcaacaactaaaatttggaatggttggcctgggttggcttgggacgagctggaacccaggtcgggttgccagttcggtccgaatcatcgtaggccttgggttaaggcaggttcgtgagggttcacggccttgtttaataatattgtatagctctaggatcgtctttacaaaatagctttgggcaactaagtgacttttaaatgccgtttactgcaaaacttaacccctatattattattcccttgtacctcccttgcattaattatgcatccgccggtgtggcttgctgagtactgtggttgtactcattcttgctcaat

SEQ ID NO: 42258 - DNA, 582 bp, Oryza sativa
ccattaaaaatggttttgtttcctgtttcagtacttatagcatgttttgcttgtgtgctttgtttgtcgcgtaggtttcggccgtttcgtcgatccgcagtttctcgaagacgttgctgaggtctcatcagtgcgagagcaaggcaagtcatacattgcaattgatcatattgtacccaatttacaaatgtcccgcatttctattaaatattgcattgttttacaatatcatgtgggattggtcctattactcagctatatgttgtttcccttacgccattgataacttgggtattaaaatgactagatgttggttcaggagatgcttagccatgcttagttcaactagtgcacaaaaggggatcacattaaagcatagactttgtttattggcatagctttggattggtgccaccgcatgggtgtcgttaattaaaatacactgaatggtgggctgtgggtgcatggttttgctggtcgcacccatggcaattaaggaccggttcacgggaaaccctgggagacttaccgtgcttaccacaagcgggagtgggtactgcttgatctgaagtatagctcgac

SEQ ID NO: 42259 - DNA, 837 bp, Oryza sativa
tttgtgaccaagtttgtggagagttgaaacaggaaatcaggtcagcagttctgatgcagaaaccacaggatctggattcagcttgctcattggccttcttgcaggacgaaatcttggaaggttccaagtctgtcagtcataaaaagtctgataagcctattttagtcaagaactctttgaagtctctctctcctcaaagccattctaattctgttgttaagggcaatgcatcacctccatcagaggacaggagagggtctgacaataccagggctagagatgacaggctagccgctctgagatcatatagaagatccaaggtgctgtgttttacttgtggggagcgttggagtaaggaacacaaatgtgccaactctgttcaacttcatatttgtcacgcccggaagtttccccctctccttgctttaaaaattggctaaataaatcgtccgaagaaattatcttaaataacctagagctaattccctaattaataaatgcaattaataattgaattcggcgtggtggaatttttcttgagttccccatgctccaatgcattaacaagatttttagtggaattttcagagccttggaaataatttttaaccaattaaaaatgagcaagtgcaatttttaatcccaggaaaatcctttcttctttttctttttcctttttcctcctttttcctcttcttgggccgtcggcccactccctcccgcgctcggcctcttttcctttgggccggcccgttcccctttcccctccccgaagtcctccctccctccctctctccttcgggcgccgacaggtggggcccacctgccggtcgtctt

SEQ ID NO: 42260 - DNA, 1570 bp, Oryza sativa
caatgcatatcaatgttgtttactagcgcatcggcttgtattagggtgtgattttcatgatctctcaccaatagggagagacgatatgttcagttatcaatattcaatattgaggggaaaaaatgttctaggatgtgctctattgaggtatactagtattgtaaagtgctaaagtgccctgatattgtcgaatgcgtgaagcatggatcttctttccctttttctcaacagtttttatgctagtcgctttggcagttcgtgcttcaatcattggaagaatattttggagttggacgtggtgtgcactgtatttttttagacacgcaattgtatttgtacgcacaaaaaacattatgaaacgacaaatttctggagagatttgagctaaatccctgacccatttattaccacagcgttgtatttgtagttggaactagctataggacagaaattttcttcaatgtagttttgtactaccacagttcttcgtcgattagcctcgacgtccattccttccaatcacaaagagctctcaggcaggatatttggttggcctacagatgtactcctatacagcagtacagggctgtgaagctgtagaaatgcatctaccgaggaatgaattctgaatttgagattggagtagaggtaagatcccaggtgattgctagctcattgtgaatctgatctacgaaatcttttcaattccgttttctcatcccctctctaatggatcttaagctagctaagatgtgcttgttaagagactatgtttgccaggcacgtgttgccgctatttattaacaaaattcgtcaaactttcgtttaaggttaggtgcctattattttgtcacatatcttgtagtagttttccaagtctgtgacctatgagacctagttcattggaagcaaatcttgctataatcgtggctgcaaccagatagctgtcaaatttggtcaaacttacttaaacggaacaaacttatagctggcaaccaaacatgtcctaaatttgcagttgagcaatcattgagcatggtgtgacaacagagaacaaaggtaacagtgagcagcatgacagccaaaactagtgcgagatcgatcgaaaagaaagtgatgcagctgctgcctcatcttttcagctcaatcagcctttttcctctgaatcatttgcactcactgaccatgcaatcatgcaacgctgcagctccacaaaaatgacacatgaaaggtcagattcgatcgcccaatcaacgtcaagatcacacaaaggacacacaaaaaaaatggcgacgattgatgagagagctatacgaatgaatgatttgccctccgaggagcatcaattcggggcctgattgatccgatgatcctgttcaacggaaatgtgtccaaaggaagaagctttaacactgtatctgcttttggactcatctctgcatttcgtcagagctcatcgaattcttcagcaacaatagaaggcaacagctacatactagctcagctcacttgcaattatattggagtaaatcgtgttcatgaatactaagcacacatgaatgatctctaa

SEQ ID NO: 42261 - DNA, 1675 bp, Oryza sativa
attaacatctatataaatatgggcgatgctagaaagtcttacgttgtgaaatggagggagtagtagagaagagcgtttgactttgtaaagaaaaaaaaataaaagaagatttgtgctcatgtgctaatatgcccatgacactaaattgaggcataggtatataattcacgataatttgctccctcgcttttaaattagttgttgctttaactttatcctaagataaacattttaacttttgattattaatttttataatgctatataggctaacatgttaactgtacataaaaacattactcatgatgaatctaaaaatatataaatattataaagtttaactgcatggattattcaaatcaacgataaatatttgactcatgacaaagctaaatcggcatgcaattgtggtcttatctctactactacaagggtgtgtgcacggaaaacggagcggttcattagtgcgcgattaattaagtattagctatgcttttttaaaaaagatcaatatgattttttaagcaactttcgtatataaactttttgcaaaaaacacatcatttagcagtttaaaaagtgtgcgcgtgaaaaacgagagggaaaagttaggaaccagtagtgccgaacacacctaaaagaggtagccttcatccttctgcccccctcctcctaaaaccacttccttccataaaaatcgatttctctaagaaaacctgaccataattaaaaaaaaaaacctaagcaaccaaacctatccaaattcttccactaaactaaactaaataaatagaccattgcaacgcactgctatataactagtttctccaaacaacaacaacaaaaaaaacaaaacaaagaactcaatccttgaaaatgttatataatctgatggagcttagttcacctatggtatttgaatctgatgaaaataaaaattaagttgacgcacgtaaaatgaaaaagccattagcacataactaattgagtttttagttattacaaacttgacaaatagagatatgttgatattttaaagcaactcctgtatagagagtttctgcacagaactgtttagtagtttaaaaagcgttataagtaaaatgatcttaggccctgtttttttctccaacaagggttagatgaagattaagattttcatagcaaaaacgcttttcaaactgctaaatggtgcgtttcgtgcggaaactttctatatgaaagttgctctaaaatatcatattaatctattttttaagtttgtaataattaaaactcaaccaatcatacgttaatatcatatcgtttcgctaaaaaacttaatttgcatctccatcttacaccaccttattcagaaacgtatctctctccgatttttctttttctgaacacatgcaaaccactaattacaattgtaagcacgcaaaaattggaattctacttctaagcaaaactgcccacgtcaccaccataaatctgattggcctggtgataactgtccacgatatgggctacctatttgtttaaggaataagtctatacacgtccctaatttcttatccggttggcaattttgctgtcttgtttttaatcaagaacatacaagtatttttgtttctttctcgtatctggctatattcatataatactgagataagaattgcatagttatatt

SEQ ID NO: 42262 - DNA, 716 bp, Oryza sativa
aaaatgtatcataatctcttcattcaactactgggatggcagaccaaagttgtaagttttgtcattttgagttgtgtactgactgtatatgtgttgtggctagtgaccgctttctggggcatgcacagtctgttgatacaatgctgaaggttagagcctaaaccttgtgacaattcttattgtagcctactatttgttgttatatgcaatcctttgtaagccaaatgtcttctttttttcttttagctggatgaagaaactctaatatctggtgcatcggatggtgtgatcaggtttggtgccttgcttccctttaccctgccccagttcccaataatatgtattgctgttttaacatgatgcccatgttttcctttcagattagtgggtatcttacctaacaggatcattcagccactcgctgagcattcagaatatccaattgaggcccttggtacgttctgatcatttgctgcctgcttaaaatacgtgtaaaaagtacatatgttctaactagttacttacctttgcatcacagctttctcaaatgacagaaattatctaggcagcatttcacacgataaaatgttgaaggtgatctctcttttcccatcccccccatagcgcaccatatttttagtctaaataactgtatcctatctaggaagcatttcacacaataaaatgttgaaggtgatatctcttttcccattccc

SEQ ID NO: 42263 - DNA, 1229 bp, Oryza sativa
cggcgacggcgcccctcctcccgcgagcggcggcggcagcaccctcccccaccaccggcggcggatctagcgggtggggaggcgccccgcgagcggcggtgacggtgcccctcctccctcgagcggcggcggcggtggagtcctcccccaccaccgacggtggcggcggcgctctcccccaccaccggagagtgccctctgccgccgccgccggcggatctagcgggaggggaggcggcggcggcggtgctctcccctccaccggatccacagcgacagcgacggcggcggttcggcaacgacggcgacggcgacggcaacggcggcagcggcggcgacccccttcgatctaattttttgtttttatttggatatatgtgtgctggcggcgacccccttggatctaattttttgtttttttgcaaagtgctataaggctgcatgtgattctttgttatgtgctatgatttttttatactatgtaaatatgcacttgttctcctggtgatgctaaccgaataggacttggtataattcaaaccaagtcctattcgcccaaacagaaacaaagtcctaatcagctcaaacgaaaacagatgggagtttgttttctatttttgtggaatcggacatattcttttaccgcgttgatgaatcggattcgttccggttttttttcacccggtttttttgacggacgatggaagcacctcttattttttaagtactagcaaaagtgcccgtgcgttgcaccgggtgattacagagtgtgtatattgaccaaaagtgttgtttggtttagcaaaagtgcccgtgcgttgcaccgggaagtttacagatcagaaaaatatgcaattaattaaaatacaaattcgctgaaatatttagtatttttaagtaggtatgtgtataattaaataaatttacaagtaaaattctccattctccatggttaaataaaatgacatggttaaatttaattttattaaattctccataattagttatgctctttggaattttattggaattttcagagcttaattgctaattttattaatacaaacatcatttaacaattatttaattggaaaaagaaagaaaatactttcttataggtttgcttcgaaataaacatattcaatagaactataattgtaatgcttctgaaaaaatgagcactaaaaatgtacttattctctttttttcggctcgagggaccaacaata

SEQ ID NO: 42264 - DNA, 671 bp, Oryza sativa
agcggaggaagtagagaagactgtcacaaaaaggtaatgcaaatgttcacaaacacacagctactataagcctatcaagttcaaggagggactggtgtgttacataagcttttgctagtccaatactgataattaattgagcaagaatattcttgttgaggaaatacaatgaactaaaaatgtgagtgaaagataaatgaatggtttcaacatacctgatctttacttctttgtcacaatggccacaaagcccaaggacttgcttttttgctttttctaggagatcatcaaatcctgatttttttggctttgggggtttcaagtcaatcatcttctttggaaggtgatcaatatctttctttttcagtaagcgagttaatgctttagcttcatatgccttcaaaagactcagagggagatgtccttcacttaaccagtatctgttcctctcattagagggttcgtcaagtttttttccatgtttagcaataactggaggaatattctccctcttcccaaaatcaagtaaatattccacatttgttccatctacacgctttctgcgaactatactttcttgaaaagacgtgctattttctgggtttcctttgttgcaaggctagcagggagagtgctcaatatctcagtccacctgatattgaatccaagct

SEQ ID NO: 42265 - DNA, 1784 bp, Oryza sativa
tggtacgtcatcaccaacatccaaaaatattagttacttaaaaagaatccagaaataatgtccattaatttcactaagattggagacacagatcatccaacctcacacaaaagtccctgcaaatcacgacttcatgcatgtgaaacatccacgaggaaaattaattaaagtcaacaaaattgacaagtttctattcgaactaacgtatctggctagttaattttgttgtcctttcgatggctgcactccaaagttgacatgaacaaggaacatgattcaattgggtagctaggccacgtattacttcactcgaaatatgcatatgcacgtcaagcacggctaacattttccaaacccatgtacctactacttataagaagatacaaatttcggcgtaacgagttttgaataagaacaagtatgaatctaaaaaaaggaatcagaatggatacagttagagtgcatatctgccaccggaatgatgtactccctccctccctccattccaaattacaggactctttatttttttagaaaattaaacctactaacttttaattaataaccacactaataatatataactatatatatatatatatatcccaagtattatgttacttatcattagattcatattttaaaatagtttcatatgatactaattttataatcattgatatcgtaatataaaataaatgaatgatcaatgtatattattgaaaactatatacttataatttaagatagggagtattacatatgcacaaattgtcttatcaaatctggctatatttcggataatattatataattgagggtttgttgaaaccatgcaaattaagttgttttcatatatatataagcgtagatatactgtatgacaatatcaatattgtattctcattatttatatatttaaccatatactcccattatgttggtattagttggtcttttagaaagttctcaagaaaaacgccaaatatgacgaaaatacctagcaagatcaagctagcaagaaacgtacaagaggagcttacaagtcgttttcgcctcactaattttctgggcggcactccaaagttgactccataacacgtaatctaaattaacgaatcagaaggtatgacacgtcgacggtatgataataaataaattatacacagttagcaaactgatgggtttcatcgtagaaagcgaaccagtaatttaaaatcaagtcaagggcaaggtcaagctcacacggccgactggtcattttatttattgttgtcttttctggaactcaattgttaattatttcatttgggcaccatctccaatgttagcatccactttcaacaaataactataaaatgggttcattttgccgagtgatcatccatgatctctggttattaactcctgtttttttagcctacttcattcgtcccataataaatttattttttactcttttatttgtttacaataagtttagtttaagtaattattaaatcaaaatttatagaagtagaagataaatgtgggagtaggtagagtaggaaataattgcactgtgatatgataaagtagggtattgtatttttttattgatatgtgtagaaggagtaaaaaaatgaagtgtgtagtaaaaaaattaaagtgagtaggtaaaaaaggagcacgcgttattgcacgattaattatgtattaacttttttttaaaaaaaagattaatgtgattttttaaaacaacttttgtataagaaatttttttgcaaaaaacacaccgtctagca

SEQ ID NO: 42266 - DNA, 695 bp, Oryza sativa
tttcacaaatcaatttcaccaagtcgcattttgtaacggtgcgtgcctatgtggttacacatcatatagtttgtgtttaccttcagtgttgcagttgacaagtgttgcaagagcaacaaggccagtgaggagaacaactgatatttttgctcctgcaaactgagaccccattgctatggctaattgaaaatgtgttgaaacttgaaagctgcttgtaatacactgaaatgcattgagagggaaggctctttatacaactagaggaagcagctaaaaaaatggtttctaacctaaatttcaagtctttttgacctgaaaaatcctttttcttccactcagctatgaacttttttaaaggtggtcaaagaagaaactccatttactattttcagcaatgtgatgaacctttgggcatttattattttcatcaattatgttgaacccattggcatcttttgttcttggcattgtgatgatcctttctcatactttcagttttacgctacgaatctctaataattttgtctgtatgcatctcacgaagaacaagccagtatattcctagtatcaaacccagaaagaaaaaaaaagagaggaagaactagtttgaagacagcaaacaaattttcgatggtataggctaagaatatagattatttttctaggaatgtcaaagggtatgtccgtatgttcac

SEQ ID NO: 42267 - DNA, 942 bp, Oryza sativa
cagtggaagttgtagtgtgcattgacctaaccgaccacaaattctgatcagttcagtgatccagtggtgtctgtcttgccttgggtggacagatttgaaggattccttggtcacatcgattcaagaatactaaatcactgatgctagcgcccacatattgacccaaattaaagggaaatctacgtttgaggtccacgtttagggtgtatttagttgaggaaatgaaaatttttaggtgtcacattggacgtttgaccggatgtcggaaggggttttcggatacgaatgaaaaaactaatttcataactcgcctgtaaaccgcaagacgaatcttttgagcctaattaatctatcattagcacatgtaagttactatagcacttatggctaatcatggcctaattagtctcaaaaagattcgtctcacgatttacatgcaaattgtgcaattagtttttcttcttatctatatttaatgctccatatatgtgcctaaagattcgatgtgatgtttttgagaaaaaaattttgggaactaaacagggccataatttggtcatatcctgtcaaactatataaatcgagcatcaatgcagaaatgctcgtactgtatataaaatttaatacttcctctgtttcagattataaaactttctagtattgctcacattcatatatatgttaataaatttagacacaacacacatatatatatatacctagattatcatatatatgaatatagacaatgctagaaagtcttataacctgaaatggaggtagtagaatttaaatcttaaaaaaatatattttataactaagggagtaataagtttatgatattacaacagtatcatttaagacatatctactcatacttttttcttttttaaactaagcgtttggaaaattattaagtggcacatgggagtaagaaccttt

SEQ ID NO: 42268 - DNA, 708 bp, Oryza sativa
gcatgctgtttacttgcacatatgagtatgctacagtattaaggatgtttgatgattgttggaaccaaattgtcccaacaatgatagaaattcttatgctgaaaagaaccaaaatcagctggtgcaaagtttccattccagttgtctttaccaatataatggtcttcactcttccaacaagacaaaacttatatcatgatatcagcagaggcaaaggaaaaatcatatcatggtgaagcaatatttaactacagagtgttacaaacaaaaaggcacaattgaatagcgaagagtaccatatcaaggatgaatgaatacaaacctaattggcccaaatattctatacctcctaccactcaatttgattttgactgtattaagaaaaatggacctaattggcattttatccatagcacaatcttgatactataaactgtttatgaaaaccaactacaaaagaatataaaagaaaattaatataagacaagtccaagtcaacaatctatgaaaaagcctctgcaaacatgagataacatgccctatttttgacaataccagtctttaaaaccctaaaccatgcaatgtttcaaggattgcacattatatgcaaaacattcaagtggatcatagcaagacatcatgacttgaatttttatgttcttaaactaaacatttagaagttattgatggtcagtgttggggggcagg

SEQ ID NO: 42269 - DNA, 779 bp, Oryza sativa
atgaaaagcactcttagttaccatatcaaaatgaaaacgcactcttagttaatatatcaataaaaaagaagggcaaggataacctgactgtgatctacttcgtttgacttggttaatcgactaattattcccaaaagtatgtgtaagtggctctaaatccaaaaaaaaaagcactactaattagctgttcagcaaaaggaaaatataagagattaatgtatgaatttccgtaagccacctcacgtatcaaaggatgaaatctaggctcccaaatatacaacacagaatgaagcaaaagctgaaaacaaaaataaaatgtcaagactgtgaaatttaaaaaaaaacatctaataaattttaaagtaagtacccacatcaactgatggtaccacttcacagtctgaaatctcagtaagtatctcatgattttgtttgagattttcaataacatcataagaacaatcagaaacctgcaaatcattaagatataaaaaattgtgctttcaactaacatgaaatgaataaattcaaataagtaccttaatgtagggtttcagtttgacaagttcgctaagaaatttacatatctgcatgttgcatctgaagcaagtccttgtgtaaaattgtcgctgcacaaagtcaccaaaaagaagccccttagccaatataaatacacatgaatcctctttgcttgcgtgtctgtttgaagatggagtgtatataaaacgcttacttgtcggagagaagaaatggtcaccatataaggatgttgatagctg

SEQ ID NO: 42270 - DNA, 779 bp, Oryza sativa
ttagagagatatgtcgtcgttgacatgtactccctctatcccataaaaaaacaacctagtactacgaatctggacataattttatcaaaaacattatactagagtatgttacatctaattatagattcgttttttatgagagagagggagtactacttattgttcttcaaactacatgtcagtaactacgtcgttgggaagtttgtggtagtaaaactacttctgttttgttgtatacttatacttaggaacgaattgaagaatatgcatccatgtgacacgcttcttgaactattaaaaacggaattgaagaatgatccatgtgacactcttcatgaactattaaaatagtgtgctcttaaaatactttatatatatatatatatgattttttaactaaaatattaaatctattttcaactttatagtattttatagtagttaactcaaataatttgtaaaaaaaaaaccaggcctgaccccttttctctataaataatcatgcatatatttctctatagatagaaccttgcatatcccggttaaatctctaatttctggttttatgtaccatattttgttaaaaaaaaacaccacctgactcgtataaaaggaagtactcaaaccatgacgacagccaaaacacgtaagctcacggaatcaattccatatcatatcatattccgatgaacctcagcgcgtcttgggttgctacagggcaacagttcctgcttgcttctgcgccgcttgatctgctcatctcggttggatccatccgt

SEQ ID NO: 42271 - DNA, 2729 bp, Oryza sativa
ccaaccagcccctaatcggcgaggtacctcgagtcccaagacactcgagaagcgccgcacgctccccgtgtggcagctgaaggacgatttcctcgctgtcctccacgacaaccaggccctcatcctcgtcggagaaaccggaagcggcaagcactcaggtattgaatctgcacctttgcctgtacatctccacattgaactgtaaaagtattttagattagtcattattggttgtttattaggggattttttttccttctagatggaatcgcaccacagtacctcgacccccaaatccatcgatccgccgccatcggttcaggggagtggcactccggtaggccgctcatcgagttatcttgatttcccgagcctccgctcatccgccaccacgcgtgttcggggttctctgcgccatcgtcgccttcatcctcctgtttgcacgctgccgccaatctactgactctggtatgcaagtcctaaatcgatcttcttctccattgttgtcatccttgcttctatcctctgcatcgatcgatttgggtgacctatgttgtgggtctgtgattagggtttcaatacggagtggacaaagtgttccagccattgccctagtcgccttccatggggcatgagctcttctgttggggttcagtactgagtggagaaagtgtgttccggccactgccgtcattgccttccacgggacagtaagctccagcaagcggatataggtaagcttctatgccaccattatcttctctctggattaggccataaatcttgattccgatgcgtgcctacactcttccaactgctcccggtcacggataaagcttggccacttccccgctgctgaagcatcattagtttcaggcattaatatctaacatttgattcttttccttgtagatctgcatttccatccgcaacagctcttcatctggtctgcctctattcattttgttgtcaattggttggtttcaccatcctttactctacaacagatgatttgcatggccattgtttcatgcgcaggaaattcatggacggtttacaatgtaaatttgatgttggatggtgtcttatctcgaccaaagtttgtcaaattcgcttgcctgttgctgcgttgtataacttgcaacctatttttcttatagccatgccataagcttagatgcaccttctactcgttgcctcatgtatgcagccgtgttttgatatatatggtgcagtgactttgtgagcagctcagtttaatagaaccaaggtacgttctcttctccttttgttttaatatatttgcagattttcagaattcttcagtagcttaatttgattttctttacaatcttataggtaagatggttgatctcgatcattgtttcaaattgattgcctacaactctttgaaatagaaggtaagttaaccagacattcatctactatatatgtttgtgtatgtcatatacttgatgaaatgcttgatggacttagcccgtcgatatgcattattggttaagtactcaaaactgcacactgctgtcacttaattttagatttctcattacgttcagttatattagattcaggccttaagggatatggcagctattaactgtataatattttgacccaaatgattcagttctagagcacttaaagatggctattgcaggtattataggccagcacaaagtttgttgttgttatctctttgttgcttgcagtatactcatatcacattgaagccaagttatgctatgtattacgttgatttggtcatgaaacgtttctctctattcaggaagcatttttattcaacaatgtatgcgccttctttgctaaactactatgcagtggatgtgttcatgattgttttcttctgatcctagcacattccctgagatatccttcaaatatgatgacttcaaagtcatcgtgtgccttttttcctctcatatttacattgttatgcctaggacaatagcttcagtttaacagtgcaccttcgctgcttgataattgcgatgggtaagatactatcagtcaactgtgaatgtattatgtactaatgttgtttcacctctacaaagccaaaaaatgaagttctccctagacacacccaaaccttccaagtagagcaataattttattagcaaccattatttccacatatctatcgcctctttgatttaaatagtcatccaagataaaggagttaacgcaataaactaaatgggctgctcattttgtttaatgtccatagatttgcaagcaggaatccctcaatctatattttctttgcttggcaggagttacatttttttagatgacatccagtagggattcaggccattggagcttgagggatacacaccattcagtagtttgagaaattgatgtttcaacttcgcctaaatttataggttaaatatgatactaattagttgtgcttgtcgtttttagtaatcagtgccacatataaaatgtagctcaagccatttttttgtgcttttacctctcctatcaaggtaggactgatgttggcatttgggaacgccttttcattttctttatgtaatgaggattaatgtatttccaactcctaattagtaaatcacaacaagaggaaagcaataaggatataattaccctttctaaattgaggtgatgtatgcaagaaactagccaattgaaataaccaggctatgaatgtaatatgaaaa

SEQ ID NO: 42272 - DNA, 761 bp, Oryza sativa
ccctagccatataccatatattcatgttctgcttgatttctactctgtggttgagcaaaatcctgtgtataatacttatgcatcttgcattgcacttcagcttaatttttgtagaggccaccctgtgcagctttctcaatttcatccataacaaaacaaggggcattttacatactcttaggtaattgcttgggtacattgtattttgatatccttcaggtctactatttgaactcatcaattagtgagtaggatgaatagatatttacttaggcttgatgttgctacttccctaaagagattttctattggttctatcaactataaataatttattccttcatattctgccagtgtctctttcagtgtgatacgtgaattcagtatgcatatgctctattaacctaggtgctactttcattatgtcatgataaattgagttatgcccatttcagatatatgatctctacttttatttagctcataaaggtagattgtttctcctttggcagttcaaaccggtatgctccgtttgtatcaagtaaaacagttacggagttgctagaaatatggcgccatatactacagtcgattttttttcagccacttacacagtagttacacctcatttacaccccacttacatatgtaattagtatataattttcgaatttacatatgtaattttagtacttacatatgtaattttgagacttacattgtaaatacactaaaattacatatgtaatttagggacttac

SEQ ID NO: 42273 - DNA, 716 bp, Oryza sativa
attgtaatattttgatttgacgtacagtccaaacatgaccagctacgtaaattatttcagataaacaccaaatggttcagttcattttggtgagtgaatggtgatagactgatgcatctacaaatatgggtagtccatttcggacgctacacttcgtctcgcataatcatcttgaccagaaaatggtcggagcgaaaaaaaaaagagcgagaacgttatttgcaatgctaaatatgggataataacacgataattttctgaatgtatcaatcttctatttagtagttatcttcctgtaaatcggcatgcagcaggtagcgtgatctcttcttgcaacaatcatctggaattcttgatgctaccatccagtggaggaaacaaggcgtggtcgcagaaagaagtttctgagttgctctgacaatggaggagcagctttcagtatacatggccacggaatgacaaaatgccactggctcttcaagttacttcaaaaattgcagagaatctgacactgttctgttgtgccaagagaaagaaaggatggtgatggagacatagcttaccagaaagctttgcttccaaatactaaatcagagtggaagtgcagcaccgattcagctccagtgtttacttcagtgaaccaggtgtacacaaacattgcagcagagggaaatggttatgcactgttgtcaggtcgaagtgtcgaaccagcaacc

SEQ ID NO: 42274 - DNA, 712 bp, Oryza sativa
tcctgcagccctcagtccccttttgtcagaactctcagaaacaatgttccagcgttcactggatttgcagctgctacctgactagaagtctagaacctgaagatcatactacctccatatggatctagaggaggataactaagcaatatatattctgaaaaatgtcaatgttgctgtcctgtgctttagcaatacaaatttactatgttctcagtttctttcggtgctatatatatatatatatatatatatatatatatatatatatatatatttgcgcggtttcggtgctatatatttgacagtatccagttattgatcaagatgttttgacacaatgaagcatataatagcgtgtgaaatgaactgctcttcatctgttttgttgatgaactgaaccacctaaattttgtctagaacttttatatgacaatggtcatgtttggtttgcatgccaatttttaaagggagtctctgcaagctgctactaccctactcccttcccacaaaaaaaaaaaactcatcgctacaaatctggttgagtagttttttttctaggttgaagggagtactactctatatgctgcagcctctcaaccaatgatagagcagatgatgaaggcacggtcatctttgtcctcagctgccgctgttacctttttataataaaagatacaatcatattgagaatactctcgtctcccggtatata

SEQ ID NO: 42275 - DNA, 3189 bp, Oryza sativa
attaaaagtattgtcacaattttcaagcaattgcagccctacattaaaaattcaaatataaaaggtaaatttaatcaagtaaaagaagataaagtctattcaacataagttatttttatgtgtagaaatacactggatcatctcatctactctatgacaaaaccataaacccatgttttggcatactagcttgtccgttgtcccttcagcgtaacaattattgatgtcgcgccttacatggtacactcttaatccatcacacacagaaaaaaaaaacaactctattgtcgtcataaaactacatccttttcaatggtaggttggaattctacgtaataataatttatgtgtaaaaattttaacattgttgttatttttataaaatgcaaaaaaagctagtaagttattaaatgaacctttataaaattgaacttactggaagttttatctttgaaattttattaaaaaagattcaaaactaaacataatcagtaatgtcaattctcttttttaaggtcaatgatttcttgtcctcaagtccaaggacacattgaaaattatgtaggtgctaccgtaaagcataatcagtaaggtcaaaactaaacataatcagtaaggtcaattctctttagtgaaaatcgatgttgatggtgcatttatcaagagggtctacagtgagcattggttatgatcatgaggacagattgtgcaatttcaaggttgccttcatcatcaggttggtacgtcacatttatcaaagtcatcgtcagctaaagctcatgctttacattaaattgttacgacttatgctgaccaaattgaattggtaactcataagaattttgattctaatcgatctcaaatagaagaggatagatattttgtatagttcttcagtgatcctcgagaattaagtagaagctaaagctgtatcaaacaaagcactaggaatttgtgctttgcttcctctttacccaagctaatgtaacgtgaataggcccatctcgttggaattctgcgtgaaacccattccagcaatccagtccacaaaggcttccccttgcgagtcgtcgcggtggcgagcaggtggcggtggcgccatggatggccagcaggaggagcagcacgcggggcggcggcagctgaagcccgggaaagacaaaaatatccctccacaaatatttttttttaacaaaaatatccctccacaattctacaaccaaagtgtgatggtagtagaaatagatctgaaccctatgatcaaatgagatcaacggttcagattattttctacttcaaaaatttagtttcgtttgttcaaaagagagattttctttcaatcatatagaaaacgcctcacctatagaaactattacatacttaacatctcaggagagagaatgtgtttgttcatcataagaatggatgaggacattagcatgaattttctcgcgtttgatgttttttttttctttcgcgtgggaacaaataaagaaacgggggaaacactagtggtggtgtggtggtagagtcgtgggtgcatgactctatccaccagggttcaaatcctggtgcccatgaatattacacatatgcaggtgggttttcaacaagagaagcgtatgaatgtgccactggtttccgtctcttagagcatgtgttaggtgacacattcgcggaggttgacgcattcgcaaagaacaagagaagcgcatgaatatgccacttgtttccggctcttagagcatgtgttaggtgacgcattcacggaggtgtgagtgtagtggtcatttcgcggaggtgtctcttagggcatgtgttaatgcgtcaacctccgctcttagagcatgtgttaggtgacgcattcgtggaggtgcaggggcgtcccggttaaatcgggtccccgtgcaaaatattaaaatggggccctagtagtctagtaattttttatagtaaaatttaaaaaggacgtagcgatcagccgatcatcagtgatgaagtagaagtggaggccggaggggattggggagaggagacaaagcggctgcggcgccgggacttcggcgatacgcgacgacgcggatgcctggacaggagtacgatgaaagatggatcggttcaccttctgtagcgttttgggccttgttttactactatttggactaaaaattaacaaaattaaaacctctaatattattatatatataggacatacttaattaaaatttaggggccctgttcggtcgaacagcccgcacgggtctaaggacgcccctgggaggtgtgagtgtagtggtcatttcgcggaggtgtctcttagagcatgtgttagggaacgcattcgcagaggtgtgagtgtggtggtcatttcgcagaggtgtgagtgtagtggtcatgtgggggttttcaacaagagaagcgtatgaatgtgccactggtttccgtctcttagagcatgtgttaggtgacgcattcgcggaggtgcgagtgtagtggtgtgtgtgcgtatgtcgtgtaaatgtaatctcaaaaataaaaaagaaacaaagaaacgaaaaacgctgtcacgattcatctgtccgatagaggaaattatgtgattttccagggacctgtccgcaaatatgtcttctcgtctttcccccttctcctgtagcggcgatcaccgcctcaccggcgaacgggaagatgacgcggggggtaccctggccttcgccgtggcagaagctagcggcggcggcggcggcggtggccgccgcaaccgtcgagatgtgggcgccgccgtcaccgggctttccgctctcgtgcgctcaatctccggtgctgcacgtgagctgttcgatgtaatggccgtgtgatgcgccgacaagcaccgtcgccggaggtcacctcctcctcctctttctgatggaatattcgccatcgcgcctgtctagaagaaggtatatctcgatttctttgacttaagcaaacccggtaaaagaaaatccattggatggagaaaatcaagtaaaagggtcaacttgcaagttgcaaacaacacatccttcagcttactgattattcaagctcatttctttcctaacttagttgcttcagtcggtgtatcaatatgtccacattttgactgtttcttcatgccggaagtactcctatgctgcataagagacttcaccatttctttagtga

SEQ ID NO: 42276 - DNA, 700 bp, Oryza sativa
gtacaatgtatccaaatatgttgtactggaaaatatttttattctcctagtttttatattttgtgacggatgtaatacgtattataacaatatgtggctatgaaatttagaaaatgagcgtaaaagctggctgtttacctgacgagacgtgagcgtcatcaccgtgcaggtcgtgcacgttctccagtaaactctcctagcctgaaggccctgagcgaacgttgcctgcacgcaacctctcccattggtttctcctgctttttccctttttcttttacgtaccattttggttggctacaaaacaaacaatgagggggtgtagtgtacccactggtatgtgctccagtgcacggcgtgatgcaacagcgtttgtgctacaccgcctcacgttgagaaatcaacacgagtataaattgatatataacgtacttgattttttttaccaacatctgatcattcgttttatttaaaacttttatgtaaataaaaaatatttatatcattcttaaaacatctaatgataaattaagtcctaataaaaaataaataataattacataaaatttttaataaagataaatagttaaacatatgttaaaaagtcaatagggagggagcactactactactccacaaccaacacgagcagtagtagtattaactaatgtaaatttaagtccttttttttttgtgaaacaca

SEQ ID NO: 42277 - DNA, 968 bp, Oryza sativa
acaccaaggaccacaagtgggcttgggtcaggtccatcaccaatcagcccgactttatccgggccggtccgacgagctagcccaacagcccaccgtatctacttaatctttttggtttgggttgaaccagtcaataattagcactcaatatgtatactatcttatatattattccttccgataaaaaaaattccaatctatggttaaaatgggatataatttaatacaacgaatttaaatgggagtctgtccagattcattgtactacccctatttcaaaatataacaagttttagctatgaatctagacacagttgtccagattcatagcttaaaatgcttactttggattttatagtagtacggagggagtaattttatgcttactttgaaggctacctaatttggctttgcaagaagaaaaatgctttcaagtttgaaagaatgaaagatgattggtgtttaggccataaatgataaatcaatgcgtaagaacaaacccagttgaaacatgtagagcgaattctgaaagttctgttttagtgatgattctagggggaaatcatgaagatacaatttgtggatcatatatgtataagagaagaaaaccctgaacccaaagatagtctgcattgttaaaaaaaaaaattgaacatgactacataactgaaagtttcagttgcagatcagcaagtctgtcaccacatggtgcatgacgccattgacagaaactaaaatgcgaacctttagtctgaacttggaacaaaacaattctctctacactccactgaaaaagaaaactctggagaaatgtaatctcaaagagatagtcacaggtagtagaagtgattatgcagaaacaaatccacacttcctccttgaaacaaaaagaaaaacctagtatttccaatgggtctgcaatgtgcatgcagatcaacacgttttttcattgactaacacaccatcat

SEQ ID NO: 42278 - DNA, 517 bp, Oryza sativa
gccctccctctctctcccgcctcgcgtccgcggtaggaggagccgtcgtctccccttctcccgcgtcggccatcgccggccgccgccaccccaacatcggtcgccctcccatccacctcgcgcccgtgctaggaggagccatcgtctcaccttctcccgcgtcggccgccccgccgccggccgccctccctctctctcgcctcgcgcccgcgggttcggcctgacctaaggagtaacctagtagagagaggaggagagatgggaaaaaggagtgatgacgtggacacactgacatgtgggcctcatgctgactcagcagccacgtaggataaaaccgggatcaaaaccccgagggaactagtgtgaccggttttgtatagttaagggatctcgcatattcggttttgcggttcgaggacgttttttatcccgatgacaagttgagggaccttcggtgtactttttccttcccctgaaacaatggaaaagatggtagatagcccatctggatgggccg

SEQ ID NO: 42279 - DNA, 673 bp, Oryza sativa
caacgcgttgtatcttatcaagttgttacactccgcatggtgcgtaatgatatatagtggtaagatgggagatgatataaaccccatagaacgttagtacttggatgggagatgatataaaccccatcaagatagtaacatgtggtggagcagagtgtaatgtgctgaaataagagaagtgtgttgtactctaaatattacaaatacgcgacttgtaatatatagagtgaatatgggtacagtgatacaagcctgcgcagtgctcaactaaatcgtgattcacgcctgtctcttggattagaggctacgggagcctattgcggttctttctcactatacaagtgattagttgtttttcttataaattaaatatggacttctcttacaagaatcatttttttaaaaaggaattataattgagaattgatgacttgatatgatttatgaaattgcatgtcatatatccttgctattaatattgcttgctgagtacttgtactcacccttgctattaaccctccttgtttagatgcaaacatttatgggcaagccagtgagttaagtggtgggttggaggatcagtactatgccccttggtgtgctgaaaatcaaggggatgttgtttatgactatgacatgtattatggaggatgggatgagtagatgtatgcat

SEQ ID NO: 42280 - DNA, 1558 bp, Oryza sativa
gagtagtagcactagcactctactagcaggctagcagcacagttcatgagctgtgtgagcagtggcgttcgttcagagcatcaaaggagaggcagctttcctacgcctgcaggctgcggctgctgcaatgcagcctgatgcctgtggccgccgtacgtgtgcaccggcggcgacagggaatccccgaatgtagagtcaaatccctcatcggcgccattgccattgcttcttggttggtttacagtattcgcagggccatgctctcgcgtgcctgtgagcatgtgaaattaacaaggatttgttgctcgcgcgcgtgcttgcaggggtgtggccggaggccggcagcttcagcgacgacgggatgggacccgcgccggtacggtggcggggaatctgccaggaccaggcctctgacgacgcccaggttccttgcaacaggtctttctcagcctagtctttttagcttatgcttatactcccatcttatatccaacgtttaaccattcatcttatttaaaaaataaaaaataataagtcacacataaaatattattcacgttttattatctaataaaaataaagatattaattaaaaaaataaataagacggaggggtttctatgtcaaacgttagacatagaaacccatgactgcacttgaaattggacggggggagtacttatcagtcaaaaatttgaattttcaactttaaatttgaagtttatttgaggttttttttcatcgtagtttattttatcctttgcttttagatcgctaagaacacgtatataaaatttttattcatactttttttcatttgcaaatatatcatttcgctttttacaaatgtgtctctccctctctcctttttaccgtctcgtcgttcgccctatacaaaatcagttgctgctaaaatttaaattttcagtttaatttcagtattttttttgaatgtagttttttgaatgttgatttttaagtcaataataaagttttatttgtaagtactaaattatgtcttctctctcggtctcggacgctgtgctgtgtccttaacctgcgtgccttcttcgtctgatcggctcacgagggggaggtttatcctgcgtgatgggggagggtttgtcgttgctgatcgtgttgtttatactgcgtgccttgtttactgcttttgtttaatccctaagcaataggcgtgcatcttgacttgtcgcattgaagagtgtaaactagagttttcacaactactgcacttttgtttagaacgagggatggctacaaatgcctacagagcagtcagacctggactttggttccagagacgtgtctggtcttgctaacttggatttgttcttcagagagatgggctttgtctggacttgattagtttaacttggtgcttagtgctatctggataactctccttggaagctatgccatatataatgccaagcttacatgactgagagctcttttttttttctttttttaactaagtagtagtgtaaaacaactaatcgagccaaaaactagttctaattgagaaaagaaaaggaga

SEQ ID NO: 42281 - DNA, 711 bp, Oryza sativa
gaaaatgcaacaaggacctagagggaaaggttcgtcgcaccttggaccatctcctctcttgtggttataaccaggatagtcttctatatggaaatcaactttctcaaccataataagtgaagattcagaggctagtttctcgatctcccagttttcatacacctttcctctcttgtgactaacatggatttcaccggaaggccgaagcaggcatcttgcattgcggaagaatcctctgaccagatccttgtgcaagctaacagtcagagaaaatggttaataaaaagttaaccaataaacaggatatccaaaagcagcagcctgtttaagcattacggcattctaaacaggttcctgccttcaccaaatgcaacaagaaggccatcagctaaaaaaataatgaccatcatctatgaaaaggttattttgctggccagagcctcccacacatcataactacaacctaagaggctaagatccattccagtgtttttatggtttatgctattagcagtgagcaaaactgactagaattaaacttggaaaagagaactgcttcctagagattatatctaaagccatttgcatccgtgaatacttcttctcaacaaaatcaacataacagcataactccttgtactgccgtacaagacatatacactttctctataacacaaattgtgaaacgactgattcatatggcaaacaaca

SEQ ID NO: 42282 - DNA, 686 bp, Oryza sativa
taacaggatgttcttatctgacagaaaccagcctgcttgtggtagtaaaagagtactgctagtctgctacacatacttttttttttacaaaaaaaaaagagtatttacaaacaaagctttcaaccgtttgatttacaaacaaaacacatactaccagtaaccaccactaggagactaggagcattgcttgtggtaatttggctttcttgatctatgattgtaggtaccctcaaagaggtgacaaaatgtgagacactcatttttaccccctgttcatagatgtcttaactgttttgatttcggagaatgtgactaaaatagctatatataatagtgaattagtagctttaacaatgtacaatagcttagcttagctagatgcttcaatattttggtggctactcctagcattccataggcactgccttttgcaaacaggaaatgactgaatgtgaaaactgaagtaaaaaagacgcattatgtctgaagcaacatttttttaactgtttcaacctttcggtgacagaatgttcttaaccgacaatcaattctaattaccttttgacagtgcatccagatgcattctccgattggatctatccgcgtaagctcgatgcaactgtgaaaagaaattagaaaaaaaaagttgttgaagtaacagacggcatatgatcagatcttggcgg

SEQ ID NO: 42283 - DNA, 1339 bp, Oryza sativa
gcaatgtgctatgttgttgctgctgctgcttcttgattgtaatttttcagttttgtaaaaaccatccgcaaggaaatttcgaagtgtaatttggttcaaattaacagatagaaaaatagttaaaagtgcagcaattgattgaaaccacaatgcagagaagatggtgaaataattggatccaccaagcaggggtgagaaaaaaactttttttttcaagaattgtgctttggattataaagttgtaactttgatgttgaaatggtaatcactcaaaccccacagagatttaccagccgtagtgatggtgctaggtcgagatcgaccgatcaatttaactaatgacaaaagtaaaggattttgacaaatgggtattaaactgaacaaatgttatcttaatatcttattcctcattgtcccttccactcaaagacatgtacatgttcttgctgaaaatttttcagttttttttatcagctagcatctaatctttctaggttactttacagcggttagccaactattcacatgggtaagttgctaatttttttttgacatgagtatggcactaagcttcacctccctttactgtcatgtgcaacataaggttcctctcttattcccctctgccttgctgctttaatttaaccaggaagcctctctctgatgcccatgatgagttcacagcaagtaattaggactgattacctgttcttgtatcatcctagtgttctttttcagaaacttagccatgtgacatgagcatgctttctgaacctgaacacacctattaggaagctgcagaaagaataatttcggatcagaggacggattggtggtgaacattaactgaaaaagcacttgaaattttgaattaaagaagcgcctaaacattaactgaaatcttgtacatgtgaaatgagttagttttgtcaaagtaagtaacctaaattgtcacatactagcataatcatatattttatggtggaattctgagcaagagaactaaatgaattttgaagaagagaaaatacttatgctgaattggcagtaaggtaagtatgtttattttcttgttggtgtagtgctaatggggcagcactacaattcaacttgcacttttttacagttgtacttacctcactgtcactgtaaagtactagtagttaatcttcagtaccaccgtcttgcaaagataagagccgtaaagcaacactgaaacattcagaaggtttacacgcagaaaagaagcatgcatgcatgcatgcaaaaaagattaaaagagcagtaacagccactgtcaacccctggagcataaaacacagcagcacagggctgcagg

SEQ ID NO: 42284 - DNA, 1534 bp, Oryza sativa
gaccaatggacatggactagcgttgcggaagaggcgacgaaacggacacacatggcggtggcgccgccggaggtagggcccgccgcggcggcggcggtcgccggcgggaagaaggaggtgcgcgcattggatggagcatcggcgatcggtgaagaagaggaggtggaggtggaggtggaggaagaggaagaagcggaggaagagagagaggatgaagaggagggggaggaggatgggggcgatgaagaagaggaggaggaggagggggtgaagtggctgaagcattactcctcgatgcaaagcatcttggtcgtcggcgacggggatttctccttctcgcgggcgctcgccgtcgcattctgctccggcgagaacctcgtctccacgtctcttgattcctatggtatcttcgattgcttcttctctcaactctagcctctcacttccccttactcaattgattcggattttgttgcggatgccgccatttttccgcgcttagtagaatagtacactactatgagtgcgatatgcctttcttgccttgtatgccttgagattttggcctgataaaaaaaaaagaaggcgaactttactccatcaagaacttagtttaccttaaattggtgcgtgtgcaaacgtaggaataacaattttagcaggctagataatactagggtatacctgtatgaaatttatgtgtcgacatccacaaacatggggttgtcctaaaccttttgccccaaaacctaggttccttgagaagaacccgggttttccgttaaacttggggttctatgaaatgtattcattctgttaattatttgtgggataccttcatgtgttcttggttttggaaataagctttgctagttggtacattttactgaggataattataaagaaaaatgttctctactgttagagttgcatgttattgaaggaacactcatattgagcacactatttctatcttcaaggtattctgctctctgttgttgttggaacacaaacactgtaaaattgtgacttacagccgtatggttcaaaagttctaggtcggattatcatttcatattggtaatggcgtccatttattttattttttttgacgcaagcgtccatttatctgtttctctgatcagtttttaggcgtaacctctatgttaccttcatatatcatttttgcgcctgccagcacgatattattatgttgtgtttaatcatcatctttgtttcaagtttgctttaaggtacagacatcaaagcaatcgctaaggggctaaatggaaacatatgtgaaccagttaaaacattgttattcaacagagaaaatatatcaggaataggatgtttcataattcttttttttttaaaaaaaatgtatgcattgagctgccactgcttacccgcttacattacatgccaaaagggactttattgtttgatttttgtgctcatttgtatttcatgtgagtaccctgttgtccagaggctttgagggggaagtatgccaatgcagagtcaaatataa

SEQ ID NO: 42285 - DNA, 2584 bp, Oryza sativa
gtccatgcacatttcagctcgatctacacaaaagttcaaattgaaccaacaaaagtaaaaaactaaaaaagataccgaagcaaaatttcagtaacaacagattattttttttagggtttgttggaaccatgccaccctaattttacaaaatttgagatatgtcacccgtatctcagtgacatgtaggacccacatgagtcaatgacatgtcggtcagggtggcatatcacaaatttgaaatttgtgtggtatggttcaaattttcccttttttttagagtaaaatgcatggagggtcattaaacttgtttaagtgtgtcatataggtcactctacttttaaaatgcacatttgggtcactaatgtgagataagtgagtcacttacccatctaactattcacgcgagcatactttgtacacatggcatgccatgtaggattgaaaaaattgcatttgaaaatatgcaggaaaccccctatgcattgtgattaaatcgtctcgtatcaattccctaaataaattgactagtaaacagatcctgaaatcagtgcatgacacgttcgtaggaggctgccaatattcttattcccgctgaatgcatatgtgatatcaattttttaatggatgtgttagaccattggaaattaacagatactagaccattgtatggcataagaattcaccaatttgttggcatgcatgttttgccatagtggcttctacttttacttttaatttcagagacactacaggctttcataaatcaacatttcttaatgatgttccacatctcaaaatcacatagaaaacgatcttacattaactgataacatccatgagcagtcaacactaagttccactaaccaaaagccataaatttcaaaaggggaataaatccaattgttgaattgtgcaccttttattttgcattttgcaacattgaaaaaacaagatagaaagcacccatataacttctatttttttttcttctggctaggtggtctagatgatctggccgttgttgatcttgtgttgcttctcttcatccttgctctgcccacgtgtgtacatgttgtcgctcttggctgtggtagtgtatttctattagcttcaatgaagactgaatccggtaaagggcctagctggttaatggaggattgagttgatgttgcctaacaagcaaattagtatgaaacatgagtaggtagcagatagtgacagtgaaaaatgttaaaccatgcatgcaactaacctgttctaataaagtagtcaacactgaagtgctatgttggccctcttgtactaattcttctggaacaattggaaacgtttgacataaaagattaagaaatgcttgccgaaggtgacagtacataaaggatatagttaactatacctcattcatgtaaacatctttgtcatcttgcattacttgtacactcctcttcctttttggtctcatctttttagttgtaccaagtaattcacaattattcctattgtgtccagccccatcacaataactacaatgaataaccacgccatgcttggacaattttgtaccaccctccaattcaatggattgcttcctcctagttttctttggtctccctactttcttttcatatttaggaggttggacatttacaccattcattttttcccatttagattgatcccttgaaggcactatgttatatttgtatgcagcacgaaatgactctaatgagtagcatggagataccatgtcctcagttgtatcctttcattcctaaagcatgatatggcatgactacatggtattcctgtgagttgccagcgtctgcaatcacaacacttcacattgatataactatgaactggtgatctctgtcggtgacttggaaaatacccttcccagcaggcagtgtgtagcatgtattggctaactcggcagtcttctctagtttctgttttatctttgggcatatatttccactccatttctcctcaacctccttttgcttcatgtacactctagtcatgatttaggtctttattttctcaatcatgctcaatattggcagttcccttgcatgaagaatgtacctacagattgaaagaggaaatgttaatactattgataatgctaattggaaagcacacatgtacaattaggaaaaatatatctcacttattgaaaacttcacaactattattcaacaatatatcacacttcggaaaatcactaaagaatgctctacaccacgtatttggtgggattttgaaacaacccacagtttagttaaatcataaatctgtagttatgcacataattatagttttaaaaggaaccaagcagtgcacatgtaggcactcaacttagtttcccatgcattaaatcagaatcccatatatattggttagcaaccccaaagcatttcaatacatgtctagaagtacattcgattaaataattaaaaatgtagatggtctgaatacataagcatataagaggttcatactagctacaaattagctgtcacacccataaactgcaactttcatctgctaactcagagaggtatcaatgccatcaaggata

SEQ ID NO: 42286 - DNA, 701 bp, Oryza sativa
ttttccccatattaccccacccacattccctagtaaattaaacttaaaccaatctatcaccagtgtgtagttttccctagcaccttagttcagtttttaataggaaagaaggaggagcagcagcagcagataaaatggaggagtaaggaataggagcacttacctaggggatggttgcacggtgatgtcgagctctatggggcactggtcagggcatctgggcttagagctccatgcgtgactccattctagccatgggagtccacttctttgagctgtgggttggagagctcaaggaggaggattaggagggcaggtcttgttggtagcctgggcattgaggttgccgagagcaacatggtggcagcagcaacagtactagagtggggatttgagggagaagatagccactgctagcagcaaatggaggaaggaagaaggggattagctagctgatgcttttacctgtacaagtcataagaggggagagaaggggagaggtctgtacagatgagaacagaggagaaaaggaaaggtggactaattgctagatgcacattagtaggctacacagaacaccaacttgagcatagggacccaataatctgcagtccaagtatactttagataaattatctagcacatcgcaattggagtttcggtataataaaaaggttacaaatttgtaagcacatttgtaa

SEQ ID NO: 42287 - DNA, 584 bp, Oryza sativa
tttggtgtggactatttagtcatgtggattttttttcttatatcgaggaggtttttttatataaattatcatgttttatgttcgtgtttattgttattccaccactgatgtactaattgaccctcaagttcatgataagatgagtggtcgatagtgtagaatatatatgtttgtggattggtggattacattttatatagtgtgctagttgttcggtccaaatagatgtagaaaggggtcacaccaagagtaaggacatgtaatttggtctgtaattttttcagaccttagtggtagtagaaggaagagaatatacaaaatttgcaccaaattccaaccaaaatgaaaaaaacaaggagttttaacttcaaatgaaatttgatcaaatttttggttgtcaaccagggatcagaaatcaaaatttgatcatatcttgtccttttgccgaaatttcggcgaagaggagtgttagcacgaattcttgaacaatcctagcacagctcaggatatatgtaaaaaacaagtgatctcccatgcaaatcagagagaagtgatcgtgcatatgaaccaacacaaactttttc

SEQ ID NO: 42288 - DNA, 1582 bp, Oryza sativa
tcatcttctcttccattgttttaccttttatcttttccaatgcagtataaatgaagggcatcaaagtggtttgagttgttttcttaattattgtgcagaagtctaaaaccatttatgcagcacagatagctattaactgtgtaatataatatctaacatcatggctattcgtattgcaataataatgaacggtaataaggatgaacacaaaatcaagtgactgcaacaaaagcaacagaggaaaaaaactgagagaggtaatacttgatcatatgcaaatcatcctcttttcctttgaatccagcatgaggaaaattgaagataattcgatcaaaccgtctcagcttcaggttggtgtgatccttcatcctttttgcatcgatgccatgcaaaacagtggcccccatccttttcagctccattatatttgattctgctttgctgtatttgcccctcaggtcctctgttcacaagtaatgcacaaatattagcatattgcagagaaaatggataaacacagctaacaattatctataatctatcaattgcccttctttctctaatttagaaggagttccactatcaacacaatgtaattaacttgattcgttagaagagtttctattgagtctctgcacctatccttttcctttggattctaattcaagaaccgcttgttttcttaaaacacggatttggctcaggattgccccttttaatccagggtttctctgaatttggaagttactacttaccaacagtattataggtttgaggttgtaagatatacaggggaagttcgatgcatgtggaggtctcaagtaagaattagaaatgaaacaaataggaaacatggagactattgagagttaaaaaaaaatctatagaaaccgacaaacagccatcgttacatggagacatggagttaaatcagggtaactttgtgagttagttttttattgttgtgtgttaaagctctaactgtgaattctgtcctttctcttctaaggaaatccttttcagatcctaaattctttactggctgtactgactcttgagtcaaccatatcataacaaatttgctaaatattgtaagaacatattgccacgttgagcttcaaaaagcaaactataagaaagcaaagaggcgaggccatgccaaactgatgatcatcaaaccatctcgcccaaaatcattgtcaaaagacaacactgggtacccaacctagtctaggccaattgaactgtactaccaacaaggtccataaataggttgagcttagcaaattagcaaatttacattgttcaggccgacaggtcctatcaatgcaaaatgcagaaaaaaatgctaaaggtggcagtaatgcttactcagcatgcatgttccttccatgacatactacatgttagtagtgagaaacaatatgccacaaatagtctctccgtatcaaaataaatccttcacaggatttagctatagcattcccaatcccagcattcatgtattggaacaattatttattttcaatatatgcaggagaatagtgttccataaagagatcacatataaatcattaacgat

SEQ ID NO: 42289 - DNA, 1055 bp, Oryza sativa
ttttcttcctagcttttcatgctcatcctctcactatcaaccagtatccctcagccttattattcttttctagtaggagtactaatctttggcatgaggtagccgtgcccgtttatagcagtttaccgtggacatgcttcacaagctagtaaaccgtatatttttcaaagaagttttatataaaaatttcttagaatacttctccaaatctatttctattttttttaaaaaaaatatttatccatttatatccctaaataattaccataaaatcagaataatctaccatccatcctccacaatctattgcgaaccgggagctagtagcagagctagaagtcatgagctcatgatgcaacggggcataccctgctgggtgttgagtactccagtacagtattcgccgtgccgtcaaatttgtaggccctatacaaggctctaagcgagacctaaatcaagtaccaaatatagttaaaataatatatatactgcagagtaaatgcgatatattaagaatagtatattttttaactcttgttttgcataatcagaaactgccaagctagaaacggagaatgtttgttgtttttgttggcttgctgcatagtgcattgcttgttttatgccagcaagcaatattttattttatgccagcaagcaatattttatgcgacagcaagaatgtcaagtagtagtagaaaccagtgtttcagtagaaccagccctcagattgggcttacaagtaaagccaagataaccagggttttttcagtcccaaacggcacctgcattacaaaaaggaacttggctgttgtggtcagtcagagttttgagacacaaaacgatcctacctgtacattttcgacatcatccatctaacacagcacctcttgaaatgaaatgccaagttcttctatcctagagaaatgctgatccttttagcacttagcaggtcaaattctcaaaaagatacacaccaagtcaccaaccaactatcattgatcaccaccgtgtagcgtgcaacgtaatcatagtttgcagccacttctccttct

SEQ ID NO: 42290 - DNA, 535 bp, Oryza sativa
ctggttacagatttcctggttgtgccgtacaaatcattgtgtgcaacgttcctgtatggaaatttagttttgtctcagtatgtttttttttttctctcgcaaacatgtctcggcatgaattatgccggacacagatgctctggaatgtaataactcaatatgttaataacatgtatgcaactcacagttcatccaaggtggtgacaagacgagaaaggattccaatggcacggtgccagtcagcatattgtcattcaaatctctggacataaatataaaacatatcgttcagtttatttgagaacaattacacatcaaagctgtatacttcaaggtttttaatacagaattgtaactttataagctttcgttcgcttcttagttcttataccagagtctcctctagtagcatttctatcaacatttctgcaactttataatctctttaaagttttattagtttttcattcaaacgaatattatttcaagttaaaaacatcttgcaagttcttttttttttttttgaggaggagat

SEQ ID NO: 42291 - DNA, 724 bp, Oryza sativa
tcctgcacccctttattatctctttagatttgtccgatcgatcagtcacactgaaccatgtttaatctctctcttatcagacatacattacagttctttctcttgctgcattttccatcaggtattgcatatgaccctggtcaagcagatggagatgatggagaccttggaagctatgcaacatcactaccaatcttccagtgtcagggtgagtcaatcacaaaccttcattttcatttatgcatgttaatagaacttgccttgtgatattatcctggctacttttgcagaggagattgtgctgttcataagtaaaagactgctcttgtctggctggccttgagcgaccatgaagactgaagctgtagcctgaaaaccttctgcaagtgccatttttgactcggagatcttcagccctgtgcagaggaaagatcatcgctcgctcagctctgtcgctggcttgctgcatcgcagcttgtgaatccgttttggtagctgttaatctcaacaataatcccttttttgcctccctgaacattaccaatagcaagatcagtgatgcatctgtcagctgctgtagctctctgctctgaattggaggattgaagggagaatctgttgttacattgtctgaatttttgtgatccatatgctgaaaggacgtttcatggcggctgtgcttcttcctttgctaatctccaggcaagttcttgtttttctgcaa

SEQ ID NO: 42292 - DNA, 2533 bp, Oryza sativa
  unsure (1)..(2533): unsure at all n locations
atgcagcgtttgttccttcttccttcttggcggcggcgtcctagctctgcaccgccgttaagcaacagccgttccggattccatggacagatcagatcaaattcgttattatctccatctcaagaaaaaaaaatcttgagagctatatatatatcgcatcgctcttgcagtacatttttccatccgtttgcaatggcgagaatactcctagcgttcgccggcgacgccgcgtcggcggcgatggcgacggcgaccggcctcgggcggccgtggttcatggcgttgtgcatggtggtggtttgctcgttgaccgtctcgttcgccgtcttcctctgcggccacagctccggcgtccacgacggcgatctcctcaggaagaagaagcctatgaaaccaccgccgccttcatccaagaagaagaaggtgtccacgtcgatgtccggcacggtggtcgacacgacgggcatgtatacggcggcgtacggcgtcgccgtcgtcggtggacacggtggccatggcggcggcgggtgcggtggcggcggcggcggcggtggtggaggcggttgctgcggcggcggcggtggctgtggtggtggtggtggtggcggcggcggcggcggctgttagacttgccggatcttgcgatggctttgcatggacagtgatggctgcttggtcattgtaaggtagtcttgtgatctctcctgtgtttggcctgatgttaatcttaggaaatttttgttacaaatatttgtgtcagtttgtagagattttgatcaatgctaatggattttgacatcttgtcatctgttcatgaggtcaacaaaaaacagaatccttgtgtaaactaggggcttaggggtttgtagttctgaatgtgttcatgaggtcaacaaaaaacagaatgcttgtgtannnncnncccggatttgtagttctgaatgtgttcgctagattgtgacttttaagtgctttacagtttgtcgtcaggatatttcaaaatgtgacaaatcagactttatcgctcgttgaaatactcacaaatattctcgcaaaaaaaaaagagaatatactacaatcataagataatttaatagttaggtactagatagactatcattgtagtatgcacttgcagtcaacagtaaacagctttagtcaattcgatcgcccatttgcccacaccatttgtttccctaatatgtcaaactcaatgccactacgaatcaattgtactccagtgccagattcataatcagtgcacaaagcagagacaaaaagccttcactggatcacctctgccttaaatatcgcctcaatactttgaacgacgacgagcatgttgaacatgcaggcactgcacatggcaagcaggattcagtaggtgaaatttcgacgacgacgatgattaattttctaatttcgaagcgaactctgcttcatttaaaaaaacgctgcacatggcggtcagtgaaggtaattcagaaggtgaaatttcgtctgcagtgttgttctctgaattgtagaataattttctccttccaaagctttgctccagttcattcaggattatcgtactttgcaagtgactgttctttactcaatgtccaaatcacttttctaagaccacgtttcaggctattgctgcaaatgcagaatgaacattttgggtataaagctgtccaaaaattcatcctaaaatttgcacacagttttgccacatcctctgaatctgtagatgtaaagtcgtgtgcagcaaaatagcaaattgaatggcatactctgaatctgacgagtgagtgaaagctgcagtagtcaagcacgcagacttgcagtctaaccagtttcagcctttcaggttttgctgatgccaataaaacacctacctgttccttgcattctgacaaaattttctctgaactgatcaacaacgaaatccttgaactccacttgatctgtctagtactccctccgtttcaaaatgtttgacaccgctgattttttatcacatgttttaccgttcgtcttattcaaaaacttttgtgaaatatgtaaaattatatacctacataaaaatatatttaacaatgaatcaaatgatatgaaaagaattaataaggttaaatatatgctaaaaagtcaacggcgtcaaacatttcgaaacgggagtattagtatttctctcgttccttcgtaacttaatcgttaagaaatcagcagcaggttcagcactcggtcgccatcactccatcagaaaaatgatcacgattgaatatgttaaaccactactactaagcaagccaatcggcgatttgattgcttagctcaaagtacgctcaactaaccgggaaacctacaccgtattgacccggccaaaatctagccgtctatacatcaatttatcagaataaatttattcacatgattaattctcagaatattttgcttaattcttagagcgattcgtgcacaaattcgttgaagtgcaaagtcaaatgcagaatcacacatgcaatttggctttttttttttg

SEQ ID NO: 42293 - DNA, 4282 bp, Oryza sativa
aaagggggggctagagttttctttttctcacctttactatgtgaggcaattcaccattgattaagaaataaatcaatagctcataaaagttagttttttgggctacagtggaagctctacgtagagggaatttagcccaacaattaacatcacacaccatcctccaattaactagcattgtcaagttcatcactcacaaattacccaatcctaccatttcaggtgtctcgtgcctttgagaggttgtttgattgaaagccctaacttgccatgtcacaccttcttagtaatgcgtttggcttattgtcgcaattatgacttgtcacgctttcttagcgtcttcgctcacttgtcatagactcaaatcacttgtttaacttcccacaatgatgacttacaattcgtttgccacacgaagtatgtcaggccacacttgactggtgagttgtggcaatgttacatataaacacactgttgtattgaacttaatggaccggattttttttattgaaaaaactggatgggaataacagaagttgtaaaacctatccaaaacagggaaaggggtttgatgcaggccttttctcctctttcccacaacaatgcagatccatgtctccactgtgtgctgattaaaatgagacagttaagagaggttcagagacacaacttttcagttttcagtcactaacactatatccgcaaccatcctgctgaattttctgctaaacctcagtcaaatcaaaccgatcttttggctgatcactggcaataaataaacttgtggcagtaaatcaatcaatcaatcaaactctctaaagccagcttaattacctcctgtatctgtcagctacacgtccatggagcattcgagagtgggctgaaacctgaaagttttctgaaactttctgaaactctgaagagctcgtggtggctttgcaccgccatgaatagggttttgactgcttgcgacaccggggcatatggatccattaacaagatgacaaggtggtagtagaaaaagcagcagaggcaggcagaaaaggagaaatcagagagaaagctttcatgtaactgatgatcttatgcctgaatacggacctgaaaaggaggagaggtcaccaaccaaaagatgctactgtgcttcctgtccttccaacagtcgcaacgtggagtgtgaaatactgatgatccatgattgatgaatagccgcagtagctgctttgaaaattttcagatcctaattccggttcttgtaaaatcctatatttttttcccattcatttaaaaatctcagaactttttccaagtagtagtaggagtatgaagtttctgttccataagaagctcgcatatacaatactgtatttagagagtgaaagatccatttttcgcaagcagtcaaaacaatagtttaatttcattattcataccgatattgcttagacaactttttctagtcctacttgttagcttttacgatgctatttaattcgtccatatgagtaaatctttttcacagactatcggtactccttccgtcccataaaaaaccaatctcgaatctggacataatgtatgtctaaattcgtagtgctgggttgtgtcacatccgattctatattcattttttatgggacggagggagtaggcttttagcatggagaaaaataattaaaagtcttttgcaatggagaaaatctgtggaaactttgtgaaagaaagccctaaccaaagtatcgtgatggcactgtatcatcgttgaagctaagattggcgcgtagggatggtgaattttgtaatgaggagtggagagagagacgacagagagcactgtggccgtcacgggaacacgcggtaacacgacaaaactccggggacagaaaccacgttacaacgccagtccaaaactacttactcctccattaatttaatcaatccgagctcccataaacccaataaacccctgcaaaatccgggcccaatctacccctaaaccagggtggtcaatggcgtgagtcatcacgaacctgcatctctcagtctgtggtctctcttgttcgtcctcctcgtgacaaaggacagcatgcgcggccatggcggccggcgacgacggagcacgcgtgcgttttttttttttttttgacggcgagatgtggctgtggccagtggcggagccagcaatgtcatcaagcccaaacgattagaagtatttttcggtgatcgattaagttttataaacattaatggctatcgacagtgaagatagcagcgacgaagcccgagcgattgtacggccggcatggaggtggctccgcgcactggcttcggcgaccggccggccatgcatggtgctcgatcgctttgctctgcctgaggtcgatgcagtttgcttctatgctttttgccttttttttttgtttatgtactagctagctactcccttcgttctataaaatggatgtgacatattatattatgatgaatatgagtaaactcctgcccagatttattatactataaacccagattcattgtactagaacatatcacattcacattcagtcataggtttgttttttatgagacgacgggagtagctggttgtgttactcctatattggttggaaaacatgcatgtaacgatttatcgttgatttttttaaaaaaattatgagtgaaacttttatatgcttcctccgtaaaaaaacacaaattatgataaaaatagccttaaaatcaattttaaaattaaattttaaattagacaaaggcaaaggacagagttctgctgtagtttggtttggaacaatttagagctgtgcacattgctaggactccattacaatctagacagaggacgtgtttaatccgatcctgcttattaggtctgttttgttcccacgcaaaaacttttcatcctactttttatcctgttacatcgaatgtttggacacatgcatatagtattaaatatagacaaagaaaaactaattacacatattatgtgtaaattgcgagacgaatcttttaaacctaattgtttaatgatttgacaatatattgctacagtaaacatttgctaatgacggattaattatgcttaataaatttgtctcgcagtttacaggcggaatctataatttgttttgttattagtctatgtttaatacttaaaatgtgtatccgtatattcaatgtgacacgctaaaactttctacccctggaactaaacatggccttatattttggaatggatgtagtactccatcctttccatcataaaagggattttgggtagacgtgacatatcctagtataatggatctggacaaaccgtttgtccatattcattgtactaggatgtttcatctatccaaaatcgcttatattatgggatggagtgagcacctaactagttggctagttgcagtactgtagtaactacagttacctctttctaatcaactgtaaccctacagttgttttgttctaatcaactgcaaacagttggaagggaaaattgaccacattcatctgacagtggactgcttgagcactgggaatgagtaatcaatcaatttgctgctaagtctcctaaacaaattaacaatcctgacatttgggtggaatggcgtgccgtgagctgcctaggttttcatacttccacgcctcatgttccatcatcgtttcaaccaaaaagatgccatgttttttcagcccaaactacaatgtaggtgaggtgatgaactgcagaagtggtcctcctaccgacacatccgtatatctacaggtatatatatacagactatacacacaagttttccgtgtgcactccgtacataccaattaacaaatatcacaaaaattctaaaaaatgacacataattccaatagtattacacctacatgcctcaaaactgtcagattttttatttttcttgctacaactaaaatataatgaatttgaatatgagattttgcatatatgtgtaataccgttagtagtaaatgtccattttttatagaatttttggtgatatttattagttggagtgcacgaagtgtgtacaggaagcttgtgtgtataggatatgttaccggtatatacactgctccatactgtatgccacgtcccgtaagaatacatgacatgtgtatcatacataattaaagaagtgttctactactagtactatatatgatcagttatttagttgatcaccggccactcttcttcctgatctgcagagctgcagtctcagtctgtcctgccgtccat

SEQ ID NO: 42294 - DNA, 953 bp, Oryza sativa
gaatgtgcaggcatgtatcgtaggttgggtttgagaagcatataaggatagaatatcaccggagaaaatctaccacactttaaaagtacgacatattcacatttttttgttagtatttcttatataattttaacctattagttacctttataccatatcatattcaaataatttctataagcaattatttataatcatcttcatcatctaaataataggtatacttattttgtttagaaaacatgcctaccaaattaaatgtaaagtaagcaaggtgcttttttgtttttaatttggattactgatgttagcttggccgcccattatttattgacagatgtattgggtacaacatgaggctacactacattcatgggtttgtaatatgattgcatagtttgagagacaatccatctgtgagcatttcatttagagtgtgtgcgaggctccacatagcctattatgaatgcgattggatggttaaatataattgtgtaataattatttttggcatgcgatgtatcataaatacatggttgtataatatatgtatgaggaggacccgtaagatataatatgatataatagtaaagcaaattgttgatttgattaaaaaaaactaaagctgctcaagtgtatcttaaattaaatttgtagatcgtctaaaataattgtttatttatagcaccaagatcactcctattgtaaatccctagctcttgcacgttcacaactaaatcagtctccatgagaaatagatctaataatttatgatgataaattatggtgtacatgtatatcgtgtatttagaaaaaataatcaggaactggatgcatgcatcaatcgagcacaccgaggccatatataattatcctgcctaatgtcgatgataaatcaagcaatcaaataaataaacgttgcagctaccagatgtaattgtccacgtacatgc

SEQ ID NO: 42295 - DNA, 781 bp, Oryza sativa
agttattcataatttatattcccaagatttgacttaaacattgtcctaaacgacttccttcacgagtatggagggagtatgcgtttgtgttcggcactcacttttcccaacccctcctcctctttttcagcacgcacgtttttcaaacggctaaacggtgcgttttttattaaaaagttacatacgaaagtttcttaaaaaaatcaaattaatctatttttttaaaaaaattaactaatacttaattaatcacgcgctaatgaatcgctctgtttccgcgcatactattccggttgggaacgtggaccagcgaacacacccaacttgcgaacgaagatcgagaccggtctaccgttgtatttccggccgaaatcctcctagagagtttgtagtgcgcaaggagatgtatcatcatttcttgggtggtgtagcacaagtgatagatctgctcgtttgcacgtcgtcgtctttggaattaaatttgaaaatatactgtttatctaatttttttcaggaatattcgggatgaaaattttttttacaaatataccatcgatctcgcgcaatcgttgtgcgaaaatgacgtggacatgatgtcaccagcggtatcgcgcaatgaaaacgcgagaccgtgcgatatcgcgcggtagcggcgcgagaccgcacggtctcgcggaagcaaagagcgagtccgctcggtatcgctggttgaagcagcgacaccggcatggctgtcccggccgtcaatggttaattacctaattaactattaactaataat

SEQ ID NO: 42296 - DNA, 649 bp, Oryza sativa
attggggggtgctgaacaccttagactgaatcgtcatgagctgcagcacctgtgctctagcaaggagaaaacatgcaaattcaagcatgtagatgttgtgaactttgctttccagtcggacgctgttgaggtggttcatgacacacccaatgtgatcaagcttttcgtggtagcttgagccaacagtgtcggtgctatcctgagtcagatcgaaccttgtatcagaggcctgcacggaatgatgaatccaatgaatctgtgttcagctaaattgaacaggtagtacctacacagacagtgcaatgcaagtattgcaacagctcaagctcaaccagttacctgaacgtgcaatgtctccacgaaaggaaagaaatttagcaagttcatcagcttgtccatgtcattcttgctcgagaactttacactgatagccagaatcttcacgctcagaagcggagcacgcaaaccattacagacatcctgatgcaatgcacaagtaaaaataactcagtgagagcaactaaagagtagagtaggagaacgacgaggataaatgaaacaagaaaccaccttctcaataacctcgtcgaagaggaggaaattggacgagctgatcacgacatagccgaaagcggtgagctttggcgcg

SEQ ID NO: 42297 - DNA, 688 bp, Oryza sativa
tttctgaatggtttgagaaaatcacgcaaaaaaaacaccgtttataaaaaaaaacaagccgctcattaaaatacaaacattgtcattgacatgactattcatgaaaaacgtatattatcattagaattttttcacccgttgcaacgcacgggtatttttgctagactattaaaaaacagagagtgtatattttttaaaaaaatatagttctctgatagaaaaaaatatagttcactgatagaaaagataaacaaacatcaaaacatgcaattaatatggagaagatacacaaacaacaagtaaaaggaaggacacaaacaccgaaacagtactgtcatcaattacgttgtctagcttgccatggagatacgaccgtgtgcggcggctgtggcatccggcagcggtgcgtacgactttgacatgtcattggaggtggccaacaggttacatcgcccgtaccgtgctgataaaaaaggtggtttgcgctgcctcgtccctgtctatcgacgaggtggcgatggtggaggctcaatcgggtgggtgctctttcgtacgctgaggcgcccgtggacggctgggctaccatttatgtcgaggcccatgacccgtcgtaaccggacgaacatacaccatagtgaaatagtgttgaatctctactattataaaaactagctgggtggcccacgca

SEQ ID NO: 42298 - DNA, 991 bp, Oryza sativa
ttgattaatctcgtattggttcttatatggaaacttcttccaatattgcttatttttaatttcgaatttcagctatttttatattgtacttctacatggactctcttttttctttttttctttttctccgattaatgtgggaatttctacccttcacagcgaacgtgttgcctcctttcaaagctgttttaataatataatagattaaagatattttggtataccatccgtgtttgagttagtttttaagatcgtttgcttttggaaatacaaatctgtgtttgaataggattttaatctcgcttgcttttagaaatataaaatgagtcatatgagttttctctttttaaaaaactccgtatgctaatttgaggtgaaagtcggactcctaattgtagctcatgattttcttaaaaaaagtaagcgaattcccatatggcttgtttggtaactcaatggaaggggattggtagtttacacaagggaattgatgatgggattaatatgggaatttgatttttaatcccaatattttgtttggtagaggtgatggaaattgatagggagtttagttggagattaggtcattaataaaaatggatggctgagatttgcttagacaaagtaaaggagaaattccctcccaattacccgcccctactcaggtattgaaaaggagggagtttcttcctcaattccccatccccatcccaccaaaattcccatgtctcccaaccaaacaaaacacttaatagcctcatccctttaaattcccaatcccttctaaaaacttcctccaaccaaacaggccgatagtgaattttacccagctaaaccatataacataataagattaaaatagcattcacctactgcaaacgcacgggtatttttctagtatactaataaattgtttctcccacttttgggggccatgagaagcgaaatatggcaggcattggggaatgggatgaaagttgcaacatagtcg

SEQ ID NO: 42299 - DNA, 755 bp, Oryza sativa
gggctggaggtggggtgtgggcctttgcttttttcctctttagatcaatctgattgtatattagtgaaaatcaactattagatgttttgcttttttctctaatttgctagagtaacacgtggtaagttaagagcgtttctagaatgccacatggcggcttgagagctgctggccttgggccaacaaatcccacatgacaatgcaacaaatcgccccacgcgcggcgggggagctttttttcgcgtacggataggatgaaagacaccccgatcgaacgatgaggagaaaaacggctgaaaatgcaaaaaaaattcagctgttttccacgtagatgatcccttaatattatggatctaccgatttaaatggacattaatgattaactttttttctaaatttaaattattagctagaaaaaataggaagatgcacggagtaagtgtacgtacgtgcctttgtgcgtgcatgggtgttaggagggattagtcagcgtacgtttgttgtgcacggggtgttcggagggattataatcccagacttgcgaagtaatttgatgaaagaattgatgtgttgtatgtgttgctagatcatatatacattggtaaaaatacaagttcagttgcataatgtggtgataaaagtaatgtttagcaatccatttgacatgtggattgtattatagttttatattttttttgtcttcaaagataattattctgacggtaccaacgtggtttttctgacggttgcccgcc

SEQ ID NO: 42300 - DNA, 578 bp, Oryza sativa
atgaactgaaaaaacaagaaatatttgtaacataggaccaaatctaaagtttaatagcttatggagtctgttaaagaaacttttgcacagtagagtaccgtagcatacatgtgaatggtgatatgtgaactttcgaaatgctaccttctagacaagctgtgcccattcttcaagtgacacgagagaattgggatatattgcgtttgcaaacaaacttccaatttgtctcaaatacaaatcaaactagggaaagttgcgtcacaaaacaactgaaaatgaaattaaaaaaacagggaatttactaatcggaagaacatattaaaataaaggcatttcaggaagactcttggttgaaaaattcaaaacaattttggcatgttgagacattttccttgcacataaattgtttgagctaatcggagatacaccttacatgacaaaataagaacaaggaggtcagagaaggcagtacctatgtgcaccctggcaatatgggagatattattccattcagggctttcatatactccaaccttctcctccagttctttgcagcagcaagtgatatcgagcttctg

SEQ ID NO: 42301 - DNA, 632 bp, Oryza sativa
tcattttacatcattccgtaaacatgcatagctaaattaaaccaatagtatccaataaaaattacaagtgaactgtctacattttattattgaggtggaatacccctgcccttttacatgtcatttgaattgccataaaagaattttgaaatgatctaacaacacaggttgcatcatcatatgttgtttttgcaaacacgtgtagctaaattagatatacactatctaagaaaatagaactaactataaaatatgaatagtccaaagaaaatccaattccttaaagaaaaccgtaaacaaccagtttagctaggtcttacgttttcaccaatggacccaaaacattcaactaacaaaagaaaaaaatgactttctttgaatttatacttaatttatttaacatgttttataaacaaactaagtcttaaatgatgatgaagattatatataattgcttatacagttaaattaaatattatatgtaatataggttagagaaattatcaaagcgatacggacgatgaatatttgtcgaggaaacatactctcaaaacattgcagaggctattcgattatatgatccattctcaaacgctgctcacgatgcatgcccgcgtgaatacgcgggctat

SEQ ID NO: 42302 - DNA, 690 bp, Oryza sativa
tagaagtagagcaagaattatatttgtttttcacatgcttttcatccaggaacaagctgaacaagtacggggaccgtgtgcttgcaaccatagaggatttcctcgccagatatccaaatgcgaccaggaaaaccagcagcgcggcagcaacgagcacagcgaggcggtcaagaagcgaagaggcttctccgtcaccaacacctctaccaactgtgacgactttgaggaacgcacggtccagtccaagaaacgcgctgcaaagacacgtacaaggcaggaaatatctgatgctgccagcatcgtccaggacgtccgctacatagatcttgagctagatggttgtgaacaagtcaatgaagtgccatacagtgtacaaaagcctgtggcttctggtagggttttacctgcgtggcagtccgccagaatagcctagggttaacaccccctagtagtttctaatttatgtgaagaatttatatgcattaagtaggatcctaggctaaccccattgagctttatgtaggccttgggccaactacttgtaagatggcaccaaccagaccacatgttaggttgcttctgaacatatatggtagtagtccttttcagtatagttcccgtagcgcatgtaactaacatgatattactatggcaaattttgatgtcaacagcttcaggaagtgcacatcg

SEQ ID NO: 42303 - DNA, 689 bp, Oryza sativa
aaaactgtgataatccctaaaaggaaattaatctgagattctgaatactagcactcagcatactgtactgaattctaattcagattaagactataagaagatgaaaataagaattaaataaccaataccaatttttacttggaaggatatggttaaaagaaatatatcaaacaatagcaattaactattctcacatcattagcaccggtagctaattctatacaagaaaatggcatgattcctgtgaagccttgaatgatataacaatgcaattttcttgaatgagtgatatgatgagtgcttacgttagtcgcttagctatgaagaaaacaggtattctctgcagtttccctccatgcgaaggtttcagttgatcaattactttttctgcttgggtacctgcagcagtcaatacaaactgcaacagacaacattgcataactgcactcagaatatgttggatgggaaatattattagatggaagggaacaaaggaagatactgttttttctcatccagtttccacaccagtttcggtggagaaaaggactggatgtagaattgcggattgagttctttttaataagagaatttggaaaaataccatcgtagagataaatgagttaaaatttaacatcatatgtaagaatgacaattgacatgtggtgtctggacccacctgtcaatga

SEQ ID NO: 42304 - DNA, 726 bp, Oryza sativa
acaaaacatgttctgtgaaattagatgtgaagtgagtcatgacaaatggaaaaacatgagcaaagaaacatacctcaataaagaaaatagttaaaagaagaattgaatagacctgttctccaataccaattgcaaccctaacaatagcatgtcaacatgcagaacatgtaaaacaacaagcaatcaacgagttttcatgtgaacctactcatcaaacccttcaggtttctctgttgattcagatatggtgtgagcatccaatgctttagttgcatctaggctctttcttttcacaacatccaaagcatgcttagcaatgtcattatacctgacgtgagatggccaatgttacaaaaggtacaattgggcccaccactgtttagtatatgaaatacgggaatcttgaggatggtaaaacaatagtccatacctgtaataatgtaacaatgcagaaaaaaaaaatcaagaattgagctttccatagagaaattgtaaatatgtgcctatgagtaaatcgaagtttagattttattcatcacaatttagtgttgaaacccaaggactgcaacacagagaactcacttaagatttagagaaatgaaagcataaagagagtaattacatctgcatgttgcaaaaatataggagttacaaacccatctaaatattttcaagctatgttgctaatacaaatgtctatacaagattacagtaacacttttgatt

SEQ ID NO: 42305 - DNA, 571 bp, Oryza sativa
cagcacgcgggggccatatgattgcaatgcgaagcgtaggtctagtcgcgtcgcgtcttggggcagcgagcggcatcgcagctcccatcttgtccgcgctttctgtttgctgcagcggctgcggcagaggcagctgcagggcgaggcgtgtaggagtagaggctagtactgctatagtagctttcggttttgtttgcttgttcggatcaaaaagctgccgcgagaatcatttcgctcccacctgcttcctcttcttcttctctcctcctccactgctgcgtcgtctgcgtgtttttcttttgttttcttttggttccaggggcgctgacaggttgatcagatggatggaggggatggaactggggcttttttgcctccccgtctccagtctcctaccactactgcttctacttctactgcgtctggcagcttgtgtttcccgacgcatcgatctgcatgtttttgggacttgggagcgatcatttgctagtatacgaatacttgtacgcgagcgacacggaatgatggagcgctaatttttcagtgtgccggtggtgtaaatttgcactca

SEQ ID NO: 42306 - DNA, 1369 bp, Oryza sativa
gcgcgcgggcgtcttggggatgcctgggcggtgctcccaggagaagggcacggcggaggcgccgaccggaaagagaaacggtggtggaaccgcgagggcgccggcgagaagggagcaacgggaaggagaggctgacgacgacgacgacgacgacgacgatgacgacgacgtcgaggtcgaggagaccgaggggttcggggacgtgaggaggcgacggcgccggcggcgagcggcggaaggtggcgccggaggaaggagcggcgacggcgacgaggcggcggcggcggcggcggcgtcggtgggcatggcgacggtgtgggtgggtgggtggagttttggaggcgtaggcgtgagttcgcttgggtttttatggagtagtcgagtagagaggtcgcggtgaccacgtgggatcggggagttgcgtgacgtggatgctgagctggcatgctctgtacacgtcagcagaggagtatgaggatctgtcacttgagatggtaatgtaatccttcgcagcataggtaaacatatgtgaatctttcaagcgtgtataccaatgaagagtcccagttttattaggcatatttttaaagtgggttcgtggtgttttgtagcaaaatttgccgattattagtacgccgttatcatgaggtatcaaattatatactactcgctccgttccatactgattatcatatcatataaccttaatcctttattttgatgtgcaacattatcgtaatctatgcatttagaagtagttaaacacttgtttcctgtgtatatggagaatgtttattgattctttcttaccacatactcatattaaataaaatatacggtagttaagtctttcttgttcctaatgaaaaactttatatgatgattaatactctataagcttatcaaccgctaccaaaaatttaattttatagttgattttaatgtttcttgttgtaatttatttttcatcactagcttttaagtcactaatacatcacatataaaattacctataaattatttcttgttccctaataagtgttacggcctatagtcagctgtaggaaaaaatgatgggactgaattcaaaatatacggaaagaaacaactacagttagaagaggatatctcaatgagctgaggccatatattcaactgaaaatttagttctccttttaacgtaaataccagttgacacgagaaataaacgcatttgtcatatcaaatggaacatatgcatgcataagccaatttcaattccaggaaactttagttaccaacttgatgtactataaaaaaacatttgtcaataaattagatgtggattagacacggggaggtaacgacggaaccaagtaaaacagagttg

SEQ ID NO: 42307 - DNA, 1521 bp, Oryza sativa
taataaatactgcatctcttaatttgagtcaatgatcatgcagtttttcgtcaacttcgaacgaaggttcacaaataagattcaataattgtgagatctttatctagtgttggtgcatattagtttgtgtttgctagtatttgggtgtgcttttatggactttctggtgtgtgctcgttatcgggtaaatttatgtaataattggctgtaactcgttgagtaaaggctgaagttttattccattatctcaaagaaaaaggaaaaacctttcttaattgcaattcattccctttgcagaagctaaaaagaaggaattttcatagaattttttttccgattcctttggtttttccgtggtgcaatgcgcactgatcggttaatctgttaccttcaatggaggaggagatagccgaaagccagcgtaggtatcgcggagacaatcacccggaagccaaagcgaaaggagaggagagtgcggcacgcgcgcacacatgcagtacgacctctggaagaaagaaacgaaagggaaatcccaaggaaaagttcgtgacaaattctcctcttcgaatcattgatctgcaaaagcgaggcaaatttgaaaaaagccatttcgaataaatgtaggagtttcgtggtggagcttcttcgctgaattctaggctaataatattcggctttcagtaactttctgtagattgaatatactcctatctttttttgatagaaaaggcacaataattgtaagagttagtataagtttaattaatgtaccatattgttccatgattccatcttttctagtacatgcatgcacgagtggaaaagagggacaaaccggcacggcgaggagacagagcttctgttgtctgaaaaagaagaagaggaacacagctgcatttcggcgctttacacaagcctagtacagcactacaaccattgcactgatgatgagcagtgccactgcaagaaagtaacaggaattataacagaaattatatttgcttaattgcattgcttattattcggtcagtaatatttcctttattttacctgtatccaattggggaatgatccttttacttggtaatggatgtagacgctcatcctaacaccgattgggataacatatacgctatgggttagttgcgcaaacaggggttttcaaccagcatcataatgagcaagaaattttagtcttcaagaaaagcaagaaattgattaatttgtgggtcgacggaatcaaaacaataatgttgacaaccaacaggaaaaaaggtctgcctgttaatatgtactaccatatatttgattgcatctctcttgtagagtaatgcttggtgaaagtattgaatagatttcataggaaaaaaggttcaattcccgcaataaaacacagaagaaattccctcgttccaaacgcggcgaaaagggaaaccaacaatttcttcgaaaatcattgtaacattcaagttcatctgaggcaaacttcctctaccataatactgggaatcttgccattta

SEQ ID NO: 42308 - DNA, 638 bp, Oryza sativa
tgtgtcagctctgtttgttgtgtgtatgagacgaggatggtctgtgccgcggtccttctgtgtcttggcttgaacgagggctcgtgcccaggtcccagcctcaaatggcgcgggtcggggctagtgcctggggagatccgcgtgtcgagactggccaggccgggaacgtggtgaccgagggttatggatgacccgattgtgggcctttgccgattctcccccggagttcaccacgccccggggcacggctcggttctgggccccgtttggcgattttagccggcccgggccaccgagggcaggatcgagcacgagcatgctaattcaagccaagattcttcgaaaggaaacaatggcacagacacagtccttaggaaatcgaaaatgcttttattgaaatacggaagaaaaaaatataagcttatgcatgtggaagcccccggccaaccctgcacgcccgggggggtgcggggttggcccgagcccgagacctgacacccgacccccactaggggtagaagcgacgaaggtgttcgatgttccacggattaggcagctctgtgccgtcacccgtggctagccgaacggagcccggccggggaacgccgatcactcgatacggacccttccacattggt

SEQ ID NO: 42309 - DNA, 729 bp, Oryza sativa
taggcatatatgaggttcaaacaaagaaaggattttacacacacctgaaggaccatccgaatcaggtcagacttcagagacagagatatgtcgttgattttgtcttggctggagatggtttgatccagctaggattagctgctgttgcagggtcggcagatgtggcatctatcgacacagatttatatcggaagcaacagagagaggaaaaaaaaggtcattgctagctaatttaatttgttgttgaatctccagcttccttgcaagctaccgtctactcctagctcacatggatacacgcctgcaagtaatccaaggaatctgggaacctctgcaggtctgcaatcctttgctcccgacaacgggttcctcttcctcctttggtcagggcaaaaacttgggaactcactgagaatgagtataataatacagtaagttaattatagttgggaaaactgatccaaccactagaagggaagaactgattcagatggaccagatattgttggcctcatcagtttgttgttgttttttctgtgtgtttatttttttaaaaaaaaactgttgtggaaacaaaaacacatcactgaacatgtttgtcagagatgcatacaaagactggcacacataaacaaaaaaaatgctggaggaaattccaaatttacactaaaacaaacatggcagataaattttactacttccaaccaaaaattaccatgtttatccggg

SEQ ID NO: 42310 - DNA, 656 bp, Oryza sativa
ccttttaaaaacggtgaaaatagtagtggccacctcttgagcaggtcgggtgaccatccgagctccgccactgccgtcttcactattagagtgtgtttagttcacgcgaaaattgaaagtttggttgaaattaaaatgatgtgatgaaaaagttgaaagttcgaagaaaaagtttgaaactaaacaaggccttagtagctcgggtttgatagtgtcactggcttcaccattgagtgtaaatcgagtcacttaacgttgcattagctaaaacagctctcatcacgtcactaaacaaaactatgtttcaattcgcatcggtttcactaaacaaagtagactcgattcgcatgggttttagaaattaagggaaactctagcgacacgaatgaatactaaacctctagtagatagagggatcctgagtagacttattcgttcggtgaaatgctcgggctcgtttcattgcgtcaaccgaaatagcccgggattgggaacgttcaaggtcacggcctagttaccccgacttcagcagaattgcacaggacaacccatgggcctaactaacagttgctacttgtctgccacggccgacgggcctggcctatattcccccatcactaagacccaaacagatcgcgtattgcctaacatttcaa

SEQ ID NO: 42311 - DNA, 605 bp, Oryza sativa
ggctgccattggaccaggcatgctcgagctctccgtcccgccctcgaacgacgagtggtggtgagtgcacctgacactggccgcactggcgggatcctcccgcagcgacgagactcgactggcatacgccacaatggcccaatcagagcatcttgagtggtgtgagcgggcaccctgaacgatttgtaccatgctctgatatgcagcgacaagtgaggaagaacaacaagcaaacatccaacaccaattaactggccatccattaccagggagaaaatgtataaggaggaagaaatcacaccagacatgcagattcggcactgagatagaaagagcatcgattcaataccaaatcaggggggcaaaacaatggagccgctgatatcggagcaaaaatcgcacggaatggcgcggccaacgacgaagaggaaatgcgagtgcatccagaaaatgccacgccgtccccttccctctttaccacggatgaaccgcccaagctgccacagacacactcaaagacacgtgccttcacatgcaccaataaacgcagccgtacacatgaaacgcgaccaccgtttctgaacagcgcgaacaaactaaatttg

SEQ ID NO: 42312 - DNA, 687 bp, Oryza sativa
ttttgtttgcaaagtatctttctgcccctgcttggctcatcttcatttatgcttcacagatggcaaatcaggtgctatagcagggcgaggtcacagctttgcagttgccctccaattcatcagctgacgttgatccattcacaccacaccacacaatactccagcagccgaagcagcactgacgattctagtacaacggagtttaagcaatctcatggaagtggaatgtggttatgccttctgactgtcagccctggtgctaatccgcagtatgctgcccccttcttgtacagcttcatttgacttaggaagatcgtagcacggttactgtatttacttagggacttaggtacgattgacgcccaaggcgtgtagccaagccgtacatctccttgtggagacagccgaacggactgtaccgtggttttttttccgtacactcgtagttgtagcctgtagcaaagctgcagtttagtactagtactagtagtcgtcttggtgtttatttgatgtttaaatagcgtatgcatatatatacctgacgctgtactttattgaatgcgggattgacttgagcggttaaaagccggaccgtggtctcgccggaacagcgggacgggctctcccattgacccagcgtcggttacggatgacgcgacgtgacagctcgtgcgctctgcgcaaatt

SEQ ID NO: 42313 - DNA, 1162 bp, Oryza sativa
gaaatactacccaatcaagaaatggaaccctagaacatgtgagtatgggtacagccgtacaggaccactattacccataagtaaaactggtaaccaactggttactacccttgttatcaagcccgtacatctagtcacgactagtcatcagctagtcggccagggagcatgactcgatttgttggcggcagcagacacaataaaacaaagaaaacaacaatgaaccacctcggaggtctggtccatcaggcattattactgggtgaaagggagatggaggagagctccaccaggtccatcaagcacagcatgacgcagcagactagcagtaaaagcaactgctatgtaataatagtctgatagactagtcaactcaatgagtagtcttcaactagttgcgactagtcgccaagtcactagatggtaactcaagtagactttacaacttaaaaactatggtcactgctgcaatcttaaaccctaaatgggaccatgacacacaaatgggataacatacaatttcctaaatactcaaaacttctattaccaactagtatcatgtagtaaccaaaccttctatttacccacttgcttccttgtctcttttcgccttctattttttgtacttgtattcttcacagtattgattaaggatgattgaagagattacacattacaggcaaactaaattcaacaggtacatagtagttaatgttttgcaatattctaaacataagtagctaaaggttggcacataagtagtaattttagtcaagaaacttgagtaatacagaaacaagtaatatgttcttatattaccaaactgcaactttattacatatggggggctctgcttaattaaccagcatgtggaagtagtgcagaataacttcatttgagaaattccagataaaaaagaggaatggccctaattagatttaaaattatatcctagaacaatacttcctccgccccagaatgtaaccatttttggggtaggcacgggtattaagaaaatactgtagaaatgattgaagtagtattgtcattggtgaagaagagaaagtaggtgaagagaatagttgtgattgattgagatgaaagggtaggtggagaaatagcttcattttgggacaagttactgtgttagaaatagctacat

SEQ ID NO: 42314 - DNA, 680 bp, Oryza sativa
tgcaataaatcatggttggtcatccatggcaaagagccaaacatgaacaactcttctgcttatacagtggatttgatttgatttgattcactcagatgttgccatttcgtcctgttcattttccttttatatatcacatgtgttctcttctttgggcccatcatatcaggtcggtccatctgcacccgtgtgtgcgacgagcccaccaggccacaacggttgggccactagcctggatctggagccgtggcaaaatcagatcgatttcgctgcgctggacatgtccttaaataaaccgaatccaattaattgaacgaacagaaatggccaagataactgtgcacgacattgatgaaatgaaacaagcatggccttgaaacgacattgatgaaacaagcatggaaaccatctattgatggacccaaaaaaaatttaaaaaaagtatggagatcgcttaagcgcatgtgtcatgcgctcgcaccgtcactcgccggtggatttttgaattcctgaatgatttcggctacacgtgcattccacacgtggtcccaccacagcacgagtagtcgtctcgtgtgtatccgggtgtgcctgcattgggcacgcctcccattcggtcaacccctcttatcacccgtagcgcacgcgccaagctccccggtatgggactaaacaacaac

SEQ ID NO: 42315 - DNA, 1113 bp, Oryza sativa
taaattgacggccggttgaaattagaaagagagagagaaaaaaaggccagtcatctcttatttcctcatcccttccagcatgtggccacgcctgagatatgggtgcgtcgccatctttggcggggcggccgatcgatggcaaacgtacgatgcgggtgcgcaccagggttcatgattccaacgaaaaccggtcgaattccgcaaaattttgaggtttcgataaggctcgaaagtaaaagctgtctgagatttcgatgagtttcatccaaattcaaatttaaattgataaataaaagaaaaaaaatcaaataaaatcttataaatagtataatattcataaaatctattggatataaattttcaaaaaaaaaattgatgtattccgtgtatttactgaaatttgaagtaggaaataaaagaataacgaacttaaaaaaagaaaaacaatttcagtttatctctttttctagttaatgattgaaatttcgatgatttcgctcagaatttcgtcaaagccgaccgattttcgcgagcttatcggtaaactcaaggaatctgtattcaaattttggtttatgaaatttgtttggaatctaccggctttttatcggatttcacagaaaccgtcgttctgccagagccctgaaatggaaggccatcttagaaatcgtaaaccctggtgcgcactgctctcccctgcgaagccgcggccatgcatccggcaggcggcagctggaaattcgcgaaagcgaagcgaagggcaagccgcacgatgcacgcagcacgcggtggtgtccgtcaaagacgtacgtggaacccacactggtggtggggattggggggcggaatggccgatgcacgggccgcgcgggcgtacgtacgcgcgtcggccgtttgccttgcgcgcgcgcgcggcctttccgttctcgggaacgcgcggggtgggtgggtggcatggccttcgagttcgagccaagctacggtgtctagctgcgtccgtgtgtgcccggccctgtcacccgcgcgctctctagtctctcccagtggccgacacacgcgcgacgtacgtagcgtaggccgatgcggcgcgcggtgcgaatcgaaaatcgacgt

SEQ ID NO: 42316 - DNA, 941 bp, Oryza sativa
cttttaatattttattatcggtgtctcattttagatcattctttaaccaatattttcatatgaatgatttcgagtatgtcggctcctatttatcactgaactccaataatacatttaaactattgttctgacatatgacaagtggatgcatatacataaaatactttagggtggtccaaaataaaataaaggtaagataacccaatctaaagtaaaaatattagttaaaagacagtacaaaacaaaacaacggtaataaaaagttacgcaaagtgaaattttccgaaaagttgtacttctacgagtacagatattggtgtggccatgatgaattgcagatgaaatccaatttcttgataatttgtactagaatctggacattgtcaatactccctccgtccaaaaaaaaaaggcaaaccctgagtttccgtgttcaattttgattgtccgtcttatattaaatttttttataattcgtatttttattgttgttaaatgataaaacataattaatattttatgcgtgacttgtcttttcaattatttttataattttttcaaataagacggacgatcaaacgttgagtattttatgtgtgacttgtctttttttttttaaaggacggagggagtacgcaataactcttttttttttcttaaaagaaaaggactagcaagtactcctactcatcatcattacttcatcagactggcagagcgtctcccttgagcaaatgactactagtacgactaccaaatgacttgagaggctcactccaatcccttggtcctttcagagaccgtcctgtgccaaccacaacctggaatgtagcgagtttctaaagaacgcatgtatcaaatgttcaaatccttcatggtgcaagccaagaacaccatgactacttccattgctttttaaatgcaggaagccagaacagagc

SEQ ID NO: 42317 - DNA, 1467 bp, Oryza sativa
aagtatcaaatgtcacttgacagaaacgtgattacatcggatgcagaagctgaagagcaatttggcacgtcattacctgttatcgcagacaaatcaggtgcattgtccgtgcacataatttgacaacttaattatatgagcaattttggactacaaagccatttctgcaatgtaccagatatattattatcatacggcccactacaggtgtacatatggaaattcattatttgcatccgcaaatcatttgatcggcatgtaagtccagaaccctactgctgatccgcaaataaaaatggtactattgatctacagagtaatgaatgtgaatggatgctagtagtagtagcagcacagccaaacctttggcttctcccacgccctaccgctttgatggagctgtttgatgaaccagcaaacacaagcacctcttctttatgagtccacacaaatccaacagagcctactgattgttaaggtgacatgtagaaaatcacagggtcttataaaacaaccatgccatttaaggacaccaaagctaaatatcaaatttatttgacacaataccatgtgatcagaaaagagtaggcataaatggacagtactatttgatcaatttgagcagaggatcaattagtgctccagcatttcttactaaatccctgaccaccatttttttactaaagacctgaaaagcataatcatgcataaaactataaatcccttaagattgcagagaacgccatcatgttgtgtagattaacagagcaaacaatgtaattaaccatgcataaatgcataagtgtgatttagcttgcacacaaacatgtatcttcaatggcacagtacctatcttcagaggcaagaatgaaatgaaaagatgaccgatgcttagctcatactgcaaatcagtaatataccatctaaacatagacagcaaacgctacgagtttaagaatccaaaacctgcaatacaagaaaagatgatatcaaaataaagtaatattccttttgttcaaaaatattgttctgtaaaggtaaaagaaatccaatccaattatgcatggcacccctatagttagttacaggcccttcctgcatcctctatatatgcaagtcatcgagatgacacggcgaggtcgatgacatactattcgtttagcaaacaaggaatgactgatgacaaaaaaaaaacaatatattttgagacgtatcttatatttttacacaaagaggaaaagaggaaggaagattaaaaaaaagggcaaaaataaccccctacacgcatagtagaaaatcattggatttaatcggaatcgattgcagttttacatttgcatactaacatgggtccttgatagccaatcggagattttcctttgggagtgcaaagctagaaagcataaaaacttggaatctacctaatcagatttgtaatttaaatttggtggataatgcatgttggaa

SEQ ID NO: 42318 - DNA, 919 bp, Oryza sativa
acacacatcctgtgatcctgtcttggtgttcgtctcttctttctttttctaactcgtgtcctgtataaatgtgtctggttctctgctaataaccctgccacaacagtctgatttatctccggctaagctaaccatactatctctgagctgatccgattagggtccttcaggtgtgcaaatcttttctttgtttgtttgtactttacaccaattgggtctgctaaatgtgtatactgactgaaaatcatttatatatgccaatgattcagcctgatagaatatatacattttgttatgctgggtgcagtaatggcatagggtgatgagtaggtttattgttagggttcctaattcatttatattgtattgtattccatgaaagtattgcaattactgggcatgttccgctatgcgaactgtcacaaccgctgcagctactgcatttgtaaatggttgtcaattgcagctagtttgaactgctgcagccgctgcatgctatggcagcttgcacatcccatttcggtagaatcatcacaaacatagactccctccattacaaaataaatcaacttctaaagtttgaatttgtactaaaataaatcaactcctaccttcttatctaccgtcagaccgtagatcgagaaattttgttcctttaatacccctcacctaacttctctattaattagggatatttggtccattatctttctcactaattctcattgggaagctaggtttgacacttctctattaattagggatattttggtccattatctttctcactaattctacattgggaagctagggtttgatttattgtaggatagagggagtatgtactaaaaaaatcacatgttttcagaattcattttatccttttagttttgatgcaaaagattcattttatctagct

SEQ ID NO: 42319 - DNA, 728 bp, Oryza sativa
cttggtgcctgcaggcagatggctactgttcttctccatagtaccactttcagtcgtctgatgcatactttcctgggtgggattcctatttctggacacactgtccattttgttaacattatatgaagaacttgtcccataagtatgagcatggtcgctatcacaatctttcacttttccagataaaccaggtcttaaataattcttccgtgcaacctgagtgttgcgtagagaacgccaggcctgccataagaatgttcttagaataccaaaaagctcacagaagtaaacaagaatgtattaaaaacagtgagttttaggttaatgctttcttaacaaaggggtaaagataaaagaatgagaccaactaggatttgagtttctgataacgcgtcaagggttaactggacctattatatggaatgttagatgatacacctttggtggacagtttacaaggttataatgcaattatcctacctgatagctccagattggagttaggggaacccatcttttcaacaggatttattatgatggagcacatatatggttgcaaaggaaactgaataattagctaaacttacaagttcaatgataagtgacttgcaactatctcatttttatgcaagtgatgacaaataccatgtacagtattactgtcgtaactcataccttctcaatggatggagcttgaagacgctctaggccttgaattctgcaagcag

SEQ ID NO: 42320 - DNA, 1652 bp, Oryza sativa
ccggcaccccctccgcgctagggcacaaggccaaaacgtgccacagaattagcccgaaaaatcacccaaaaaacaaaaaaccccagccatcaagggcgcgccgcgactggaccagagactagggaatcacctgagagaccgaccaagctggcgccgccgggaggaggacgcccgcgcggcagccgccgcagcagcagagacgcggcggtggccggcgaggaagacggggagttggggtttggggattttgggggtttctgcggaaatggacgaggccaatattattttggttcgtgagcgggagaggaggggattaaaacttgaaaaaacccccgcttggagggaaaccaatcgcggtttcgggctgatcagggagccggccgtcggatctgcctcgagattcgcgccgggtcttcccaaatcgcaacaagagccccgccctccccctccaacgggtagaaagaacagtggaagtggcaggtcccctttttggttccacgtggcccgtgggccatggcacacttttcattcagaaccaaaagttttgcttcttttgggttttacgtatagttgtcgtagtagtctctttcttttttttcttggtttttcttgtttttctcttttctctcttcatttggtataaatcggtttggttaattatgtgtgtaaataaactctcttctcctttcatctaatattgacgtgcaattctttttcgctttcgcgaaaaaaaaaagttttggagttttgaatcccttcgaaatagcactcgcatcctttgtaacggaaagaatttgactgcttttttttacaggatctgagctgaaatcctgcaaaattcatgcaagagtcatgcaagagaagcattgctcggaccctgtttagatgggactatccctatcacatcggatgtttggaaattaattataaatataaacgtagactattataaaacacatccataattttggactaattcgcgagacgaatctattgagcctaattattccatgattagcctatgtgatactacagtaaacattctctaattatagattaattatgcttaaaaattttgtctcgcaaattagctttaatttatgtaattagttttgtaagtagtttatttttaatactctaaattaatgtctaaatataaagaataaagttaagtccatggaccaaacaccaccttggtctccggtcattcatgtcagttaccagtaggaaatctgagacagattcaggacattcaagaatgttcagcgacaccgagtcaacattgagaagttcaggttctcgtcggcgacagtagatcagagttcacagacggcgcactagtcgctaacggccactagcatccaacaggcctttcatacaaggtactagctgaatttacagtagttttgccaagacgacgacgattttcacaggacgaattgatcttcaaactccgcagctcgtcggcgaggctgtccactgcacaagaaaccggcgagcgatcctcaaacggcctctgctgtccagcatccgcagccgtcaccgccaccgaccgatcgacgaacgcgagattctccttgctaccaccaccaccaccaccaccacccgctgtgattcatctcatttggcaaatgtcatgttcagaattaccg

SEQ ID NO: 42321 - DNA, 642 bp, Oryza sativa
tatttacaattaattaaataattaaagatccattatagctgtattttactatacaaaaattaaaatactctgcatggaaactaaatgacaatggaacattataatttaaaagatcaaaatatgtactatgtcatattaaatcattctacataataaaaccaattaaacagcctttagatcacacttaagtcaccatatgtcacgtcttaaaattacaaaatatttcaattaaatcaatgaccaattatttttaactattagatctaattttaaaaaaaaaacttacgctgccacgtattatgtcctaaaaatcataaataatcttagaaattatgagaaaaataatgaaacctatcattattggttttaagttacattatttagaaaaggttagaaaaataaatcccatccacctcttcaccccaatcacatgcgcacatcattgcatgtcccctccctatatttagctattaaaatataagagaaataatcaataattttagatattaaaacaaccataacttttaagttacacatcttatttcctatatacaaaatatcgcatttagccatattcgacccatgcgctttgcataccatccaaatataatcgaaatacctcaaacaaattgactgcatata

SEQ ID NO: 42322 - DNA, 933 bp, Oryza sativa
taaacttagtatgttgtaattttatagaaaatacagatatgtagcatcaacctatctaaaaacacattaagcaagctgacttataaatgacatgtgaaaattgaagacatgcatgtttctcttgagagacgaaaatccacctcctcgatataagaagtgctatccactactccctctcccccttatatataagtgattttggtaggatatgtcacatccctccaaaatcacttatattataggacagagggagtagaagctagctaaggaattcagccgtcagaaagcaaacgtcagcaaccgcactagtatacttataaccccagctagcaggattatagtataactatacataaattaactactattgggggagtggctccggattgacggagttcatctccgtcaagtagcttctatcccggagctacccccatcctgggaaaacgaccgaagacagcctggagctcccatggccatcatgcctccgaaggctggccaagggcaccagagcctatcagcccagagcccatcaaacccccggatccaaccaagggctccagagcccattaagcctccagactctagaggctatcaggcccgcttgatgcacctggccttcggagccaaccaaggtcttcggagttggccaagattacggagcgctgaggaagccccaggccggaggcgaaggcggaccccgagagcgcagtgggccgtaataaatacgcactacgcacccgccaaccatatctggcgtcattacagggacgggccagcacaggccactacccggaaagcacggctttgcccgggtaatagccagcaccctcgggaggcgttatcgccttcttaatgggcgcagccatccctgtcattggggattttactaaaagctcgagggcgggcccaccggccagccactctagattg

SEQ ID NO: 42323 - DNA, 709 bp, Oryza sativa
tcctgcagcccactcactcttcctccgtagggtttaacttgctgtcagtattctatttacttacccaatagagtgtggaccacgataaattcttattccaaattttgaattcaaaattttgacctccacgcggtaatgcacggtaagccgtttcgttcaattagatagtatctataagaccaaagcatgcatgtattgttttatttatcaaatgttttgtgttcaatatttgcataccttgttgtttgtatgatatattcagatatgacaattaatattgggagcttcctgtgtaattgaactttgcattctggcatgcaaaggcattgatttagggtatttcagtcaattttatttcagacattactagtattgtattaatcagaattattagaactatttagattggctgtataaaaccatatgtatgattcagatgaaacatggatggcgtctttgggggattttgtccagcgtctgaactttgaagggagttgtattggtgcattgttactttgttacgccagtttatcccttttttgggggaatgcaagaactctgtcagaaattcagaatactgtttagcctagtttagttcaggttagcagaattggctttgaaaatggtttattaattcaaagtttggaatccggttttttttattaattccccaatttatattggttgggtatattcactttctaatatt

SEQ ID NO: 42324 - DNA, 1616 bp, Oryza sativa
atgtaacacgggcacacggcacaacaatagcatgatcgtgtaataccattttcatattgttgcacaaaagttaagaatataaaaggtgccagatgcagaaaattcattcaccagagtcttcatccacacttggcttgcatgtgggaagaaaatatttgatctgataggtttagcatcaatgggcaaatacatggacatccgtgttttaagtgaacataggtctgagtggatcgtatttactcacaaattagacacaaacacttttacacgtaagaaggtacatctataagcttctatgaacttcataatgtgtcgtgtcatgtacaaaaggtctactggcatttggtttatctatttctatccagattttcatttcatttatccacaataccaaaccatttgttaattatagtgataccatttacaggaaagaaaagaatatattaagtatgtcagtcctctaattaacatattacattagattaaagcctattgggagatggcacaaaaaaatgtttgggcatcactaatagcatacaccatttctgtagaccataagaaggatgtagcaacacatggttgacatgtcttatgcgtttccaaaataaatatgttatttaagcataccctatatttgcatctgtgcctcattaaagatgaatcaccaataagatcgtaagaaggatggaagagtatacatattattgtgttaataatagcttaactagtgattaaaaaagaaacagtattttaatagcaaagtataaaaaggctataaggctatgtgtgaataaggttcactttttggggggaggtaaattaagaaggattgtaacaaagtaccatcttgctaccagcaatgttggatggcagatcagactgatggcatgccatagagtctgcatcagctgaaaggtcaccaccttcagcagcaactgcatgttcacttccattggaagtgctactaacactactgatactactggccatgctgctgtaattgctgttcttctgtctccttagtcttagaaaattagagttcactccaagtccacgagatgatccaaggcaagagctgataccgaatcacaacacaagatggaaaaaaatcatggacaaaacaaaattagcaatcaggatatattaagaacataaaggataggcattaataagtgcaacttatcttctagttacaacacaatagcatggtcaatgagtgccattatattttcatgacattttttttagtataatgaaccatgggtagtaaaaatatattacgctgtatatagctttcatatgtgcttgatagacagtgatctttgcattgcacaatggaactactctaaatataataagttcatatttgcagttcattggatatttattttcatttggtatgctgaaataagcaccaagctctggccaaaaacatcggatgttggttcacataagtcatgttcctgctccagctgcaaactcaacttaagaaaaatgaatggtaaagagtctgaatactgattcacttgatcagctctagttttggctacaaacattaggacaaagcagaatataactttaataatcaggtaaacatagttagccaagagccaacg

SEQ ID NO: 42325 - DNA, 535 bp, Oryza sativa
tgaataggtgctacagtttggtggttaaatacctccaaagatgagagaccaactggagaaaatctttgttcaggtatatccatagctgtcgacggactatctgtgaatgtggcatccccacagtcaggaccggggatcaccagagaatgtgattcagcagtacctggaggctatataaattgtaggtaggttagaacattgcaattctgagccacaatggatgcaacaatcatgttctatttctgttcaaggaaaatgcaattattgtgctcgaaattgtttagatctgccgagcagaatttcctaatattttctgttcatgaatagtttgacaactgtctaaattagaaggcaaacaacatgaggttgtgcagtagaagaaaattcctccacaggctttaggcgaaatcgcaagcaacatgtttcaaggcatgtaagctgtgaggaattctataaatggtcgttctttgcaatttatacacttaaaagggcagtaatgaagccacctgttataatctagactcttaaaacaagc

SEQ ID NO: 42326 - DNA, 1008 bp, Oryza sativa
taactccttgaaggtaatccatatatggtggcgttgatgtatttggtgagttttctactggtacttcgcaatgaatgtcaaggttgatcctcttatcatctggaatctgaggtaaagttttctggaaagtttcctctgatcttttcaatccattgaacccaccagaaaaaatggtttcagatgaaaacctgtttttctgatctatatttggttgaatggaattgggagagttgagccgtgccttctgtgaacgtttcttggtcataaattttatgtaggaactctcgtacagggcttccatgcatgaccgcggcaatcttgttgattcttgtgaagtattcttctcaagatccataacagaaagaaaggaattcctgcggactcgggccgatcgcttctttttaataccacaagcttggtaaactgctagcatctcagctgcagttctcatgataatggagctctgtgtgccagctagggaggactcacctccataatgtcgtttttggttcttgtccatttttgataccttagtcatacggccctttgtggagtccatttctggtaacaaactagccgagcaatacatctgaaaaccatttgtgttagaatagttcaggtctaagtcctttttgttctgtttcgttgtgatcagaccactcctttcgttgtgatcatgaatgtgtctcacatcatcttgtttccttgctagttcctcgctaacatgaccagaagtagccagtgggatttcctctgaaggttttggtgcggcctctggcaaatgtatgtactcatctaaaattttgttcagtttggagttgatgccaaaaaacaacccttctggtgaattttccatgtgtaattcctgcccatgttcaacctgcacggatgatttagtcactgagcacaaagaactctcagcatttacaggtttctcctggtttcggtaccatgaattggtccttgatgattggtccctctgcaccccatgctccccgaactcaaatt

SEQ ID NO: 42327 - DNA, 2344 bp, Oryza sativa
catctctcccaatcgacagagaaaggagatgtagcttagagactactagagaggacaactaattctcatgtagctttcaccacaggaaaaataagggcttagatgatgctgaaaccgttgtctgtatgtatattaggcaggtagatgagggtcacattgacgagctctctagcccgattttgccttgttagtggattgaagagaatgctaatttcttgggctgaggatgtaattacgtgcgcatcgacacctctcccagggccaggaccaagttgtaatattgtagagctaactggtttataatttggtggtatttgttattgatgggttggcttaaccattggttccaagaaaatcaattggtacagatcgatgacgctgtatttaaaccctccatatctaattgtaagttgtcttatgcttctcaacctttttctaaaatgtaagttattagagcacttatttttctcaaatgaatgctatttgtgattgtgaaccatcttttgcagtatagtataaatgaaagataacaaaattgtttgcaatattactttattagtcctcatgcataaatttaaagtggctatttagattttagaatcagagggagtaagcaagaagcttacgcttacgctagagctgggatagggcttagtttggaccaaccttttttccccccgatttaatggaagcagcatacacacggacacgatgccacgtatacatacaaatgcaaagaaaaacaggacacctctggctgaacctactataatttcttcgaacaaaggaagaaatcgcctccaagccgctgctgaaagaacagaagaaccgacagcagtattgctccacatggtatggcaatgtcccatgcgaggctgaagagatcatcgcgagggttttcatacctggaagatggtctcaagctgggtacaaaatgtaaaatcatgtatggctcttccaatgtaaaatcccggggaaagtaccttcactttggaattggagcctgcgccgtttaaaataacctgagggagcaattaagaacccgtcgagtattaatcccccatgtgacaccatgatcccggctaatgcaccaagaagggagcgtccaaaagcggcacgggggcacccaggcaagctgcctatgatacctgtacagcaaactcttctatatatgatctgttcgttcgacagatgaaccgtttggacggctgcgatgatcaggacggcgtatacgtgacgatgtgacctaacctatagcgagctatgtatgtatttcggcgcgagctttgatgtagcagcggccggcatacattaccaaaaacattttcccaggcagccaaaatgactctatgcaggcgatcaaacacgctgattgcaactgaaggcatgcaaaaatatgatattttttcagacggacatccgactatcgagaaaaatagattttcgcaggcgggtcaattaagacacccacctttgaaaatgttagcgtcaaatttaaaattccacatcaaatttgatattaggtttttcaattaaaatattacaattattattgagataatacatacatacatacatacatacatatatatatatatatacatatatatatatatatatatatatatatatgcgcaaactttgggtgagtgtttgtgcgggctgcatggggtgggggtgggtggggtgtacgtgaggggagcgttttagttatagcgcaccctggatgcggtttagcgcatccctacatacatacatatatatatatatatatatatatacacacacacacacacacacacacacacacacacacacacacacacacacacacacacacacacacacacacacagagagagatacacacatgtcccttcggttccggccattaatatttacaacaattaatatcagggactatacattaatctcgagaagaaggcttcgcaccagacatctgcttagtgtgctttgtactggcaaaagtcatggtcaaaccttgtgccgacccaaaaaaaagtccgaggttcgaccctggccctagcccgacaacgacataaaagtccaggcctgagcctcagtgggctttctttggcttttctcattttctttcttgggccaaaccatgtgactgactgggccggaggccaccaccgcctggcacttcacctggacgtaggggtgtaagtgagtacgcggtttattttagtgggtaatggggttagctacttacacctctagctaaacaccgtccgtaccttgttcgtttaaccaacaacgcacggatcaatgacgatggccttgaattaagctgccggaccgtaagcatggttaccatgac

SEQ ID NO: 42328 - DNA, 965 bp, Oryza sativa
ttttaaaatagagaccactaaaattgaagtggtaccaagtaacaccaccaaaatttttcatctctattctataccaccaagtgggaacaaatctaccgaaaataccaccaccatcagttcatggggtagcagttttaagaaggaccagaatgtgtgccgtcgccgatgattctacatcacttccgctagtacttgctggagatccctccattgcctgtccaccacgtcctcagtcccatccccatggacggcatcaactcgttcccggtgcccctgttctaggttttggccttgaatggccagtgtggccacctatctttatcgccaaccaactcctcgacaatcttgtggtgccatgggtggcgtctcaaccgtcattgtctcattgcgcgggctggtggcggtgtggctatgtgctgaccagaggtgagggaggagctctctgcacacagttagcagccgcaacggtggacggtaacacctatgctactccttgcccaagcttgatgcaagcataaaatctgggtgtgctttgtgcagttaaggcagggggcttctcatggagtaatggtgatctggggtgatggaggttcatgctgagagaaatggaaccatggaggagcagagacaatgaagaagaagattaggggtatttatgtcatttgtcatcaaaattgagttgagacagcttggctgacggtagtacagtttatcttttagagtggtattttttagacaatgacggtagtacagtggtacgagtatttttttagaggttttagcctatctggtggtttttcttggaggtgtacagtttttatggtattacttgctaccgcttaaattttggtggtattgatgtatccctcttatcttattttcagtaaaattgagaaatttgcatatgtgccatcgcaaaaaactggtttcgctagaatgctgttgctcaaatgggctacaataaa

SEQ ID NO: 42329 - DNA, 1385 bp, Oryza sativa
agaatattttccctaagggttaaggaaataaggaatatctgcaactctgtaatacagcctgaacagagagagacaaatgtaaaactttcaagaaaaatatcaactctattaaatcctagcaatttttctaacctaaggttaatacaggcatacaacttaatgagaaaggaaaagtttattccaataaaatatcaagtagtgcaaacctagaaaatcatgagcagtgttcaattggtaacctatcaagaactagtacctggatacgctctgctaagacattattcattcctcgttctcgaatggcatgagaaattctttgtacatctgcacaccttactgcttcccaatcaacagaatctcttcggtcaaaaattctttctttcatctgataattaccacaagcctgtcttcgcaatttatcccagtcaaaattctcactgttctttttacttgtggttcttgatttctttggttttgatgcctgtgctgctgtatctggcaatccattgaaggaagcaaaaccagattttaaggttgaatcatctgctttggttgctgtttctggtatcactccaccagtggcatacagtgattcatggtcctgaaactctgatgcttcataacaactccttttgccacaatgtaataatttgactgcatgggcatccagtttttgtcaagcagctaacatataaataataagagaccttttacagtgtttgcgaggtacttagaggtattgagaagtgaaacaatgtgaaccattgattgaaagaggggcaagtatggaataaaattatcataactaatagtaatagagtaattaactactaaaagatgagcattttgattgaatcgaatacctgggtccaatcaccagaattgttaggtagaaaacaaagtaaatctttcgaacaatttaatgcatcgatcgatctgcagttctgcaccagaaaaaaagagattgacgcctcctttgttcgaccccttggctttgttcttgttctaaggtttgaattggtccactagaaggagacaaagggagaaatatcggcacggttgagggttcaagatgggccggctaggcgcaagcgcatcgggttagatctcctctgctcctatactatttacacaagggaccacctatacatttgtcgataaattttcttctaaaaatttgacagatgtaattataatacaatcgtagtgtaattacactgtaacttgtatgtaattacactgtaacttgcatataactgtagtgtaacttgtatctaagtttcacgtaattttgaatcgttagatctattacaagattttgttctggtgaggaagaaaaaaatcatagcacacacatatgtgaaaggatttgttcacacgacctc

SEQ ID NO: 42330 - DNA, 4393 bp, Oryza sativa
gagaggaagtaggagccggtgaaatcgccggcgtggcggaaggcgtcgacgaggaagcgggagcccgggatgagcgccgtgggcggcacggaggcggggacgggagagagcggcgatgcggcggaggcggaagggggctcgctgtggggggaagggagggaggcgagcgacgataggaacagggtggaggtggcgacggagagcgatttggagtccggggaggagaagaggtacgccattgggtgcggcggccggcggtgggtttagggtttgggcgccgcggcggcggcgatggaggacatgacggtgccgccgtggcgggggtggcgcgagagggaacgagtggggaagggggaaaggaagaaaagaaaaggtgcgagcaaatcagcgaatcacgacggtggcacggtgccgtcgatgagagaacaccgatacttttttttttattgtcaaatttgatttgagttttttttaaaacgattttgctatatctcactcaaaagattttttttcttatctctcactcgattttctcattcaaatttacagtgtattttattataagttacagtgtaatttatgaaacttacatggtaacttttgtaagttataatataatttttgaatcgtcgcatataagctttgaaatttatattggatttggtctttttcttgaagatatgatagtttagtgtccattacggtatttcttagttgctttttatcttttactgtgtctattggattttaatccaaaaattaaaaatttatgtgatatgatcataaaaatcttttgaaaaatgcataggtactccctttttaaaattgtattagcggtacataaacttcttaggtgcatgcaatttagtgtataaacttgtaaaatactcattttggtacatgaacatgtctaatacgtgcaaaatagaataaaatggcatgacaagaacgatttttctatgttgaacattataaattacaaattagtagatgacttgcgtgtatatagtagaaaggttatatttgtatacttagattccactttatctttttttgtttatgtaccttgcattattactcggattttttttatgcaatcattatgccttattatatgtttatccttcttagattaatgtttatatagagtttaaatcaacaacaaaatcagtaagattaatcttgcggtgcgattttgaccttgttcgcacgcacaaaacaagttcgtgcaccaaaacgaacgttttacaagtttatgtattagattgcacccatctgacaagttcgtgtaccatcgatgcaatttactcatttttaatactactaaatttgattattttgtcactctttagattgttactactaacctattacaaagttacaacggcatgtgggattgtgagtataggatggcaaaccatcaaatctcgtctctaaggctgagtgagttatgggtgagaacttctcgtttatcgttagtatattttccgaactactgtatttttttttaaaaaaaagtatagttgtttttttaaaaaaaatcaaataaatcaatttcttatatttatgttagttaatacttaattaatcaatgtgttaacaattcattatgttttcgaatcacaaacaactttagccgaaacatagttttgatctcagcctaaggagcagcaaatcatcaaacgctaaaaaagagtttcaattatatactaaacaatttgagaaagtttagataagcctaaagaggttatggccaacttagggagaaagaacttgacaggatcatcatgggaataaataatatcataagtgaagacaacaatgcagtgtttgcagcacgtgcgggtgcacaagataaagagcgatccaaatagaatagatcatgttctagctcaactcacaattagttcatgggcttgcatagagtagagattatgtgcttcgtaggacttcttgagatgttgggggtgtaaccccttattcaggcattaatagtaatctctttaccctaaaaaataacacattatgcgaaagatggtactctacattgaggtgatctcgatgaatttcgaacttaaaatatatttgtcttgtaaatagctaactgatttggatcttccacacgctaaatgtgtttgctatgtaataatatgaagtttcaacacaacgtcaaatgtttatccaagcatcccatattttctgcatctgtctttcatcatatgctagttggctcggtttgctgctaaattttgtgtttttgaaacttaggggtgtgtttgaactggacattcggttggtctaattcgtttcacgcaaaatgagatggatcatttgcgaatggttaagtgagtgctgactattacaatcttaaaaatggatttccttgattttacaaaataacttatatatatatatatatatatatatatatatttgcataaaatgtattgtttagtagtttggaagcgtgaaaatgtattgtttagtagtttggaagcgtgcctatggaaaatgatgcaagttgttgaatcaaacccaacattaggcatcgttctaaaacaactagttggtttagctacttttcactttcgtgagcatgcttcccaattttcgcaaatgatttatacatagaccttcttttatataggatcaaataaatctatttttaagtttgcaatagctaatgtttaattaatcttacgctagtgacctttatcattccatgtgacctagataatctcgtatcttcggctctttcaaacatagttttaattttgaagttgattttaagtttttttaatcaaggtctatagttatcattgttgatgggttggacccgacaacggtattttagggacatagggtacatatactagtgtatatgtaagatcagaagtaagagcacagtggagatatttttatactagtttaggctatgagatgggtaatagccttgatccaatttatatttatagctatagaatgtatcacaccaattggggggagggggaagctacatattagaatagtaccaactagtattcgatgagaactaattcgacaacttatagtcgacggctagcttttaggctttctcctaggtggtattcaacgtgccttgtagttatgacttatgatgtgatgctctccccctaattggggctttgtgtttatatagatagaaaatccatcgttcaaatagaactcggggactccgagtaagctatgggcagataagaccttatattacccagatcggatgctgacattctttcttactgggaaaggaaatccaatcttatttgtagaattaaccaaacttgaatacaccctttcatataattttagatatacggtatttccggtggatatgaatacaattacaggaggtataccttatcaataacacaaagcattgacttttaaaccgttaagaacacatgcatagtggtggatatcgagcaggctcggctcggctcgctctatctcgttatcagctcggctcgactcagttgtaagctcgagctagcttgcttagctcgcgagctggatctggacgacgcacgcgcagagtagagatggatttggaagggcgagcgaacgacggacctccatggccgacaagtcaagaaggagcaccacatagaggcgccgcccagacctcgtcggagtggtggactccacgacgaccaacaaatcgagcaggaggggggcacatggctagtggcgcggtggcgccggccagacctcgtcggagcaacgtacgccgcggccgacgaattgaccacacgcggatgggaggtgatgccggcaatgcaacggaaggagatggggagtcgtctatttgccttgccaaggcggcggcatatggcacaccgccaaggtcacaaatcagaacaaggttggagcaggagaagtgtggttaggtgtgagctgtggatggtgttgagtgctcgacgagctcctgcttctacgggcggccggctggccgatgaagacaatggccacaggtgaatgtgaggcacatgcatggtagagcaacgggcggagtgtgtgaccggtgagagagcagcaatagatcgaggggactggggaatgtactggagatcgaactacaactacgatagagaaaattctaaaaaaatacggtagagaagatggtcctttttcttgtcctttttcttattgcgctgctcagttgctgtgtttggctcgtgagcagctagctcgttataaataacgagctaaaacgctgagccgagtgagcttttcgtccagccctacacatgcatgaaaaatttgccatattttttattgctttatttatttatctacaacttatattctttttcttagcaaacatccctgttcagttttgacaggagcaatttct

SEQ ID NO: 42331 - DNA, 2461 bp, Oryza sativa
acggatcgaggaagatagaggagagtggatctggcgttggcaacctcccttcctaatgaatgccaaatccgaagaggtggcatgctccacacgatgttatcctagcggtgagctcggggacgggactgacaagagggtggcgacgagcactgcgttaagatgccatgatgctcggggcagcaacatgcctcctcccgcactgatctagggatctagggctgagcccgttgaagaggactgcctagcctccactgagctccccttgccatcttcctctcttcattgcccaaagcgtctctggctcccctcaccacaccatcgtcatctggtggagctccgcctctccgagcacaccggtgagttcacctccctcttctctccatccagtcgctggtggcctccctagctacgcactatcgtccccaatgtcatagtggccagtcgcaatcgagcggcggcatcaacttcttgagtgagaaaaaggacgaaagggaggagaaggaagagaatgacaggtaggcccaactttgttatgcatatattttttctaagagccttatgtatgggtctcacctatttttaatttttaattattcttgttttcatattgaaatggtgtgtaagcgccacataggcgctttgtcatgtaaaatacaaagtaaaagtgatatgtagatgccaaataggatttttttaagacaaagaggcaacaacccctggattatttatttgagaactggaagtacaactagtgttgcataacagtcccttaagaagggggaattacatagaggtccagatttaagcatagaaggataaagtaaaatacttcctccctcccataatataagccatggtcaaacttggcacagttttcaaaactaatctttaacttataatttctcatatactataatgtttattgcaacaaaactataaccatcttaaagtaaatttaaatatcattccgatgatattaattttagcaaataaaatttaatttatattacactccctccatctacttttgattcatatttaatcttgacacatgtaccaagaacaagtaattctacttatcatttatactaatataagaaggagttcacccctaacaatcttacaggccaaatcatcacacatgatctcatccgtccatctgccatgacatctaatctcatccggtcttgctgcagatgagttcgacgaccctatccactccaccgcccgtactcctatcgcaatgacactctgccttcgccccccgcatgctgcgatgactccgccctcctcccatccccgcgctatacctcgctccgcactgctcgcttcttcccgtcgccgccgcacaccaccacgccctgccccaccagcgccaggtggatctcctttccgcaggagcccccgccagcgccgggtggttcccctttccgccggagccctgactgggattacccgtcctccgccctcctcgcttcttcccgtcgccgtgcacaccaccgcggcctgcccccgccggcgccggggtggttcccctttccgccggagtcttgcctgggtctacccgacggcgccgaggtggtatgccctttcccaggacccgctgcggcacacgccactttggtttgcgactctcctcccctgacgacattttgatccccttcgcatgcctaagcaacccatgtgaaggacaacgcctccagctgcatcgcctccaagccatcgactgcggccggtataatggaggtgataaggagaggttcgcggtgatttcttccctcctttctttcgcccaggtgaaaaagaaaaatcccctttatatatactccattagttttggtttgcttccattactggcgcactgagacatgatcttttgattctctctagcacctacttttggttcgactggatgaggcaattagccaaacaatagcagtggcaggatgcaagccatgacagccatggaggcaagcctatacctccccatctcttctatatcattatatatgtgtatgttagagtgtacattagattagtcctatacctccccgtctcttttatatcattatatatgtgtccgttagagtgtacgttagattcatctacatctcgcacatagggaggaatcatttgatctccatgttggtaattttgtttttatttgattctattgtcaagatggattagggcatggtaggattattgtatataaaatatgtagtaatccatggtcaactctaggtctgcaacttatttttatgcatgacaaacacaggagtttctctgccttttctgatccgatatttgcatctgtttatctttacataaagatattcgaatatctttacataaatttatcgtactttacataaatttacataaattcatcgtactttacataaattcatcgtactttatctttacataaattaatttgccttttatgtaaagtacgata

SEQ ID NO: 42332 - DNA, 638 bp, Oryza sativa
attgctgcagcccactgctcttccagctctgccgacaaccacacctacaagagctacagctgaagcatcacatagggcagaggaggcatcacaggtctggtttggattcagtttgatgttgcactttgtatagctatatgcagtttcaatttcatcttttgtttctaccaccttgcaatgtgagagttggtacgagaagatctcaccaaagttcactgttttttatattgttcaaacatctaattcagcttttgtagtaaatgtacctcacattccgaaaatttatgtaaaattgtaacgacgtcaaatttgtctactcccacttcttcagccattgcaggttgaggcaaaatcttttttgttgatagctaatatggttgctcaatttgtcccaacaagtattttctaattaaagtgccaaaatatattctgtcatttagaactgatgttacttttacatttcaattggtgcctctccccaacctcatcaatttttcggttgtcacatccaaacatgtacattctcttctcatcctaggtttacagatttgtcttgccctcacctctctgcagtccgctcttgacggctctgaaggacaccaaggtcccaagccttaggttctgtaaatgatcctgac

SEQ ID NO: 42333 - DNA, 671 bp, Oryza sativa
atctattcatgaacctgcaaggcaaattgctttaggctgtgtttagatccaggggtgaaaatttttgtcgtgacacatcggatatacggacacacatttgaagtactaaacgtagtctaataataaaacaaatcatagattccgctgtaaactgcgagacaaatttattaagcctaattaatccatcattagcaaatgtttactgtagcaccacattgtcaaatcatggagcaattaggcttaaaagattcatctcgcaatttagacataatctgtgtaattagttttttgtctatatttaatattttatgcatgtgtccaaacattcgatgtgacaggatgaaaaaacttgccaggggatctaaacaggcccttagttgggtagcaaggtaaatatttttttaatataacattgatttacttgctaaccactatttgaaacatcatgtcatctatcaatatcttttactacagttgggtagtatggcaggcagattgtcagtgatggaactaatgaatgcaatcgcaaaaaaagaaaaaaaaaatcacactaacaagggactggacttcaatctgttagtttcttcacccacaaattttgctagcttccctttctcctctacacaagcctgatacagaataaacaaaactttaattagggagaagaagac

SEQ ID NO: 42334 - DNA, 943 bp, Oryza sativa
tgtgtgtgcgcgcgtggggggggtggatatttcaggtttaaaactggcagaatgcaatcatggtgtggttatataccatgggggttaaaagattaaaatctcttagagagcaatgaacatacttgtactcacaggtaaatgctctaccattaaacaatttcagtgattgagtcaacccgttagtaattctgcaaaagaaggaacgcagccatgaaaatcttacagtagaactgtagaaaataaatgaataaaaatggttgtattgaattttttactggacatgttataccttgcaagcataggtgggataggggtgccagttatcattgctaaggacgaggctgaaaatgcagtgtcttctctcaggagagagggaataagcaaatcctgataaataatgtcactaaacaggtaaatgcctttttgattgagtttatccaatcattatctgatgtaaagagttcacaatattagtattttttccaattctgtagaatatccaggccataacatgcatcaatctctataagcacatggattggctaatgatcactatgttgtcaagtactaaagggagataataacttcaaaaagacaccacattattaccttttaaaaaagtcagggtgcaaggaccaagtactacagagggaaattcaataatataatcttgtgtttcaatattctaatgcacatactgcggaaaattgttgttgccattacttattaatttgataaatccacaaacttcatttatggagggtctaattttctggcaatgaaagctagatatcgacagatttgagaaggatagaagccagtaattagatcatgcaccatgatatatcaaatgaaataggcttgattactcacaagattaggaatgacattgtatgcttcagcaacttcagttgaaagttcctgccaaaagggctgcaggaat

SEQ ID NO: 42335 - DNA, 693 bp, Oryza sativa
cctccgtctcacaatgtaagactttctatcattgcccatgtacatatagatgttaatgaatctaaacacatacatatatctagattcattaacatctaaatgaatatggataatgttgtaaagtcttatattgtgaaacggaggaagtattctactatatccgtttcacaatataagtcattctagcatttcccacattcatattgatgttaatgaatctagatatcctctccctagaatctttaccaacaatctggatattggagacaccagaataccgcatcttgcgcaacggatgaacctaccatatacggcgatggacaagccaggacatccaccgcaaactggtgaaactggaagaaaaaatttccttcgtcactgctagccagggtttgaaaaccattttccgcccaacaaattttgcgtgtgtgaatttgtttaaagtcactcaaaatttattcacattgttcgacccaaaattctggtctcgcctatagaaatgtgcaaaacgaaataggaaacactgcgctgctagctaaagcctggagtggatatgcatgagatctccgctaactaatcagcagatggctctgacctgagaaataaaatccctcaccattctccattgcaacttgttctgcatgccagtgaactccaagcaattatgtgggggttaggctggagggactaaag

SEQ ID NO: 42336 - DNA, 998 bp, Oryza sativa
tctactataccacgaaaaacaagattttctttaactgccttttcaatgctgctacgtactccactctctgctagtactaatctctgccggtttggacgccggtttcgcaacagttttgacgcagtttcagagcatgcaatgcgatggcatgcgatgcaagcatggagatcgcttcagcagttcagctaagccatgtgagagccggctgcagccgagctgacgacgagagagagccgaacaacaaccatacatactctagtccaaatggtcgacatgattgcgcggcgcggggaagaaggggatgatcattagtaattcagaagaccaaaacgctgttcttctgcgtcgtcgctgatgatctgaatttctgaatatctgatcaatgctgtttgtctgtcgtctgttcgcctgcgtctcccgtctccgctgccggcggtggtggtaaatgaaagccggagccatcggagagcgctctcgatcgatcgatcggctggtcggagctgaggacgaagacgttttacttcgtcatcgatggcttcgcttcatgccaatatcgatcgtcgatgcccgatatgctgccatgccatgcatgcatgacaccatatgcaatgcgcagagtctgtctaagagaccattgtttcatcatccgctgaacagttttgagatctgcagtataagaacatgagttcttggctggtgcccgtcgttttcgttggagcatgttggttgttcgtacaagttcaaggcttttcacaatgctaccacaatgatggttatggaaaataaattatatgtatggcaggactaactacgattaattgatatcatatcttaagactcctttgaaacgcagaaattcaaaaattagtttgtttcctacgaaattcctctaaaatgcctccatgccaaaaggggacgtaatttctcgagttatgtcaaccttacaattcctatcgtcgaaccatataccctccaatatattaatcctcaactcaaat

SEQ ID NO: 42337 - DNA, 1060 bp, Oryza sativa
taaccttaagtaaccagttttcatagacaatgtttagtttctgccacaactctattttgcataactcttagccaactggctcacatgccataaacactattttcttttctaactttgcctaagcttagtttgtcattttgtttgtcacaaaacgtgacaaaactaagtttagtcgtcttagtagaaaaaatatatgtggtaatattagttttcagtcagacaggctagaaatattttaggatgggcggagcaatatctatatcatccatgtcatcttgcaagtagtatcattatcatacccaactcttccaatgcatattctactactctcatcatatcttggatatcgtgtaaaaatcaactcatgtagaatcgagtttcatcatttttcttccatttaatatgagtatatgacgtcatatcatattttcatttaatcattgcaagagatgattcgaggggatgggagataggcgatcatgtgcggaagaaaagcatctcgtcactctttgctcttctagcaagaaatgcattattcaaagcacagcatttctctactttaaggcttctctctactaatgctatacttgcattggctgctactcttctgctcctacaagagggaagggaaggcatgtgttgaacaacttagaagcacacacgaaaacactcgttaggaaattgacgccattcctgaggattttctttttcgtgacagttagccgaagcactcgtgttcacaaggtaggtgtgaatattatatttcagtttttttttcccttccagaaatgagttcttttaggactgggaaattattttgaaataaagatatctcaatttgttaagtgcagtactaattcttctccgtgcatctaggaatggagtactgtagtggaagaagtgctatatctatatatatatatatatatatagaatatatagtatttttacctgtgaaatattttcttgctggtgtagcagtttagcgatttttgctgatgctaagcaagctaacggaatattgttttatggtcttaaagaaacgatgaagctcccgagg

SEQ ID NO: 42338 - DNA, 640 bp, Oryza sativa
ttatgcacacttcttccatgcacaatacatggaggtagtacaacattatttcaaagaacaataagtatgtttcagatagttgtgcttgcctaattgtttggcacactgtttaacaaccatgcatatgtatgtatattctgtgtcctacagaaaaaagcttccaaatagcaaaggaatgctacaaaagtttgtggtagtacttactcctattcttcatgcatgcacactttcacctaggagtactatgaatgaaaatgttttttgataatcttgtgagcaggcattcagcagatggatgatcaggagcaaacatttgcaggaggcatgcaaatttggacagatatgcagctgcaggatcatcatcatgagtgcaatggaccctattgcagatgccactcctcatcaaaacatgcaaagggctcactgctgctgctacaccaccaccaccagcagcaacagctgcaaaggtcactgcctttttttcttttttggcccttttccggaagaggattttgatccctgtttgcatgtcactcaaatggatataaaaaaatttgaaaaaatttaagaatatgtattaatatgtgatatatcactccacaaatatgcaagtaaaaattcaacttctatatctcgcaac

SEQ ID NO: 42339 - DNA, 984 bp, Oryza sativa
aatggtcaaacgttggataaaaagtcaacggcgtcatacattaaatatggagataatgctttcttaatatcggtgtcaacctaaaacaaagtctacattttaggacggataaagtttataatacacacttggcacgtagctagcgttggtgctggagtacggttggcaccgccgatgacatgcgtgcatacgtccgcgagacatggtgtacaagtaggaaggaactcttcttcttcttcttcttctttcagcacgagaaagtctctacacctgtaatggcgcccgtgacccgatcgaagaagaaagatgtgaatgtatgtagtacgctgctttcgtcagagaaattaaccaacgtcaatcgaccactcaaccacttgatgtgttaacgtacgtgctgatctatcaattgatcagggtaacaggaagtagttttaaaggagtaggagtatcaaataatccgtgacgtcatcatgtgcgtaaaataggacaatcggtgataattaattgattcgaatattgatcgggtgatgcatatatagcagtagtgtctggatgttatcatgcatgttaatgaactgatttggactggagactacctggggtgcacgccggaagatccggtatactatatttctctcctgtctcctctcgtagttgtagctttcatccatgatgtgtagcctgattgggacatatcctgggacgatgaccctgtcattgatttacctaagtagcgagatcggctgtagcaaacgtcactgcaaacgctgctttccgtgaccgattagttcgtagtagtagtagcttagctgatgatactcctagcggctcgcttggtttgtcaaatgttttatttactacccgtcaaattaattcgaaacagccgtcaaacatagcagcaaaaaccatagtagtgcgagcaaatggcttacgtacgtcgatcgatccgcgagtttaatctgcctgcccggttttgaccatggg

SEQ ID NO: 42340 - DNA, 897 bp, Oryza sativa
ataagatactgtgggtgtgtttagttcacgtaaaaattgaaagtttgattaaaattggaacaatgtgatggaaaaattgaaagtttgtgtgtgtaggaaagtttcgatgtgatggaaaagttagaagtttgaagaaaaaattgtgaactaaaccagatctgtgttaaaaatagttatattttgatagggaggtagtatagcgtatcagccggatgctgacattcaatacaggatgctgatcaccctagcttataccgattgagagatattgtttgagatttctgtactatacgtacactactcacgtcgtcggtcgagccgagtcaatctctgcttcacgggaaccagctgcctctcttctgtaggagtagctgacaaagcaacggtcacgcggtctactgtccgatcgactgactggctgtccgagaccgagggcatgcaagaggtcagcgccattaatgtgagatagatatatggtcaacgcaccggctccaatcccacgcagccgatcgatcacgttctggtgggtggccaggtagcgttccatcaactggtgtagtaaggcggagtaattgcgtttgggagtacgtttttctacctaccaactgcaaatgggctgcacaactgcaagtggtcgggtgacacggccaggtagagaaggaataagttttctttaggtccctcatctaaacttcgagtataaattacatccttgaagcataatactagatataatgtgtccctcaacttatagaaccggtattcctaagatataacgtgttcctacttgtacaacatctcgtgaatgtacatatgcatgcatatccaccggcggtgccgactgtactccaacacgaacgctacgtgccaagtgtgtttcatacgtcgacctttaca

SEQ ID NO: 42341 - DNA, 1601 bp, Oryza sativa
ttgtaagttttttaatagttgcaaggtgtatttaaataacaacaatcaagtgtacctggcgcttgaagtatgtataaatttagatagtacaaatgtaggtatacaactgactagatatatgttgtgcctaaagttttcttttatcatataaaagtatcgcagcaacgcgcggggtactcattccaattttcccttaaataaatgatccattcatgccaaaatcgatgtgataaaaaaaatttaactgggccgggctgagatctacaacaaccggacgggccaagagtccatgacaaaatttccacttggaagtggagactcaagcggcccaatacatacattacaccgtctcttccaaatttttctagctacgagtagctgttagctgctatgctgtacgtacgaacattcatggacacgaagctactaggtgtacggtcacaaggacaggtccaagctgacgacgctgctaagcatggccggagtactccgccgcgagcagccaccggcgacgaggctcgtcgtcgacgacggcgacgagatcagccagttgctgctgctgccttcgctgcagcagtatgcgccggcgccgccgctgctccggcaactgagccccgagtccagcgtcagtgacagcgagagctcgtcgccgtcgccgtcacgctcctcctcctctgccgccgccgtcgtacgcctggccttcctcccgtgcctgatcgcgccgttctccggtggtggcgtcgccttgtgctcctgcagaaattgcacttaatttgagtgattgagtctagctaggagaggaagatatgctgcagtgaccaaacgataaacaagagaaacatccgggggttttctggctagctgcataaggtggtgagctagatgacttgaactcgaagcctcaccccttctaattatttaatattaattatttaatattagattattctctaatattcgtgtctttaccaaacgacaaaaaaaaaatgcacacacaaacactttttcagtgatgagctagctatatacttcctccattttaatttataagatgttttgactttagttaaagtcaaactgttttaagtttgtagaaaaaataataacattttcaacccaatttcaacccaagataaatttattatgaaaatatattcaattattgatttgatgaaattaatttagtattatcaatattactatatttgtctataaacttagttaaatttaaaacattttgaactgaaatggagggagtagctgtaaatatacctcgcgagagccacgccttgtcgtcgtcgccatcacgacgaggcccagcagccttggcgggtcgtcgtgtccggcaccgtctgcggcggcaggtggtgcgccgtgcgccatgggcgtgtagtaggagtagtaggcagctgggacagggaggccggaggacacgtccctctcacatattccttggcttctgagaaagcctgtttgggtgctcgcctctgctcgtctcgtctccatctcatttggcctgcattggtgcaaacgaaattatttttcttatagtactattctagtatgaggttacactgcacagtgtttaagatgatatctcg

SEQ ID NO: 42342 - DNA, 611 bp, Oryza sativa
ttttaaaaaaactaggaaggtggcccgcgcgcatgcgcgggcacttataatattaaaaggtaagatttttattgtttgtttaaaaattttgtctcataaattaagggaaaactaaagtttggatacttttattttgcaatattttttgtaataatttaagggttatattttttaaggtatcttgaaaatccattcacaaacttttgagtaggagatggattaagtacttacgacttttgaatcatgttttctttctcgagtaaataataaattattgcttgtagtatggttacaaatgaaaaatacgggagcaagatactcaaaatttttgtgattaaatcatctcatgaagacgcatgacataataagaaagggagggaagcatatacatggagaaaaaaataaagggaaaaatgaaaatgtggaggagaagcgtaggtacccacgtacgtagtgcgtaccgaaggtggagaggtgggacctcgtagtatttagtttgttataagatcaatttaatctaatggtttataatattggacccaccgatttaagtaaaaatcaagtaatacatactttgttttttttcccttagaatttctaatattttctct

SEQ ID NO: 42343 - DNA, 2456 bp, Oryza sativa
gcagtatgcaggtggtgtgtgtgtttgtctgcgtgttagtgcgtttctgcttagaggcccgtgtaattaacggaagctggcggtgtgtttgggtggttagtgtggccgcgtactctgctcttcttggtttaactaggagctagtactactatttttggtgaatgggaaggcagattctgtactattatttctaacaccacgatttgcaagggggaaagagtgcttctttgccgttttggtgcttgctttcatgttcttcctctcgttggcgttcagcgttgagtggcaaagagtgccgatgcctgtcataagtgcaactcgagtcgagtgtatgcgcagcgaaattagtgaattagtgtgaagtggttagtactgaatcgaaagcttacgagacataagagcaagtttaacagtataagccaactaccagctccaattcatctatagccaatctaatagcttattcatacaatagttatatactactccctccgtctcaaaaaaagacaaaccctgatttccgtgtccaacgtttgaacgtccgtcttatttgaaaaaattatgaaaaaaattaaaaagacaagtcatgcataaaatattaattatgttttatcatctaacaacaataaaaatacgaattataaaaaaatttcatataagacggacagtcaaagttggacacggaaacccagcgtttgcctttttttgacggagggagtacactattaatatttggtcccacctgtcatacacacactgcgtcttagagtccgtactacaactgactataaatctgtagcccgctgctcttctctttccttatttatcttcttaaaatatatttacagctggcttatagcctgctattgtaactgctctaatattcccatcctcttttactccataccacgatgaaaagaaaaccgacaaaagagtatgccgaccagctacagtcgacctagttggcttgatgcactgcaagaattcgagaaactgtaattttttcaggcactggtttatgctgggatggaagttttgaagtcagtatatctgttttctctgcaatcctactccagtggtatcatttttttcttttctttctactgcgttcgagagaacttcaattcttcaaaaaatacacctatcgttcaatcatgaaggaaacacaccaaccgcgctcgaagaaaagatggtaatgcggttaccgggcttggaagaaagttgaagcggagttggtctgaattctgaaaccgagctaaagcatgaaggccctttccacaggggagttgataggggcggcgactgaagtcacaaatcactttgggcgaaaggcaagacaggaagaggacatgaacccacaacccaccgggttgttactgcagagaaagcgaaggaatctgccttcccatcaatccattcctctccgtaagctctgaccttcctgacgtcaaaaatcatgaatgccgatgtgcaacggctgtagtatagtccaatcgttcttggcagggctacgatcgagctgatcagctgagaaagttgacggtactctgctcggactgaaacattactgctaggtcaactctaattctatgccctttttcctaggactaaatatttttgtaaagaattcctaaatggagtcctcctagaaaattttccattccttaccgaaaggctcgaactttgcagaactcgtttttgtcgggcagaaagcaaatcccggcagtaattgcagccatgccactgagaggctgacaggtgatctccatgtaatgtaagaatatgaggcgtgatcctacgtacgttgctcgcatcgcatctcgcacgctgccatcgtcaaccgcgaaagcaacgttgcttgttcggccatgccctgacggcatgaaggctgccatccgaaacgggcccaattgaattggcctatcgttcgcaatgattcacgaatcttgttggggtgcaacggcgacgatctgtcacgctcatgcacgataccagttctggacagtggacactcgtgaacatgcatggagcagcagattcagctcaaacacaaccaaagcgatcatgaaaatggtccgacatcatgaaaatgggccgactggaggagcccaaggagtccagcaagtgtcttctcaaaggtaaggagtgctcctttcagcaaagcccatcgtatctcttagtattatattacggaataataggatgtgtactatccaatcttagattatattttagaataaaaaagtatttaagattcggcttaattaatttatttaggattatatgcaaaataaccatattggttgtccgttggcgttcgcttcatgaacaaataatgtcagtgttcgttcgaccaagtgacgttgttctcgcgtggtcctcgttgccggtggcgcggaggccgagcgcatcctagacgcctggggacgcggcgatggtgttggggctgcatggca

SEQ ID NO: 42344 - DNA, 3239 bp, Oryza sativa
ttgggtgaaagaccgaaagtacattttgcgtccgttaattatcggcctgttgcttcttgcttgtaaacccagttgtaattggctggctacttgttggagtcagtctcagtccgcacagtttatattgccactacactgtgatctgacagtccatgtttggttcctttctccaatttttcatcagtgattgatcttccggccgggctactttaatttgtatattgcctgcatttttgttggctttagaggataagattcgtgcgatcaccatgggtcaatatggtcgatcgatttcctctgcagaatttcctgttatagtattcgtttggtgagccatgcatgcgttaggtgagctaagttaacactgctttgatttcgattacgtttgagcgtcgccaaacacaggtttattgtcatggggctgttgttaccttgggtgtggcacaaacggacaggatctctcactattgtgatctgtaatctgagtaatctcaatgaagcaccacgtgttcagtgggaccagggctataaatttttcttggacccgagcgcggttcattcaatcagaacaaaaacgttaaaagtactgtagtactacgctaacctacctaaactattcacagaatcacagttacacaggttactggtaacctgctgtcagagtttcaagagttagtgaaccagaaaggtcccaagccagcacagcgaaggtccattccttccatggtccacatcattaagagctcatctcagagctccacgaattgccaccatttcctctgcatggattattaatccatggttgcagagttcagagggaggcgtaaattttgggtggcattcctgctggactggctactccgctatgcacacagctccctgcttaaacagttaaactcgcaaagtgtgttaattaagctaaacacgagcctaccaaccgctaatccactgtagattgcttagagcagacgctgccgagtacggaaccacgggcccaacttactgtacgtactcgatatgctccactacgttcttctcctttctctctttccgggctgttaagctcgatcgaatcgacgatcgcctgactccacgtgaaaccgaataatgtacgtacgagtagtgcatactaataccatctcaaaaaagaaagtgaaaagaataatgtactacaagtacagttacgggccgttcgagcagatcgcgtttattttctcgttttctcaccgcttgtgagaacgagaggcgcatgagccggtgacaatgtggagggatctgggtggttctgcgcatttgttcttcgtgcttaaccgaaagcgcggcggcgcctccggtgtgaatcctggagtagcttattgtcgggccgtgcaggcatcccatgcgggatgcggctagaggtcaaagacgagagacaggggctagttgggggttcgtgccttttgtaggcgggaaagagcggcggtgacggacgggaacagcggctttacgcgcgcgttccgtgttatgaggcgtgccggatgcggtgtggcagggaggccggatcgaacgcaaagccgcaaattgactggccgggctttcctctcaaagggtttctgtgcagaaagggtttcgctttcgtggctcatatcatatgcatacacttttggatacaaaagggactctacaaaagatgatttataggatacgaagaacttgcgcaccacaataagaaaaaaatggcccacggcccaagcctggtaacgagcctgtcactaggaatttttgggctaaaagctagggtagatccatttacccactaaacctttcgtaaatttatcctaatgaatttttaaggttgctctaaaaatataaattgaccaaacgactcaaaccattagaacataggtttaaggggttcgacccaaaatgactttatatatataaatgtttcaatttgtactaagttgcttctctatataataaatcattcctacaaaattcaaaatttaacaattttttagagtgtgaaggcgagtttaaaaattttgagaccgagttttacacacatgtaactataatttttggatcttagtaatgcatcgtgggccacgcatgtctaaatggcttaaaatttgaacgaagttgcttctccatataataaatcatctctacaaaatttaataaaatttgataagtttttataatgtgaatgtgagtttaaaaatttcaggcctgagttttccatacatgtaatacgagtttttttgtctaccaataatatagttgaaccatttggatatccatagataatctattgatataacatattcttgatggattgaccctattaaatcatggatcaataaacttacttaaaacggtttaggttagatccatatcctaaccattcccatcctgagtaagtctggcagtctgctgggccaaagttgcggcctctagactgatttcgatgtgtcaaaccttgttggtagcagaactgcaagttcttgttaggtttgggcctaaatgctcttttacgggctggactcgagaaaaggaagtccgtggctcatgggccaaatttatctcatgtctcgtgtaatttacacttgcacatgtgcaaaactgcaaatgaactgctaattcgtcagttcatctgcgtatcaccatcacggagatgctcccggagcaccgcaagtacatctccgaagctcacgactccggttagcgcgccgctgacctcgtcgacgacccagacgtacccgactcggtgcgcaagagcctgcgccatgactgccaccagcgagctcccagcatggcatgcggcgacgtccttcgtcgacctccacctgaagcttcccgacgacgacctccttgcgcgccgcgcacgcccaaaaggtgagtcctcgtcggacgatgccgacgaggaagacgatggggataacggcagagacgaggcagcgtcgtccgcggcgtccatgaggtcggccatggcgtccatgcccctgcccttgagctgcgccctgatggagcgaagcaagaactccggcggagacaacgagcagtctatgtacgtcatgacgtcgccggcggagagcgcggcgaaggccgcggacgccgactcgatgtcgcacgagccgagaactccggggcagatctcgccgaccagggcgtcgtcatcggcgacgacggccacggcggtgccgtccgcgatggatctccgcaggagcgggatggcgtcgagcgcgtcgtcgtctgcg

SEQ ID NO: 42345 - DNA, 1088 bp, Oryza sativa
cgatgtttggaacgctgttgcatgtgtactactgtggagtaacagttttcacagctaccccacccatctgcatctgtacagaatgggaggtaggacgcctgatctacgaccaggaagttccatggaaagtgatagactgatagataagcgagccgagccgcgctattcggcggcatcttgcggcgccgtgcatcatctcctcgtcgcgtagcgatacggccccaaccgccgcaatgtgatctgccatcgtccgtctcgataggtacggcgcgtcgacgcgacaacagctgtgtttttcttttttttaactcgtataatagctgtgtttttggcacggcaggtcgacgtgttcttcttctaattaaaaccacggggctatatgactagattatactcatactttgcgtctcctgaacagcttgttcacgggctgtgccccagtgtccgcgttctgaaaagaattggatctgtgaatctgtatgagaaatattttgatattttgagatttggacgctactgcgtcgtacggggacaggacgcatctttctctgaattcgccatcgcgtccgccgtggcagctgatcaggtaaatagtccaaccatgcatgtgtgccttttcttgcacagctgatcaggtgactgagtccaaccatgtgcggcttttcttgcatccacctgcttggctgcttgctatagcgaaagacaaattgaacaagtattggtactagtagtatgtttgccacaagcccacaacagagtggttgaaggttgaaactccaacgaattatctcaaagaccatcgtgcttgcctagttgcctttgctttcacagtttggctagtcaaatgtaacaagtgctaatacatgactgagatctctcccttcagtcaactgacaggagggatgatacatcaatctaatttccacgagggcattggatttgctctctgttggggaagcccatgcaacttttgcatggatcagtttttggcccaactggattttgtttcattcacgattatatttgggtgaccaccaaactgctaaatggcttgtgcctaatccaatcagtaaagttgtaggcccaat

SEQ ID NO: 42346 - DNA, 616 bp, Oryza sativa
ccccgaattgacgtggtgggataaccgtaggccgtagccgcgtccatctcgccctcgccccaccacctccaaaattgatggacaccaaaataaatccgcccccctcctctcttcccccaatccgatccgatcagacgcctagtttagggtttcagagctttctccccacctctcccctcccctcccccccctctctctgtcgtcctcttcctcccgctcgcgtccgccattgacgcggcgcggcgcacgagctccccctcagatctgaccaatccacaccgcgaaccctctcacctgacgcaaccccgaatcttgcctggaacggcgaagaattcgaacacaaatctgaagcacaccgtcgtcactaagaccacacactacatctgatttttttttgtttctccacaccctgattgtttctagatttttttttattctcgtttcggacgcttcataagaacagatctgcgagcgagttcgcggatcttatctatctgtgtgagaaccaagacccttttgttgcctgtggacacgatccgaacgaactttgacctgaggattcgtttgagatctgtttgctgctggtctcgagagaatgatcaggtcgatggtatat

SEQ ID NO: 42347 - DNA, 639 bp, Oryza sativa
aaaacaaaaagttagaaaaatttatgtatagaaatactatatataaaaaatttgaattcaaatttgaatcggctatgtaaactcttgacttataaactttggatctataaactttaggtgtataaactttatatgtatagaaatactatatatagaaaatatttgaattcaaattcaaatttgaattgtgtatgtaaacttttgacttataaacttcaggtctataaactttaggtgtataaactttagatgtatagaaatactatatataaaaaatatttgaattcaaatttgaatcagatataattcaaattcaaatttgaaacgggtatataaacttttgacttataaactttgggtcaataaactttaggtatataaactttagatgtatagaaatactatatatgaaaaatatttgaattcaaattcaaatttgaatcggatatataaacttttgacttataaacttttggtctctaaactttagttgtgtaaacttgaggcgtataaactttcgcaaaatctaaatcgagagcgctctcgatttagtcataacgagcgacgctagccattgtccagatatgtgtcttgaagaatcttaatttactacagtactaattgatcaagcaagtagaa

SEQ ID NO: 42348 - DNA, 1320 bp, Oryza sativa
agtgccgaacgccgaattgcctatggggatgatgagatgactggtgtcccaaacaaatactagtatcaaatgacccaaccatgagtgtgtttaggtcacgttaaaattgaaattttggttgaaattaaaatgatgtgatggaaaagttgaaaatttatatacgtagaaaagttttgatgtgatggaaaagttaaaagtttgaagaaaaagtttgtaataaaccaggctcatatactactactacaggtctctcctcattccaatcttgaaattttcgggacgatcgggcggatcgcggctccaccgcaatctggtatcgtgtcatttcaagctgtttgtggtcctcgtccatccagctttttatgcatatacagctctggagttgtatgacaaatcaagccactgtttcataaattccgaccttctccggcgtcctcgatcgccggcaccggcttctctgcatgcatgtaccagtacccttcctaccaccaaattaagccttgtcagttgtcacacaagaattgatagtttcaattgattaatctgtaagaagaagaagccaataaacaaattatggcttctgctatcagctgagatccaacgacttataatttcaactgcctgatgcagcaacactactgcttataacaagtatatataatcgcagcacgcaggcagaaggaaacaagggaaccaacataaatatctcattcaacagagcacatgtagacatacagtacatatccagcacacacgccatatatgcacacaaagatgaaagctgagaaaagcagcggatccgtgaaatgacgcgcccctacatactgcgtcatggcaccacaccaagacagtgccacatgatcagcacacagtccatctgccaaaaaaaaaaaaaaaacgttggactctgcatcacagattaaaaaccaggagtagtactccaccagctacccgccacccaagccagcgatgagcgatggatacaggggttgttgaccccagcgaaagaaacaactgttcaatattgcaagcggatcttgttgcaccagtaggccccgtgccatgccacctgcagcaatgacatgatcagccggaaaaatagcagttcgcttaacagtgcattgtttaatttgtagcgcagttacaccgtattttagatgcttgtaacctgtagccagggcccagtggtggtagtagatctaaggcacgtggtgcatcggtgagccgaacacctgaaaagattgttgcagggctgaggaaaatagtagaaaatcatggggacgcagtgtttggttgttctaaagaagataaaaggaaggg

SEQ ID NO: 42349 - DNA, 917 bp, Oryza sativa
actatccacgcaaattgctcacatgcaccggtccgttgatctagttcagttcggcctggaccatcgcaagctcgcaacctgctggtatcgaatgtactgcgggccaacctgcacatatatactatcttattaagaggagccttcaaatgctcgcagtgctagctcgatcctacgtacggtacgtcaaaaagcattgaaaatttcttcccgtacatttgtctacatggttattgagcggattgttattcgtttcagtaaaccggtaaataatctgagaagaatgaagaagaatcagcagctcgcgtgcacgctcctacgtcgtcttcactgtggtggatggacggcgtcctggtagtttccgtcggatgcacgaagcatctactactcctctctccacctctccttttttctgtaacttttgatacagctgcgtcttttttgttgttagctgtttctgcacagtgacgatactccaaacggtcagtggaatttcactttcagttatttggaattagatcctccaaattatttctccttgcccttcagaattaactaaacgtcagcactatagtgcccgcatattattggttaatttcactggatctagaatagtgaatatcaattccatttttcattttgtctcatcgccaggcttcaatgtttagtcatgagggtgtgtttttcattgggtaaaactagaagccaggagagtttgagcaggtcttgaagaggaggacttgtgatcaagcccattcttcagaggcctttttgggcccagtgagtaaaatgtttccaaatgaatgcccgcccaacacttctacctacgtagtatagtccagcattttgcaattttgggaatgttcactttgatgccacaaaacaaccttattggcaagttatcaaaattttagcatagt

SEQ ID NO: 42350 - DNA, 786 bp, Oryza sativa
cgtgcactccaaactccgaaatacgaggaaggccgtgctagaattttgctactgcaacgtatacgagtcattttcaacccaagacagcgttaaaccaatagttttggccatttgttatgtcgaacactaccaacctcagttttagttttggacccttttcatgtcccggccagtagatggtagtctgtcttcatccgacagtaacgcgatgtctaagtatatatgattgatacagaaaagatatgtagatatgttttcgttgagtggttggccaagatcggaggtttggggccatactagattcgcaacctattcagagttgcaaaacccctactggattggcctatgccctgagtccctgatttgtatatggcgcccagtcagagctctcacactgaaaaggccaagactgcaggaactgccggtcgccgtctcaccccccgacataatcacgcagtttgcttagcagcggcagagcgatctagacactggacctgctagagcgtgcgctgcatgtggacgagtcatgagcgagcgaacgatcagcaaaggctagatcacacataaagcaaaaaataactaaactaaactaaaaatgcacagctcagttttgtagctgaatcagcagtgacacaaacggcaacgggggagttcagccgggaccagagcccaccatgacctgtcggcaatttgcaataatcttttgcactgtctcgatgctaattggcagcagggagcagccatgcacgcacatcctttccactggaacgcacaaacctacccaaa

SEQ ID NO: 42351 - DNA, 887 bp, Oryza sativa
ttcctgcagcccatacaattaggaaataactgaaattcggaattaaaaataaggaatattagaagaggagactagagtccatatagaaatacaattaggaaataaaataaattaggaatattagaagaggatactagagtccatatagaaatacaatttagaaatagcttaaattcggaattaaaaaataaggaatattagaagaggatactagagtccacatagaaatacaattaggaaataactgaaattcagaattaaaaataaggaatattagaagaagagactagagtccatatagaaatacaataaggaaataatataaatttggaattaaaaataaggaatattagaagtagagtataaagtccatatagaaattcagaattaaaaaataagaaatattacaagtagagtataaagtccatatatgaatttaaaactaactaaaattcagaataaacataataaaattaaaagtagggtttagagttcgtataaaaatacaatttacaaataactaaaattctaaattaagaaaaacatgggaagaagtgtttaaagtcaatatagtaatacaatttagaagtaactgaaattttaaattttaaatttaaaattaaagaatattgaaagatgagtttaaagtccacatacaaatacaattagaaataataaaaaatcagaattaaaaaaaatattaaaatacaattctagagtccatataggaatatatataatttacaaataacaaaaactggatattaaaaataattaataactaacacttatataaaatacaatatgaatattacacattagtagtttcgtaatttaaaattatattgttattggaatatattttaataatataatgagaaaacata

SEQ ID NO: 42352 - DNA, 1546 bp, Oryza sativa
gctttgctatccttaatgatgttgacaccgcgcgattagagactagctaacatcaacgtcacaatcaaccagttcgaaattaatttgattggatgacgctggtatatgcatgttggcatccacatgatcgactcactatagcaatacgtacaaataatcaactcctgaaggtatacgagctgttcgaattcgatcggatgaattcaggatgggcaacagtttgttcacgttgctccagcgcagtgcgttatttctaaatatgaatgcaatgcaattggctccctttcacggggtacagttaggataagattggaacgctctgcatggtgtgccaggtagcacacgctgcgcgcctatcgaaatccaaaacgtgtgtttgtgctttgcccgttttatcgagaagacgagtactcgtgtgcacaaaaatatatatattcaagacgtgtgggtctagctccagctaaaggggtagtactatcttaagctgctgttttaatccggagttacgtactaaattataccatatcgtgtccacgtgtaccatttggtgcgttatcaattttagtacgtactcctcaattcacgtggccagcactgtgctctgcgaacctgcgatggggcacttgtggaggcatgtctcagttgtggcgttagctgatgacatacttgatgaccgcagcttagtgagagaatcatctcacacgcgaaactaattgaaacggagtagtgttaattactccatccggactgataatacttttttttagacgagagtaggattaaactttaaaatatttaattgtaaatcatttttaaaatatttaccttttaaatctggtgactatactcttgtctaaaataatactctctccgtttcacaatgtaaatcattttagcatttaccatatacatattgatgttaataaatctagacatatatatctatctagattcattaatatcaatataaatgtgacaaatgttaaaatgacttacattgtgaaacatagaaagtaagtattatcaacccggagggagtatcaacaagccgaagaaaatggaggggagtaagggaatatcgaaagtagaagtgattagtaaaaaaaaaatgcagttgggtactctgggacagctagctgctttacagagagagaaggggttttgacgtcatgctggcatatgtgcttctataaaaaaaatacgtacttttatttttcgaaattagcatatgtactaatgtacgtccccgtggatgcagcgcgacggtgacgtccgcaaaactcaataagcttacactggaactattcaagtttgatattatatcagcacacagatttttcaggagattttgtaggtgcaccatatttactagggtaaggagtagcttaactcaattataagttcttgtgactttattaatattaaaatatttttgtaaagtctttcaaaggtacttatataaaataaattacgtgtttatagagattagtgtacgagagtgtacatgatggtggcgtacgttgtgtgttttaaaagaagaaaacgg

SEQ ID NO: 42353 - DNA, 797 bp, Oryza sativa
ttcctgcagcccttatcagtgtgtccaatatttaataattcctccgtcccataaaaattaaaattctacctaatttaagacattaggagaataaataaatgaccataataaccttatttaaagaacctaatacacacacacattccacgtataaattgattaaaataaattttgagacaattaacccacataattagtagtacatatgtactctagcgttaaatagatttgactaaaaatggtaggtagatggatttggaaaacattttactaaggaaaactacaagacaggttataacaaaaaatattttacacaaaatactggggggagtggtacaatatttcaccatcaaacttctggaagactaaaattgattacgtaaacagtgccacctggaagaagcacttcgcagatatttgtatggggctaacgaggacacatggaattgtttagcaactctttcagtaaggtggtgtttgtatcaggaacttgactttagtctacactaatttagagtattaaatatatactacttactaaactaattatataaataaaagctaatttacgagataattttttaaagcctaattaatccataattagataatgtttactgtaacatcacataggctaatcatggattaattatgctcaatagattcgtctcgtgaattagtttaagattatggatgtactttattaatagtctacgtttaatatttataattagtgtctaaacattcgatgtgataggtacttaaaagttttaatctcatctaaataagtggcatgg

SEQ ID NO: 42354 - DNA, 700 bp, Oryza sativa
aaaaactgaattggagatgcgggggatcgaaccccgtgcctctcgcatgcaaagcgagcgctctaccatttgagctacatccccacttgaactttatccaaaaatcatatgatctttacaaaattgtccagtacctgtggtcggatcagatgagcctttacgtaaagaacgtgtaccattttctgtagactctgaagtttgatccagttgcaaatgctttgcttggtttcatcgacataacgaaactgacgtcacaattcacctagtcacctctccgtcggtccaggctgtgcaaccaacgacccgcggcgttacacgcccacgcccgcggcgtcggggagtgacgcactggtcgttccttgcggcctcgaagcagccggatgcgactcctaggtcctcgcggccgcaacgaacttggcggccggtccatgattttaattggaataagttcaccaaccgttaatccactttacatacatcgagtctgtatgatatccctaatctctaatattagaaatctatatccctaaactatataaaatcatataaaaataagatcctataacagtatagatgtctaattttactgacgtggcattctagtcaacatatcttctagattatgggactcacatgtaagcgagtaacgtggggtctacatatcttctttcttctattttcttctcttctcttctcattt

SEQ ID NO: 42355 - DNA, 729 bp, Oryza sativa
ccttagcggcatctctcttgtgtacacctccaggactgcaatcaggagcagatgtctccaaggtacaaagataagaaatgcagatgcagcaagaaatgccactgcgaccatttcagttgtctgcataaaacaaaaggagattagcagttggtggattaatctcctgtaaaattcaaaactacttcatttacaacgctgtggagtaatccgtaaaaacggttgagaaggtacaaataaatttcaaaggtcagagcttcaggaacaagttcttaaacagttcatgtctgatgaatcaaatgatagttcatcatttgtgtcaaattggacaacaaactataggaagtgcatcttagatgtaaagaaatttttgaaccgaaggaaagcaaatatactaaacaacaaaagagatacctttggaacagctgcaaacaagacagctctgaactttagaagaacaatatttacagactgtagagtttcttccaacttggatatagcatcctgcaaggtcaagatttgctcaacaggatttttacttggaggagttcttacttcaagcactcccaataattgctcccttccattgtacttatgccagagcataacaacagcaaatgccaaaaaaaatgagggcaacatgtaagcaataaatcccctacataacaaaaaggaatatgttaggcaatgagatatttctaagcatactttctaagatccaaagggctgcag

SEQ ID NO: 42356 - DNA, 561 bp, Oryza sativa
ttgcacctcgtgattaaggaaagaacagtgcaaaaggatggtcagtgttcctaggggttcccatgggtcattgtgtttcctagattacttactactactggttgctgattgataagttggtcactttatcttgaaagtgccaatctctagctagtagtagtatatagctttatatgagttattgggaattatatacttggttacatattagaatattgccccaaaaaatgattgcttagctctgaactgaaattgagccaccagtttctgaataaaaggcttcttcagtgaactggtagtggggatcgaaccctgatcttggccaatggatggattgttcacgaccgtgaccatgtgttgattctgtgtaagcttcttgcgtagttgacttgtattcctttaaagttcaacctgatgatttagactttcagatgtcttcaaattcctacatgtacctttaatcgtagtgcataccgtcacggcttcgttggttaatctttctgcccattggtatgtgattccttggttgaaagatgcagcaaggaactattgagtgtgcct

SEQ ID NO: 42357 - DNA, 1205 bp, Oryza sativa
atcgtattcaaaatccaaatcatgaggtttaagcattcaactaaaaaagcgccagctaatatcacctaattagctcggaaatactaaaaaaaattccccctaaatataataaggtacctacaaaatacaaatgcagcagcctatttcaccgatatacaataccataatctccaacacgtttgcagttatattaaacgagaaaacgctagaacacaagcctatctaataacgccagaaattagcgatacgatccggtctaacctttgcgaccatgcgctggaaggtgatgtcctcatcatcaatcttgtccttccccttcccccacttcctatctgcagaacccaaaatcaatattgaacaaccgaaagcgcacagaacatcaatgggggagaataataaaccgggaagaaggaaggatgcgccggaatcgcaaacctttggggtcgctgagattcgtgtactcgcggacctcggacctgacatggctgccggcggagaggaatcggaaggtcggaggctcggagacctaaccctagctcctgttacaagaagcttcgagacgtgtggcttggctgatgcctctgggcttcccgtttcgcttgtccgaagtgacgatggaataaagagaagaggcgatccacgcaggctcgagacgaagggggtatgatgttaggcaggccggaatcatccgctagagcctcaggctgggcctgtttatggaaggccacatgggccatggcccagcttgaagccacccatctcagcatatttggcagaaaatctaattataacgcattttctagagataaactttaggtttttctttggaagggagtgttgagttgtgatccaaattcatttgcacttaataaaaaccagcttctgctagagcgaagtggaggccctgccggatcgtatcgtaatcccttttaaggtcccacctcatatatatacctcttgtaaatcgtcgtgcggcgttgtaaccttaccctgatatagtgaagatattttgctggctggtacccatggttttttctctccttctttaggagggttttccacgttaaatatcgtgtcatctatgattgatctattgttctttatcgtttgtttgcctatcgtttcctaacatggaggatcttcaaaacgaattcatgggagatgaactctgaaagtcttatgaaattatgtgtttcagaggattt

SEQ ID NO: 42358 - DNA, 1323 bp, Oryza sativa
agtgcgccaaaaataaacattgtcagtgttatcttagcttgaaaaatgctttaggtttgaaaataagttttaggatgttttacttttaaaaataaaaattgaaaaggtttttaaaaacagaaaacctagacagtttcctgttggaacaagatacccttctatgagaccgtacctgatacatgatacctgttgtggtaccagctgcatggtacccgatatctgtgatacatgttacccggtacctgtgatatctaggatctgatacctgtaatatttgtgcaagagaatagttaatatgtctgttgtaacgggatcccattttataacagccgtctttaaaaaaaattgtaaatcccagaaataccagagtcaaccggtgactgcccatcttattattggggattggtggttttagccaatggccgtctcctctcctcacggagaactgactcgaaccgctgagaggcaacagagaaaccgcacggactgaacgaggcggcggaaataaaacaactcgaggctggaggctggctggcttccttgccgctgcccggctgaaaaagcccccgaagcagaggcttccggttgaagcaaagcaagagcgcgagggcgccgtcgggcatggggatcgtggagacgtggatgcgggagaagcccatccgcaccttcctcgcccagctctccacccgccgggcggcggcgggggccgcggccctgctcgcttcctcctccgccgccgcggcgtccgccgacggcgagcccggcgaccggagcatcccgcagctctcctccatcgccaactccgtcgtctcccgctgctccaggtacgccgttatccggttccggggcgacgaatctgttgttctctactccactcggggtttggggttgggggatggaggttgatccaatccatttagtgactgttttgcttttgctcatccgcaacgacggcagcgcttagctcggccgatctgggtgctctcgatcggtgtgggttgcattactctaccccgcatgatcacgctgaaatagtactgaactgccagagattgcataggacccaaacttaactcgtatatttgctggtttgctcagcggatgctaaaatcagtgtatgctaatccatcattgcttattaggtaaattgatttggtttaccaatagaagagtagcgtgcttctatagttatattctcaaggccgatagacttgatttcaatgtactggcatactctccataggacaatattgtcactcctggaaatggtgagggtaatattagctttttttatttctgagtaaatttcacgggctgcaggaa

SEQ ID NO: 42359 - DNA, 1063 bp, Oryza sativa
caattagaatgactgctgaacatcgtagagtaaactcatacattgtgaaagttttacacaaaaaatgcagatttggcaatatttttcccttttgctgaaatataaacattttgataaaacgaagaagtaagaatattacaaacaaactacagaagaaatgtttctcacattttctgataattcatcctcaacaacagcacctgggtgttcccacgcaagcatcatatcaaacattaaacggcgaagattcttatcagccaaatgatctggacgtgtagttacttcatggagagctttgtggcagcagtactctaaaaattcctttgcatatgtattagactccttacaactatcgggatagtcaacttcaaagttttgctgcaaggtttcggttgcaagagcaagaaccctgaaaatgttaatttgagaagaaacttgttagaagtttgtcaggcataacaagaaattacaacttaaatcatataagagtggtcaaacaaagcagaaacatgatcatgtcagtgtatttaaaaattaaagataactacaatagacaatagtaagctatggaagttgatccaattgtggctagcatatgattctcagtactccccttaacaagttagcatgagtgcttgatcagtgattattgcattaattaaccatcctgcaacgctacaggttgttgcctttatttgtttgtgttctgttgacctccttcagacctgtttgctttagataagtagagtgttggctgaacaagattaattcagagtttaatagtaaataatctatggttgattcaaagttgaagaataaataatccatggttaatttagtgtttaagaataaataatgtagataatcatagtttctagatctcttaggcacgggtcagcaatcaaataagtttctgtcaggcataatcatcaaaactcatgtgaaactcaggcatgcaattttctcaggcacaatactcaggtcaccaaccaaacaggccctatatatatatagggatcacatgctcacaatggccaagtgtccagaaataaagagtaaattt

SEQ ID NO: 42360 - DNA, 783 bp, Oryza sativa
acggggcctctcactccctcctgcagcgggcgtacctgtggttggtgcctcatctctctctctctctctctctctctctccctctctccctctctctctctctctctctctccatctgcacctgcacgcgtgtacaaaattgtacctcgatcgctctgggagtctggggacatggtggcacatgcaatcacgagtgaaggagccgaaacttaacgcatagtagtatgtgtagcttagctagcaggacgggagctgatcgatctggggaggagtacatggacgtcggtgagaagagaacctgactatgcgtcacagcctcagaggggatctgtatgtattatgtatctatcgttgtcgcatttacacgccaatcaattggagatcgaggtgtttgtcgatgactcctatatcctggtcgaactccagctgcaatgcatatatgcattgctcatgtacctgcagattttagaaaaaactgtttgcttcctcgatcttgctagtggccggtgcgactgcgcgacagtgtgatcatcaactgtgttagttgtcatttgttttgtccaactgcagtcggggaaaaaatcgcaattattggatcgatgcgccgatgaaacgtggcatgcttgcagcctaattttaacgtagtaggaagttttgcacgaatttaacacgaactttccaagtctttctcatgtccagcgcacagctagctatcaaccaatgcaaacaggagcgggcgggcgcatttgctgctgcacttctctcgcggtgttttgttcgatc

SEQ ID NO: 42361 - DNA, 647 bp, Oryza sativa
ttttttgtccgttcctgaagattagttgatatatatatttcttgaccaagccacacaacctaggtcggtttaactatatatatttcaaaaagactactactaagctaggattgtgcacgcattcaaagtataaattatccattaaagaattacctcggtctaagtataattgtagagactaaatatcacacttcagaagtaaggtacttactagttaagtatagctagtactacaatatttgacactatttctttgtcatgaacatgttgctaggtttatttttctatttccgcttggtttagaactaatgtactctatacgttttaaatcacttgtcattttagttttgtcccaaatcaaacatgtatcatcaatttctattaaaaatataatttaataacatgtgaattatatatattataaaaataattatcaaagatgaatcttaaaaacgaaatattatgatgttaaactgtataaacttcgagaattgatgataaatctataaatattttatttagattaacctggccttgatttaccagtaatatgacgttgggtcttgtgagtcctttaacacaacggccaggttaatctaacaaacatggagtgattccatgtagaaattaattaatttgccactagt

SEQ ID NO: 42362 - DNA, 1152 bp, Oryza sativa
ctgcagcccaaagcaacaaaggaaaacagttgcttaagtacgagggctgttataacctgaagcttagcatcttccatgttattcccactccgttgcctagaatttgcccacaaacttctacctgaaagccaaagttagcgacacaattatgatgctgcaggtcccacaacaatactgctaatacatcgttgtgcaccatacacatatactgagaaaaaggcatgatcctagacattctccccagcattataacaacttgtttaagtaaaataatgaggaaatagttgctaactgacctcagcataagcttctttgcctactgaactatcaggagatgtccgagcttgaaaaactaagttatatccctcagctgtgcactgcaacacattttcaactatgttattaattgaaaaagagctgtgtcaaacaaccaacaatctaagatacttacaagttccttgagagcagcaatagaacctcctgcttttctggaattgttctcccccatcttcacaaagcgagtttcttctgaagtacttgcaattggtaacacatcgtccctactatttccagggtatccaaaaatgtttgtattgctaccaaaaccattttctttcatatcagtcatcttatttggatcagatgacagatatttatctgcaagtattgttggcatggcaaatcaatacaaaatattgtataaaacaagaagttccaaaaagacgcaaaacaataaaagagttacaatgttttgcttttttcaacctatcaattacagaaatatagcttcatccagatgttttcatcccagaaaccaaaaggaaaactgacaacatgcaagcaggcaaatttgaatgccatgaaaattccagcattctacacagtaagcttcatgaatctactcgaacctccgtatattgtcaacaggctctgatttatgataacctgattaagtattcttcaatgaaacatatgtaaacagaataatccagcactattaagtggcaatagctgaaatgcgctatgtgcccaaattttgaaaaaacacaccctatgcccccagtaaacatgtcaatcttttatttaaaacgaatgtcttggttgcgacaagattgatggcacaaaacattatgttatatgtgcagtaaggaa

SEQ ID NO: 42363 - DNA, 1853 bp, Oryza sativa
gccatagtggaatctttgctgttactctttctttctacagggtcacgtactcacttcagtgttcagtcttcagatgttgtacaagagaagcatttgtttttctcagcaacgttacaaacgctcgggcctcggtattattgtccctcctccgagacggttgctgtattcatacacaccgtgccatttgctgacttgcaaccggagctagagaaatggctttgcttgtgcctacgacgaatgcaaacagttggatcgatcgtttgatcgcgcaggatgagcacgcgcgcgcgagatggatctgcgcatcgtgggatcgatggtgatgagctttggggggtgagggtcttcgtggatgaggtgaacaccttcctccactgtggaccaagcaccggtggtctccctcgctgtactctcgcttgccacggtgaacccctctctccttgtgcttctgatcgcaccgagtgctaggcctcctccgtgctcgctgcctgcaatgggcccgttcctcctcactgtcatgccaccgccgccgctgcgtagaagaggcacgagcagggtacgacttaccgtaccacggttattagccttaccgcgggggtacggtaatataaataccacggtaacctccttaaatttaaataaatttaaaaaataatttgaatttttgataaattttgtacggtttcgtacggtttttcgcggttaccgcgcggtaaccgtgcttaccgccggagcgcaataaccccgcccccgacggtttgggaaaccctgggcacgagaggccgggccagccagtgaaaaaacatgggggagagagagagtagggtagagaaggaagaagagagatggaatttgatgactagcatgccaagggggcctaatggacgatcgatcgccagggcgatcgcccagcgatcggtccaccccccctgcccccgctcctttttcttcttcctcctccctttcttctcttcctattacagtacaccaaattttttttaaaagaataaaaagttagaaaaatttatgtataaaaaatttgaattcaaattcaaatttgaattcaaattcaaatttgaattcaaattcaaatttgaatcgggtaattttaggtgtataaactttagatgtatagaaatactatatatagaaaatatttgaattgttatattctggatggaggtagtaacaatcatataatatgattattgtattattttttaaaaaaaataattgattttgaaattacatgcacaagtggatgctatactaagtttgtcacaattcaccgtactttttatgccacgcttgcgagccacaacttagctagtaaaattaaattgtaccacactttgatgagttgatgacatgtgggacccaaatagatgagaagtaatcttgccacaagtgtggctataaaccaaataataggctaacttggtcaaacttgactaacctaagatgtggtaatctttggtaaactttaggagcaaaccaaacatcttttcactcaaggaacaaaaactcatctccgttcgagatcaagagatcaagtggcacttgattgaggagaagaattccaagaagttgagcagatctgcaagagcggcggcacatgcaagaatgcagaaggccgggtcccctgtggaacacatcaaggctaggcaaggacagacaggcaccggtaaaggtcaaatcgacgcgagcgcgcgttgccgtgcgggctgcgggctacggccggagcccggagcggatggccgtaggtggtgacattggctgtcctgcactcctgctactgctagggtgagggtgggggagcgctctgggaccaaccccgttggttcaaaaaaaat

SEQ ID NO: 42364 - DNA, 1821 bp, Oryza sativa
aaattgtgtaattggtttttttccccacatttaatattttattcatgtgttcaactatttgatgtgacgtttttagtcaatttttttttaatttaaacaaggactctatttagattcattttagatagagttatatctttaaaaatatctagctctaaaaataaatttagacaacaaagatacatgtgtgtttagatttattgtagatttaaaattttttggacagtaataatagactagttattttctttttaaacggaaagggtagagttctagtactagtctacgagacgttttggatgcacttcggctccaccgcccaaatccaccccgagatctagcgcgcccttccatccaacgacccgcgccccaaccccagacatgccgatgactcctccgtccagtcctcctcggccatggcctatggattccaacggtcctactcctaccaagctgtggactgtggagtgcagtagatcagctcatcatcaatcatatccatgggccatggccctcgttgattgagcttctttttccttcgccagaaaaggcatgtaaagaaaatgggacgctatcggttagagcaagttcaatagtatagctaaactaatagctcatttatacaatagttacatattacactattaatatctggtctcatctgtcatacacactgtatcttggaattcgtgctacagctagctacaaatctgtagcccgctgcccttctctcttctcatttatcttcttaaaatatatttgcagctggcttatagactgctattgtacctgctcttaaggtcacacgatccatgcacgccatacttatactcccatggtaaacttgcgtatgtactgtgtctgtactgtactgtactagtgtctactagcatacttactattgtagaacggcatgttatgtatactcgtgcttggagcccatccctcgtactccctccgtttccttccgttttgtcggagggtgaactcctcaaacgagggaccgtggagcccctttccggttcggaccggggacacgggtgaaagatcgaggatcaatgaggaaaagagagggggatcgggcccctcaggaggatcgggcccctcaggagtgatggaaaatgcagatggtttagacatattcgggccgtttctgtatgtggttgatcttggtggaaggaatacaagagttttttgtttttttgggattcgtcccccactccactgggcatggatctccttttatatcttaaggggttaccacaaagacccaaaacctagctttaagagtaaggaaaacattctttatagacaattaatgcgtaacttgtcttcggacgtgcagaaccatgcgcgccttaccgcagtatgggcacgtcccaccacaccgaacgacacgggcggacacccgcatcattccttctttgactaacgacgacttcctcccgtccgttcccaccggtcagccatgaccactttgaatggaccggtacgaggggatttggtctggatccaaacttaagacaaaaagcccatcattaatggcaatttagacggagcatggcgcaggccatgctccctgacagcagtaggcgcacgcgcgaggcgctctgcccgcgatcacatcaatcattccgactttgggcgggcgagtagtgcgcctacatgccgcatttaatgcgacctgtcgcgccaactcctctaataaatgcagtgggttggcgttggacacgcccgcccaaaccatgcacgcgtggccgtgcatggagggggtcggggcggcccgacccctttcgtggggtacaaccaacacggggtgca

SEQ ID NO: 42365 - DNA, 683 bp, Oryza sativa
attcctgcagcccgtcccctccctcacgccccccgtccccgcgcatggtggcccgtgacatgtgagagatgagacggccggttttacagctcgacctacccctagccacgtacaccggcgcgcgaatcggcggccaccgcgggcctctcgcgggtcggtcgtacgcgcgcacggtccagaccgctggcaaaggggccagccgcggccgaacgcgagggagctagcgtgtaccaggggctcgcggcgccggatcgtcgtcggacgccgataattttgcgcgcgtggctggacgtgtgttgctttggcgtgggacgtcattcgaggggcacgagacacggccggatccaacgtcggctcgcgctgtgtggtgtacgtgtctcgagcgtacacatacgtaccggtgagtttccgaagggattcttttatttttctttttctcaacttcggtagcttttgtgtggtcctcgtacgtgacgcgcatgtggggcgcgcgtatgatgtgtttttcctctttacgtacgtgcttggtgtgctgccgtgctggcatgcacggcctaattttagcttgcatttttttatatataaataatgacgtattagcttgcttgctagctcctcccctccaaaaaatacaagcatgtctacatttgcaattttccatggtgtttttttagagcaatgct

SEQ ID NO: 42366 - DNA, 1065 bp, Oryza sativa
atttaacctgctttgcgtgcacgacgtccaggtatcagtgccagatgtttgccattcgcatgatcgctggttttgttcgaccgcgggggctgcatggtgtttcagtggtgatgtggttcgacataacgaaactgacgtgactcggggtggtgtttgaaccaggttctagaaggagtacgatcttagcgtagccacgtaggattgttcccgatcccgtcgatcgaatcgccaccgttggttctactgggccagaagtggcggacagtaggctcagtgattctccgcctccagtaggcccagccaccatcaatccccacgtcgaattaaaatggaataagttcatcgagcatccctcaactttgcatctgagtatgtatgacatgcctaatccccaataccataaatctccacccctaaactatataaaaccatacaaatgagatcctataggaatatagatatctggttttactgacgtggcatactagtcagcaaaataaaaaaaatatgggatccacatgtaagtgagtaatgtggggttcgcatatctttcttctctcttctcttctccgattggatcccgccgccgaccggtccgaaccccaaccgcctgcctagcaccgtctcctccagtgggcctccccctggatcctggggcatccccatccgccattgctaccgtcagggggatgaggcccacgccgcccgacgacctcaaggcccgacgcaccgtccgccaccggtcgcccccacaacgtcagccaccttcagctcctctctgactgtcatcgacgtccgccggtgccatcctttgctctacaccatcgtccatcggcaccatcccgccaccaggggtctcaacttcgccgacacggcgccccaccaccgggctcatccgctgcgctcctccctaggccaccagtgcactcttccccagccccgcctccactagtccactggcgtccgctgtcaaggctgctacctgcgtcgatccagactcagatccgagtcgacgtcgccgtgaacctgggagggagaggcggctggccgtactggtgggagagg

SEQ ID NO: 42367 - DNA, 723 bp, Oryza sativa
aatctaattgagtaatgtgatgtactaaagcagtaaagctataggtttgagatttcagattcgagacctgagaaaggaagaagaaagagaacaaaaaaaaaaccactgaccttccactcccgcacgaccgcaagccaccgccgcacgccgttcgccgccaccacacgcccgcacgccgccgccaccacaagcccgcacgtcgccaccctccgttcgccgccgccaccacaagcccgcacgccgccgccgccgccgcacgacccgtacgcctgcagcctgcaggccgccacctcgcgcagccacgccgcacgccgccgccacacggcccgcacgctgcagcctgcaggccgccgcctcgcgcagccgcgcccccgccgccgcacgtcgcctcgcgcctccccgccatccgccgccctatcgagcgtcgccgcgcctcctgtagggagagatcgaagagagaccaagagacggagagaggcaaagagagagagagcatgattcggattcagtcggcactcggcactgcaggctagggttttcactggttagtgggctaatgggcttcggcgtttgctatttcgtgggctgttcggtggagaaggcgttttttttggaaggccgagtgtagggccggcctgcatacgagtggggctgggccagaatatatgaaaaaatcggaaaaatcacaaggtataggtattaattttttttttcacgagtagc

SEQ ID NO: 42368 - DNA, 1095 bp, Oryza sativa
aaaaaaggatagtgcatatgctacctttggtgctcatatggaggaaagatcacgtaaaaaagcgcggcataattaggctgtgttctcatatgtgggttgggaacttattgtctccgtacgaaaaacggagtggtccattagcacgtgattaattaagtattagttaatcttctatctatctatctattatatactaaaagtccattaaacttcctacaatcgctctcaagttgccacgtggcgctctaataaattagagaaattcctagaaattctaataaaaaagcaaaacatctagcccttaattttcatttaaattggtgggtccaatattataccccgttagataaaattgatcataaaacaaacaaaatactatgggtcccacctctcatctttcccccgtggtcacgtacgtacatgtgggtatgtagtacgtacggctccctccatttgttttcttttttcttcttttttccatttatacaattgatatatatattaaataatcataattttacaaacaaagaatataccatcatataactcttataaacacaggtaactaaaatttacaccattatatgtttacccattaaattaataatataagataatttttacttaaatcggtgtactcattactttgtattattattctcaaataatgcactgttttaaaataaagtctacaccattatagtgtgcacccattaaattaacaatttaaaatctatattaactaatttacatttccactagaaccggtggacccattatttaaatcatcatcggatctattgttaataaataaagtgtccaaagttttcgttttttggcttgctgcacaatgcacgtttgcacctttgcctttcgcactttgtgacaaagcatcgtgtctgaggcatctaaggtgatcacgactgctgcagtgctaccgctttgccacgtatcaaattgtatatggagatgattaattttgttaataacataaaaataaaattaaaggtgtgatgcaataagagaagaattaagcaccgtgggttgagtttttctagcacttagctctatttaacctgaaagggctgcaggaat

SEQ ID NO: 42369 - DNA, 697 bp, Oryza sativa
ccccaaagcgcttcatggcgggctctatctccggcggcagcgagtacgacaagtaatcgctcgacagcttcatcaactcgctggcgacgctcaagctgttcaggagtgagcgatgtaaaataagggcggtgcggcgcaaccagctgtgtctccggcggtggagaagatggtcggccgccgccaccgcgcacgcgttcgtggtgagcgtcttcgctggtgtgttggcagtcaaggcagcgtacgtatagctgcaacaggcgcaacacccctacgacgccaaggagatacaatcagcggatgcagcgatggtcgccgagctcaccaagctctccgaccacaactggaggttcgccaaggatcccgtcgacacagccaagagcgtggtggtcgggtccgcggttctcgcggagcacgctgacgagcagcacaactgtcgcccagggaagaaataagagagataatttttagataatggaatgaaacatcctggcctttactcaagagctacaaccaattattacaatgttcacataaaagcaaactcacacagcgagtatgtagcgttagttataaacccaaaagtagaaataaactaataaaaaccgaactaggtaaagcccccgcaccactgaattctattggtgaatctccactcgaagttggcaaatagctgcatgatagtcgactcaagtttaca

SEQ ID NO: 42370 - DNA, 1071 bp, Oryza sativa
attatacatggtatctatctattttactcactaattaagccacaactcacgcccgctgattcctatctattttattactagtattatgccaggtccctctgattcctatccattttataagtagttaatttgctccaaatatatatatagtacagtagtatatacttgtgttttttttacctggggcacgtgtaatacaatctagagattatttggaacttgggattttttatagtaattagtttaagactcataaagtttatgtaaatatcaaacattaaaaagtatccactactgaaaaaacgatttttttttacgagagccccctatgggttgcaaacgtaccgtaactggcgacatctgcaaaaatcaaccttcattatcgcatacgactccttaagagacctcatgttcagtcttgcggggggtgcgcacgactctaccgcgcgcgtcgttcgctgcccccctctccacgcgcgccacctgttcagtcttgcggggaggtgctgacgactagttgtgatttagccattccaggttgcatcggcatccatagccgaaggttgaagacggcggtgggctatacgaactgggtctgtagctctactaggctgggctggatcgaagagagacagtttgaacagagggaggcaacagactgggttgagactaaaaagaaggaaagaataggcggcccaaaaccaaggaccaattttcattaaccttttcaaactatctattaacttattaaaagaatagaaaaaggagcctctgtgttcgctctcacgacctagaaattctcatattaatcggagaaaaaaacagaatccatattgaaatacaatttagaaatagttgaaattcagaattaaaaatataaagaatattggaagaggagactagagtccatatagaaatacaatttataaataactggaattcgaaattcaaaataaaggatatataacacagagtatagagtccatatagaaatacaattaagaaataatagaaatttggaattaaaaataaggaatattagaagtagagtatagagtccatataggaatt

SEQ ID NO: 42371 - DNA, 541 bp, Oryza sativa
aatgaaggagggtatctctagcttaatttactctacttatatcaaatttaagttgatgcatatgcctaagttagtattgagggagatgcgcacatggcaaaaatcggtaagttattactaaaaattttcttgaccaggtttctgagcacccctcccatactctacctccgccccctgaccaatagtatagctaaatggagtggtagtatataaaggtctaaacccttaaataaaactaaatttacgatttagattgatttctgctattagtagagagcacagtagcagaactcgtgtaatagtgcgcgtgcacagttgattcgtaccagtcagcggcatggctagctgtctggcaatcacgatacatatatcgtggttgtagcaacagagatgcggcaggaggatacaccagaatcggagggcgattggcgagatcgggagcttgcggccataggtgactgaactagtacatgagtactatcttttccgaagatcggttacagagaaaagctaggcaaatcaatcagaaggcgcacaacgt

SEQ ID NO: 42372 - DNA, 735 bp, Oryza sativa
taagactaatgcaagatataaacattctttgtttttgcccagtttgtgagatcatccaaactagaactgctcatcatactagttagagtgcttcatgacatatgtttttgtacacatgatcgattaattaattactaaaagaattagtgcttttctgcaagtgtaaggggagtaaatattattataaactcctttcacaattatgcaattaacaaccttaaatacttctggtcacacgccaacactaactttttagacaccatgtgttagtccaacgttcagatatcttggaagattaggcataagacatgactttttcttggcatagcaactgtttattaagcaagtctaaagaagtttttagattaccctaaagtagtactatactagcttaaataagtttaaacagtttgaaaaaattgaggaacttttatgtgatcccctaattaagaaaaccacccaactactaaagtaagatattcgaatttcgcgacaatcaattatgtgaatggaattcctttaggaaaaatcaaaatatcccatcattatgagatccctataagctggaggtagcttaacttcaccttccattaactattggccattagtttaactgagtggagtcaaattccttgttagtggcaagcaccctttgggcccctccatgaagctcactttgtaatggctttaatcaccaccttctttttgccatactatctttcctagctatagata

SEQ ID NO: 42373 - DNA, 1191 bp, Oryza sativa
cccttccaatccttgtcgctgtaatttgttctcttaaaagaacatgtatacattcatcatcactgcacgaagcgatactttttatatcagagattattctgcttgatactaaaatgtgcaaattctacaccgatactgtagatgacatatatgcatatggtattattatggttcgaaactataataatatcacagtatataaaaatcatgatgctgtggctataattaataggtcgaaatatataatgtagttttaagaaactacatacgaatttagatggcttgacaagaaggggattgcaccttgcagctcttttgagtaacattaagttcacacgtaataagaagtggagtacgttactaattaacaattaccgaattgatatatatcatactcctgtcactgctagcatccaagctaagctatagtaggtttataatgcatgtgcgctccttcctcagtaatatatatctgtatatgtttgaatccaattgaccaatattcaacattggcattgcatatagccgctgaagcgggtttaatttgttaattgttatagaatcttttgtccaggaccacggactataccccggcaaaggaaaaaaattaactttcccaaatataggaagcagaagcaatcttatgggtcatctgtttttaaattaaaaaaggttggtcagatcacacttgaatacatcggcactcaatactagctaacaatagatagccatacaatccgtgatgcatgatacggcatgcacctaccagggcatatacacccaatattaaactgttcattaattccactagtttgttctcatatactaacaattgttttctgtttccaggtaagtaatgggtttctctagccttgtaagaaaatgaaactttagttgatttcctgatatgttcagttaagccgcaacaacattgtctcttaactctcaacgccaccagctccaaattaagcacatcaaaccaaaacttgttactagctccgtcccaaaaaaagttcatttttcacccatctcacacatatcaatataaaagaaaacgactagaatacccctactttattatatccccaatgtaattattcatcactttatctatactctcaatatcattattccctacttttcacaaactccgatgcaataattactctaaaaatgaatttattttgtaac

SEQ ID NO: 42374 - DNA, 977 bp, Oryza sativa
aatgatggctcatctccgggtcctcgctcatcattccctcctctcccctttttcattttcttccccctcctcttttaccaggattattattacttactgcacccccttcctttaataccaccctcaggtgatcatgatcccctcaccacccaattgaatgccgcacaattgtggcttctccttacactcctctctctctcacacacacacacctccaatttttactgcatgccgtatgactatgacatatccctctcatgtataccttcttttccctccttttccccttggcctatatcacacgcttgttattgatttcaaaagcatcttgatgagtatgatagtgtgattgttacaagtaacagaatctgtgaagaaaaatcctacttgcaatcacaatcctactagcaacttccagcgttcaaaatttgttctagaatatagcaacttttttatcaactttttcatctcaacctatcacaatcacctgccatttaatttcttcacgtactccctcatctttaattaattagaaccatctctgtttaatttcaccttcttagttcctatgaaaaactctaaaaatacttatatttagtaacggagggagtagtagtagtagtatttgacagcaaaaataggattggagctgagaatgggagaggaagaaaaagagaagcgggcaatgatgttggacagcttggagtcctggactctctaggctgcatatataagatagcaatctttgcagctaatacagctccctggcctaaacacaaggcttggccctagcttgcacagggggatccttgtggagacatgcgtggagacagccggattacgcttatgccctttcggaactcacaaatgcaagctggtacttggcatcagatgtgtggtccgtcgaggcacggagaagaggactgcactgcacatactctcaagctccgtttcgtatcagtgaaatttatatggat

SEQ ID NO: 42375 - DNA, 1718 bp, Oryza sativa
tgagtcttggcatgtcttgctcacgacagctttgctacgtaattgaccagctaataatcctaaacatggctgagacttttcatccaaacctgcttagaaatgctacgttacttgcccttcaggtcaatatgttaggttagtgagaaccagctcaagtattcggctatttatggtcttcaattttttccttttgatgatttgtagagtcgccaattaccattagcagacgaatggaaatgcagaattttggtggataaactcttcaaatgcaaccgcaaaagaataccttcgcaggataaagctgtaactcatctttgcgatatccaaataatcacagaatgcacagaaactaactaatagaaatgcctaacattgtgcttcagttggtgatcaacaaacatactagtaataattctttggaggaaattgttgatataatccctccaaaaagttctatcttcagaattagcccttgcacccattaatggtacgtgtgtcctaggtatttatattagtgatacatgcaggaataaattctaaagttgcaaccttagtgaggacaatgacgatgttgggtctcgtaagccaaacagatagaacaaaaatagatggtacggtgcagtacgtgcagcaaatccaggagattaagtactgagaaataagtaaatcaggatcgcacgactgattaggtacagtgcagtacacgcgacacattcgggagaaaagtaccgagagataagtagtaatcaggatgatgattagtgtcgagggctacaacacattaaagagagtaataacacatgagtcgagtacaggacaggataataatatcaaaggaggtacaatggtgaggagtggaaatgaattttgaaatcaatgaagaaaagtttatcaactatatatggagaacattgtcttaaaaagattgtcaaagcaaattattagagaatcctctttgccaggctacttatcccttagattgtcatgattagttcattacaacaccggcatcatgacgccaagtctacatggaataggatagtaagtgacaaaaagggaaggaagctcataccagctttgagcagaaaaaccgttgttcagctgtaatcccagtattaccagatgcttgtcttaagcagttaaacatgtactccctccgtccaaaaatataagcatttttagcatagtgataagtcaaacatttccaactttaactattaatagtaaaaaaaataaaaaagatcaatcatctaaaattgatgttattagatttataattaaacaaactatcataatatgtaactttttttatttaaaacatcttatttttataaatattgttgatcaaagtagcatttcggagaccgagttagaatccaaaaatgcttatatttttgggacggatggagtaggaaaatggtagtaaacattatcaggcattgtattaaccataaactgatgtgcgaagaatccatatgaatatattggaaagaatcaggcatcacaaaacaccaaggaaaaatggcaagaaacaagaaactacactggaaaactacaaactgtcacctacttgatgtttttgaaagctatggggacagtaaagaacggcacccatacgaaagaacagaaaagtatgttataatgtgtcccacttgatgcttcctcaaagaagcctctgctcagaagaagtgtactgtattgtgcttcaaagaatagct

SEQ ID NO: 42376 - DNA, 1535 bp, Oryza sativa
tagctatacatgtttcaaaacatgatatcatgcatggtgtgacctgcattgttgaattatttctttttctattgacaaattgaatatgtattttttatttctatttcaatactatagatttaatttagctatgcatgtttgtagaatgtagaatgattcatattgatataatatttattggaagactttaatatttagatagcctgcaaagtgcacaggtgaactgtgcccaaatgctataattatatagcaaaatatcagcatatgtatcttatattgttattttagttataacgagagaacagttagacataaatttattagagctagttgttttagtgaaaatcaaagctagttgtttttttatctaatttattagaacgtcacgtagcgttataggagcatttatatgagcgtcacatggtatttagttgcgtttataggaaatttaatggacttttactgtgcaatagatagattggatatcgtggatataatttagtaacatctgtttgtagaattatttaaagtaaagtaatatatgttttaactttttttagttaaaaaatacttccttgttatatttggttgccatataaagcatatggcgcatagaacagcatatatcttatattatttatttagttaaaaataaaataacaataaaaagatatgtggcttaaattggagattggatattaggaaaggaaaaacaagatgaggcgagaaggagttatgtacgtacgtaccaaccaaaggatgggagatgggtatatgtggagaggggaattttgttttttattagatctaatggctaacaatattgaacccaccaatttaaagaaaaatcaacggttagattttgtagtgccacttggcggtttaggagcgtttgtaggagcgacacatggcagcttagaagcgtttgtaggaagtttcatggatttttattatataatagataatagatagatagttctaaaaaattaacccaaggtacgtatttttgttatttcagaagctacgtagttttgtccacaaagctaccacaccttagtatcatggaaaacaatagtcatcaaattaaatgtctcggttttggaagaaagaaaatcataaagctagttagggcatcaccaatctatatttgccaactggtaaataatgtgggacctaacaaaagtaagtatccgtatgttaaaagctcaacaatacacccgcaataatataaaatttagtagagccaatagcttgaaggaagagggggtgaatataaatacctaccaaaagaataaatgtttttttaattcttactaccaagttgtactgctattgcttggtaataggctaatagctatttgggtaatttggaaccgtgccattataattttataaaatttaagatatgccatcggtatctcaatgacatgtaggacccacatgagtcaatgacatgtaggtcaggatggcatatctcaaattttacaaaattctaacagcatggttctaatttttccttaccgggggtactggtt

SEQ ID NO: 42377 - DNA, 626 bp, Oryza sativa
ccagatcctgaagaagaagattgtacatcaacatttcatgtgttcgttttgataggcaaaataatagtagtagcactaccagagtttcaaaagattatgtggccgccttttgaaaaaaagattatgtgacccacctatgtaaaagtcaggcatgtatccgttatgaaacaaaatcatgtagcaattgcttatgttatgtatgccatgaattagctgttggcagtccatcacatgcactgccatcatgcacacacaccatgtgcttgcttgtttcagtgagaacacgataagaacacaacaggtaaaaaagacaaaggatgcagctatagtagacccacttctggccacattgccacagggctcatcaaaccatctataaaaaactgtcaatcaaataagatgtttagtatatggtcaggcctaaatcatcacattaaaaattttggctatgatcctatattcctatggcaataggggcggagccaggaattttcctgatcctgggaaagtctaccaatgacttataatgcgcaaagatctttcacacatgtaaggttcaccactaaaagtttcagcattgttgcttgtatcaactaagcaccacatcattctgcaatttgagcaag

SEQ ID NO: 42378 - DNA, 543 bp, Oryza sativa
atgtcaccaaatcctaatccatagtgctgtggccactggctagtggtctaatctgcattcttgtgcattttatttgcgcgcggaatgcgttacactctctgtttgtttttctgtttataaggttgtgtgtttagttcacgctaaaattgtaagtttagttgaaattataacgttgtgatgaaaaagttgaaagtttacgtagtttggatgtgatggaaaagttggaagtttaaaaaaatatttcggaactaaacactgagtaactgcatgcgtgtagggaataattatacggtcgaccgtctgtgctaatgattgcaagtttgtaacatactgtactgtttgtagcagaaggccctatgattttgtaaggtggtgtttggatctaaggacttaactttagtctctatatttagacactaatttagagtattaaatatagactacttacaaaactaattacataaataaaagctaatttgcgagataaattttttaagcctaattaatccataattagagaatgtttactgtagcatcacataa

SEQ ID NO: 42379 - DNA, 568 bp, Oryza sativa
cctagtgggggtcgggtgtcaggtctcgggctcgggccaaccccgcaccccctcgggcgtgcagggttggccgggggctaccacatatgcatatacttatcttttttctcttccgtatttcaataaaagctttttcgatttcctaaggactgtgtctgtgccattgtttccttttgaagagttttggcttgaattagcacgctcgtgctcgaccctgccctcggtggcccgggccggcggaaatcgccaaacggggcccagaaccgagccgtgccccggggagtggtgaactccgggggggaatcggcaaaggcccacaatcgggtccccataaccctcagtcaccacgctcccggcctggctagtctcgacacgtgcatctccccaggcactagccccgacccgcgccgtttgaggctgggacctgggcacgagcccttgttcaagccaagacacagaaggaccgcggcacagaccatcctcgtctcatacacacaacaaataaaattgacacagaaatttcttctttatttgattgcagattaaattagtttatacaagaagcggg

SEQ ID NO: 42380 - DNA, 1667 bp, Oryza sativa
atgaccatcatatatttttctcgatcgatctgaatcccgtcctatagctagctttcctgtgacaagacatatgcattgctatttatatagctcaggccggtgcatatatatgtttagtcgtactcttgccgtatctgttctaggtggttgtataatgttaatatggctgcggatgagaagagcatcaattcttggcctcccctttcccatcatttgcattaaccttttggttgatttggtaatattagatcattagcatatgtgcctgcaatggtcgtgtgctgcgctagttttatgcttctctctaaatcattatatatgcctagttatatatgtatgaacaagtgacacaaaattatatatgccaggctgaggtatatatctaacatgcatgcttgcccagctggaattaattaatttgtagaggcaatatacgaaaaagtcatcacacactttgcacaactaatttgaagtgcacgccttcagattaactagcatggtagcatcgttatattttttttctcatataatagcttaaatatttttatatttattattaagatatattaaaaataacaacacaattttgaatttctattgtattgatagttatttattactttctaatttcgaattttacttatttctaaattatattcctatatggactctagactcttctcccaatcatgcttatttttaaaattttgatttgaagcttagttatttataaattgtatttctgtatggactctaaattctacttttaattttttttaattatgactttcagttagttcaaattcctatatgaaccttatattcttatttcaatattcttattttttaatttcgaatttatgtttttataaattatattcctatatggactctaagtttttttccaatattctttttttaattccaaaataattatattcttatatggactctagactcttattccaatattgcttatttttaatttttaatttttaattttaattatttctaaattatttttctatatggactctaaactctacttttattgtttttcttaatttcgactttcagtttgttctaaattcctatatgaactctagaatcttctttcaatattccttttttaatttccaaattttcgttgtttctaattgtatttctatatggactctaaactcatcttttaatatttttttattttttaattccgaattttattcttttctaaattatattctatatgggctatataatcttctttcaatatttcttattaattgtatttctatagggactctgacctctagttttagttttcctattttttaattctgaatttcaaacagttcaaaattgtataccggtatggactctagtctcttttttctatattccttatttaaaattccgagtttcagctgtttttaaattgtattcctatatggactctgttttttctttttccccgattaatgtgagaatttctaagctgtgagagtgaacgtgaaggctccttttactattcctttaataagttataatagatttgtccgatccctttactcaaggttccccatgtactatataagtacttagtactagtatatagaggaggcgggagaaaaatctattttgtggtgttctagagaccacccttagaa

SEQ ID NO: 42381 - DNA, 1173 bp, Oryza sativa
aatgggtggacgcggtgatggatcatggtctcatggatgtatgcatcgagcatcgacgtgagtttgccagacggtttctgtaggtatttcattttgcatgctaatcgaatcgatccgtgacgcagccagacaaaatgattgccagtatggagcatacatacgtgtccctttcgtcccaacaaaaacttaacatatgagaaatctctcctattacaataaatctagataagccttaatctagataacttctcctaggttgagttttgtcttctgaaggttgagtttttatttttttttatacaaagggagtaccatagagctaataaaaaatgtttaggtaaaacagttgaagaatgcctgtagtcccagcaaaagttggtacctacatgccactataattacgttgtcagttgaaatgaatattacactccttgtcataagattgaagtatctctggagacttttatggaaattaaggaagttggtgaaaataactgaggatgttgcgattgattgagatgaggggcggtgaagaaaatattttgttttttaaaaagaaaaatgagtaatagaaatagttttattttggagcggagaaagtaatccctttatttgcacaatagctttttacagtatagtattattctttaagcatgatttgtttcataatatattatcagtaattatgaaattggcattatattgtataaaaatacctttaaatacaaatcaaatgatattgcaggcataaaactgaacacatatattgttagatcaattattaagacatatttccttcctttccaaaataaataaacaaatcttgtacgagatgtggcctattatgaaatgtgacatctaattaatttgggacagggagtatagtgtaagatcaattatgaataatttattttctaaatgttgttttttttccttcgaaaaacgagaatgcctttattttagaacaaagagagtaagttagaaaaatgtcaattcaaacccttaccatatgccaagcaattactttcttgcccctcagttttcttccttcttcctccagtagtcccgtcacaactgagctccccatgagaaagagaattgcgtgcaccagtacacagcaaacttgaaggaaggaaaaatctatatgtggtgagcattaaggtaataccaaaa

SEQ ID NO: 42382 - DNA, 2326 bp, Oryza sativa
cataaactgactcaaatccgaagacagcgagcagacccactctgttctgactacagataaatcataaatgtggatgaaatccttccatatcgtagtttctgcaacaggagcagcgcgagaatcctaatgagcaatcgctcgcgtgagagagtggagagcgatccgtcctcgtcacgggctggtgggttctctccccacgttgctttcttcttctttttttcaccgcattactcttctggtttagtaagtttatacatcttaagtttactcatataaagtttatacatctaaattttgtattgttaaagtttatacacataaagtttatacgatgaaaatttatatacccgatttaaatttgaatttgaattcaaatttaaataccttaagtttactcatctaaagtttatacttctaaagtttgtattttaaagtttatacacataaagtttatatagtgaaagtttatatacccgatttaaatttaaattcaaatttaaatatatttaaaatatttatatacatatagtatatatgtacaaagttagcaatgtatatgtttatatataaaaagtctatgtacatgaatagattttagtgtaatatatttttttattctctttctttttttcacacttattttcaaattgattttaaatttatgaaaaacccacatcgaatgtagacagtcacgagcgaggttgagaaaagaaaaaacgtgtagtactccttgatctgttcgcgtgacgtgacccctagcgactaatcgcgtattagacggggacccttcagaaacttggcaaatggttgaactacggctggctatgtgtagcaacattaatcattattcggcaaactatgaaccatttgtgcatgatgtcagctagctatatactccatccgtttcaaaatatttgacaccgttgactttttagcacatgtttaaccgttcgtcttattaaaaaaaatttgtgaagtatgtaaaactatatgtatatatgaaagtatatttaacaataaattaaatgatatgaaaagaataaataattacttaaatttttttgaataagacgaatggtcaaacacatactaaaaagtcaacggtgtcaaacattttgaaacggagggagtatacagtaatacagatcgtacattatttatgttctagcagcagtcgttagggcatgaacaatgcaccgacgatgcgagtagttctaggcttccagctacctaagatttgctccggttcaataaaaaatacatcgagatatcaatatctcatggtaccaaagtgtttttatagttggatctaacaatgtccatcctgctcaactagatccaacgatcgaaaacaatttagcaccgtgaggtactgatattccgaggtacttttcgttagatcggagcaaatctctttattattgggacagagggagtatatagctgctccatacagtacggcatcaatccgaattgtacgcggacacgtcgtcgatcgacctgaaaaatacagatactggcacgcgaacgtgagtatacgtactgatccctgaaccgtgcatgcacatgtgtgcaacacacggctagcgattgattaatgaaacagctgtcagtatcggccatggctacgtacttccgttcattggctttgtttggatctttcgggctattaaatatctctctggaatcttgctatttaagattattaaatatagattactgacaaaactcattccataacccctaggctatttaatatacctcgttagattcgtctcgcaaaatagcctagggattatgaattggttttatcaataatctacgtttaatactccgaaataacaaagattccggaggggatccaaacatacccattatatccttgccagatctagaaagcggctagtgattgatatgttggggggcagactgatggcagtgcatcaatgcacgatgccacgatcgatcaagttcgtccaagcttcagctcattcatgcataaaccatgctcaaaatgctgcttctgtatgttccatgttaatagacgtaaccactacttctatctgtactcgcagtgggtaatcacaaatcatgtcggtcgtacgagagattgggtataaagattgttcacgttattttcaatctaatctcattcctgtctgatttagattattaagcagtttgtcgttacggattatctattttactaaggaatgaatcagatatctattatattattaaaggaatagaaaaaggagcctccacgttcgctctcatggcttggaaattcttacattaatcagagaaagaaaaaacagagtctata

SEQ ID NO: 42383 - DNA, 1926 bp, Oryza sativa
ggggaggggtggggcccccgcggtgtcgccttctcccgtggctccgggtgcagagctggcagcggggtggggccagctgggccaggtgacgtacggcgttggggggtaggggagatcgcgaaccgacggtggagagcgcatcgcagagcggcagaggccatccgttgtgttgtgggctcctttctctctttttcctttcttctttttttttacttttgttttctgagaaaaatgaaccgtaaaataattttgtactttacagaggcctgtttagcacatatcagaatcctctgcaatcgaagccatataactttttcactgatatataggtccgatgatccttgagtccatatattagtgacaaaggcacttgcagagaatctcaatccatttagcacaagtttagctttagctttacctctcttgaaaccgaaactcagccaaacagtttcagctctacttaaaatagaaacggaactgggtgaaacgctttaacaaaatgaactaaagagatgaatatgggtttatgctgctctacaacttcactccagactcaactcttatagttaaatttagaagttagagttataagaaagaggtccagagtagctactcctttttcacatgactagtgataatgataataacggatcgcccctggttgcatcatggaggtcatgtgtgtcacgcgcccactggtactggtgcctcgctctcgaaaccgtccatttggtttccaagagagtgactggccatgggtgatcggtggcaatggcaactggcaagcaagttggtcacagcttcatggaagaagacaaacgaaaatctcgagacagagagttgaggtggaatatgctgggcgtgcttattcgctgtattgctggatgatccgataatcccccaccaagctaggttaacacttaacagcgtagttttttgcagcatcaccatacttcaatcttttgttgttactttttcaagattcgctcaccttgtttgagcgagtgttctgacttcggagcatcgactgagaaacaaacaggagcacccagatctcactagccagtgtcatcacgcaggcatcttcaattaattagtgattactacgtagttagtaattagcccaacacctggaaacgtgcaacaacagcataatttaacccctctcgatgatcctagatacgggagaaattattattatttatttaaacaacaatgtctatcggtgaactagttgaggaagaagagcagccgtctgaaactctgaatgaaacattggcagcctcgttgccgtccgtggtccctgcccttggacttgtccggtcgctttctctagccacaggccagatcgccggatcaacgtcgcgagggcacaccaaaaaggcgcggccgcgtacgacgacgggcctaccgcgccaggaggcgcgcgctctcccgcccgcgaattcggctatccccgtggcgtccgatattttggcctttgggacccttcctctctttgccgctagaatccacggcccgagagagcgaacgagtctgggccgtgcacgcgcgccgttccaaatctgtgtgtcggcatcaggaaagggacaccgggaatccagattacaacttacaagaaaaagaaatgctgatgtccaaaaggccaggtcattttcctctcaacagaaaaggcaggagaatcatataatctgttctgttcatggcaacaaggaaggggaaaatgagttatcttcgtagttgcggacttgcggtctcaaggtatatagtggtacagccatagaaaggaaacggcagtaatttacatgtgagatttcttgttttgatctaagcacgctaggtgtgtttcagaattcaaattccttcagatgttgtatagagcacttatcagtcatccagtagctgacgtgagggcctcagtaagga

SEQ ID NO: 42384 - DNA, 672 bp, Oryza sativa
atttatagataactattgtatgaattggttattaaatagactatggctgtactcactattcatggttgggaacttggaatagtacgcacggaaaaaggagcggtccattaggacaacaacaatgtatatggcaaaagtagtctataaagatgggacccatatatatgaactttagctattgtaaccttcacaatgtatatggatagtaaatagtattagtaggagagaatagatagagacaaataatatattgtattctctatgggcagcccatatgcttatgggtagtttttgttatttctttcctatggactagttccacaatattgctaggtggctgaatcaaatactatattgcttatggaccacttttgaaatacatggtggatgcccttagcacgtgattaatcaagtattacctattttttcaacgatggattaatttgatttttttaagcaactttcgatagaaacttttttaaaaaagcaccatttagcagtttataaagcatgcgtgcggaaacgagggagaggggttgggaaaagggataccgaatacaccctataaataattttgagttaatagttggctatactattaaacttctctaacttgactatcttcagcccgtgccatgattacgatttttcgagtgtcttgagtacacaaaa

SEQ ID NO: 42385 - DNA, 701 bp, Oryza sativa
cacattacattttggagtccgtgctgtagctggctatagatctgtagcccgctgctcttctctctcttcctttatctctttaaaatatgttataactggcttatagcctgctattgtacctgctctaacggtattattatgttttcccagatggactatgaatgatggtccagcctaagttagtcgtggcaatacctttttcagagcacacaggagattggcacatcttttgaataatcaagaacagagattggagcaggcacacggtgaaccagagctggtgaccggtacaacgacagtacaatctggtatgtacagtttttaaatacctgaaaaattttaatgcagggatacgggaacgatcttgttgctcttgtggcctttaaaacacttcctgtctaaagcctgagaaaatttcattgcacgtatggatgatgtacgtatgaaatcatattttcatcgatgtaatgattccctgtgacccggtagcagtagcgacctcaactgtcatggccatccatttcaatggatgcatggagtcgtctttgctttgcagttgcaagctgctgcccatggagacaggcaattaagattccaggggagtacgagcgtacaaccatgatcaccaattaaaagcaaagccatcatttggattcccagttcttgtgctcatgccaacctcacccttttcttttcccttc

SEQ ID NO: 42386 - DNA, 652 bp, Oryza sativa
agccctccttgtttatgtacttgttatctgttatacatattaaccaaatttctcgaaatttatatgatacctgttacagtgcaaacaggaattgcatgtgtgcatcatgggctgcttttaatttgacgtgtaagtacagtctcatcttccagttttggtgttatttttctaaaatgcagacaaagggggcaggcaaagggaaaaagggagtgcatgaagctgatggaaatggcgaggaggatgtctccacttcaaaccaatcaaatgagaagcaactcgaagaaccctctcaattgtcagatatgttgccagatcacttggtaagaactagagcgaaccaagatacataatgtcctacctcaaataacacacagaaaaactccctgataagcttgcaatatctcgaaagcagataacaaactggctgtcatatactgtacataaagtttaccgagaatctgctatttactgccaatccaccaaaccatgtttgtttgagtctttttactggtccatattcattttgcatcttatctctgctttgtgcaatcttgctcttcttccttgtgagttgtgatgaatgaaaactcctatgagcaccgtaatgggtccctaacacgtttgatgttgtacagtttgatgacagttccaa

SEQ ID NO: 42387 - DNA, 727 bp, Oryza sativa
tcctgcagccctactaatctatttttcaagttggttttagttaatactacctccatattttaatgtatgacaccgttgatttgttatctaacgtttgaccgttcgtcttattcaaaaaatttatgtaattatcatttatttcgttgtgacttaattcatcatcaaatgttttttaagcatgacataaatattttcatatttgcacaaaaaatttgaataaaacgaatagtcaaacgttggtcaaaaagtcaacggcgtcatacattaaaatacggagggagtacttaattaattatgtgttaatgagctgctccattttcgtgttggagggaaaggttcccaaccaagactaactctgctaaatttttaagcagcatccatgtctgataggactatacaagttctcattgggcctccttttgggaaaaagtttgaaattttacataaattgaactaattttgagggttttttttctaggaagtccttcatatgtcaaatccaaattttcacaaccatctagcccatcaaatgatcttatgaaattatcaaccatgttatgaaaacatgtttgatgagaaacaaaagctctccaagagtttaaaaaaaagaaattgagtttcctagtttatgcatttggttggctaagcctaagccgagacatataatgaaacccttgaaaaaaaatttatgagtaagaatttaatatttcgttagcaaatactattg

SEQ ID NO: 42388 - DNA, 1681 bp, Oryza sativa
tgtaaaactacaccccaaatatttaaaataaggtcctatgcacttatacaatagaatatttatttctcatgaacgataatgtttagaaaaggagatcgagcactgctagttctatctcaaaaaataaatgtgcaaatagactacattcagctgtggcttgaccggatttccacagaagaaaggatgatccaatgagcaattattactgaggctactgtaactgaggttctatgcatgaattctacagcgagagtaattgctttgtgccatagagatgttactcaatttcttttagtgtgttcattataccttctgaatggcaaatgacaacaattgagttgaccatatctctccatgtccaacaacaaaatctaagaaagactcggttgcatgcccagctgcaaaaagggaaatgtatcataactcagctaagactatatttctgcaatcaaaccacaccgttgctacataatagtaaataagtcagcatatctaaaatgagggacagatatactatcacagaattctatgtggttgatttatatgttgtctcatatcattatgggtattaacatgctattttaacagagcctaacagattgattgttaaatcttaaatgtgtaaaaaacgaagatggacatcatggaagaattgttttgattgagtcaagagatacatgagttcaccactataatgccaatgatttcctctagtactacagtagtatataacttcactttattaggctatctgttagtactctctcagaccacaaacttttcaaaccatagcttcctttgtaagttagtatgcatgattttgttaatagtgaccagtaattagacattcctgaggttgtaggccaaatgcaagattaaaaaagcacagtgagaaacctctcaattaagcgtttatggctactgttacagacctattcgaaaataacatgacaacaaagcgaacagagtatttgacgtttttttttcagaaatattcttatccagtgctttgaaaatgaacttgtttttttttccgaaaacgcaagagccatgtgtttcatttcaagaagaagaagaaagagcatgtaagctatagtcataagctactctatgtcattaaaaagcagcataagtagtgtacagaataatgcaatttatttttgtgtttttcctgactgacgtcctagtattaataatttctccatgagccttttattttgacagagacaaattactattactcaccctaaatgggattattggagcagataattcagtctgccaaaaagacaagaatagagacaaattacaacaacttcacactgaagttgaaattcctgcacgattaatagaaaatatttcacaatggaagttaaattagaagaatgttggtagtccagtttttgtaagctgtgttgtacagcagtcagactcatcataaatcatgggcaggagaacaagactgaatccatgttacaaatatgtaatgcagtctgaatgaccataccaatttattcatagacttttatagacatgtgttaatatagctgcatattaaaatggagaagacaatgggttttcctttaatgatatgtgaatttgggtttcattggaaaatacctgagatggtatatagttcactttaaccccaccttaattgcggacgtccattacaacctga

SEQ ID NO: 42389 - DNA, 621 bp, Oryza sativa
tagaagacactaaaagagacaaaaatcagtgaaacatctctaatctcattaaattcatataaaaagcacatttacgtatactaattttatgggcatcagaatttaaacattaatgcgtgaagaagtcatgcacttcatacttcaccacatgtgctcttcctcaccatacatttgatcttatcaagatgcggtggcggtggcttcaaatactcgccagcttatacaaaaaaataggagtaatagaaaagctaaggaatagttaattactcggtgatcagcatatctctgaacttttgcaaatgtctaaaatttatccctgaactttaaaaccgaacaattactatctttaaacaacacttagtcatttttcattctttaaccagattcaaagtgattctggattacatggtattgcgatttaaggttgaaaaatcttttggttcttaaaaatcagtgcatgataaatccataaaattccttaaaagtataacttactttttacgacatgaataacatattttttttaaccatgtaaatataataatttggctgcacaaaatagttttgtaatatatttaaaatcaatttttttcttggaataatatttattttggaatggac

SEQ ID NO: 42390 - DNA, 892 bp, Oryza sativa
aaggttgttatgtcctcgacatgttgtaatgtgatgcataccccgttaatgcgacatcacgatgcaatgcggcaatgatcaaatggtatattgtactttttaccttgctttgtgtcataggaaagctgtactattaaggggggtgatgcatagacatataaggagtgatgcatgtgctcaaaatctttttttcttggaagcatttctctatttggtttgttccggaaatttttggaagttccgaaaatacacagaaccgattttaacctcctggaaaattttggaagttccgaaaatatccgcgagccaaatatgcttctgcaaattttcggaagtttctgaaaatgtttttcggaagttccgaaaatccacagaaggtattatgggttctggaaattttcagaaatatccgaaaagaatttttggaagttccgaaaatgggcgttgacttcgattatcctagatctggaatttttggaagttccaaaaattacttttattgcgctccaacgggcaaatttgtgctgtgggtataaatacccacctcccctcacttgtgatggctgctgatttcattgcaaatttgtgtgcccttggcttgcatctctctctaagtttttgagcctctttctcgattcatctctccactcgggtttaattcggatttggtttttaaattagcctattcacaccccccctctagacctaattgaccatttcaattggtatcagagcctaatctcctaattaggcttaatcgcttggagagatcatgtcggattgaacgggggatggcaatgatggtgataagggagctaggtttccttatgactatccctccacatctacatcttatgtgagtacctatagcggcaaagcttcatacttcaat

SEQ ID NO: 42391 - DNA, 1518 bp, Oryza sativa
tgcacttccttagttggtgtacatgatgaagaagatgtgggtcgtcagcattgacatcataaccaagaccgtggtgtcattttatccgtatatcaataggaaggagggccttcaacaccgactttatctgtataaagtcccaatgtccacacccatttctcccctccgactttttcaaatttatgaatgaaggtataataattcttatctatctatcatctaagttatgaatgacaagaggtataataattcttatatatctatcatctacttatagattcttctgcatcggctgcatatgttcatttctgcatacctgcaaactttttatctttttaatcagcatgtcttcttgtactaagataacacccttaaataatacagcctgtaatatggtaaacatttgacccttcaagctgaagtgaaatatagcctgcatagtgacagagttttcaatatgctctctcgtatgaatctatattgttgaaaaatattaccatttgcaagtaaagtatatatgcttattttggaaactggttgggtgcccgtgcgttgcaacgggaaatgaaataacatcagctctaacttacactatgatgtcaaaagagtttaaaatgtgatgattatcaatgtcaacataccttccaatttttacaaaatatttcaccctcgcagatcccatatatacagcaactatcttctaattcactaacactacaatagctacatgttggaagaaaaacgctgcttggcatactatggaaaacacacatgatgtttcctcctcaacagttaataaaaatatttgacatatcggagggttcatttagtacccttcaattacaggttcatttacttgtgcattgcagcggctattaaataaacaacacagaaacatctagagtttgtatttaataataccaaatccaatacatccagatggcataggaacaaatttgactgtttaaagtaaaatgtataatatttttctcaataaaatatttggcttaacaactataaatttatatcttttcgatcttaatttaaaaataaaataatcttagaaatttgatatgttaaaccgtcattagttgattggctcgctacttttttagagaacaggtcagagatccggcttttcactgaaagccataacggcaggttcagctggggttgccagcatacaggaaagttcaacgatcaacagatcgacaaaaaaatcaaacaactctagaaatgcctaaacagctctaatgacaacaaaaggatagcccacatctcccaaggggattcagaattaagctaaaaacagcagcatatcagtctgcggacacaaacccagaaattagcctatcccagttcttgtcggtctcagatttgccactgcatctttcatcttctgcaccatcgattctaacttgcacagatcttcacatcgaaacagttttctccactgcatgagattagaagtaacaaggaaagggacagttagtggagaataaaccagcttttccttaa

SEQ ID NO: 42392 - DNA, 623 bp, Oryza sativa
catatatatgcatccatctgttcctatgaaactagctagaactcacaatcgacgctatccatgatgaacgggtctctgctgctgctagctaagtaaaaagacctcttttcacgtttcagcagtaagatttcagagtagttaatgtgctcctcaagtgtcattttcagtggcaaatcacgattatttaccatttcggtttaggttgtacaaaatctagaagagaagtgcttggtgcaaatcactgcacatgtgcatacgagagcactgccaaaaaagaaaaaaaaactacaatgagttatttaggatgatcttttacaccacaaagactaactactacaattgcccattttatgcttccaaattttcctttttctccccgtcttgttccactgcttttgccaataaagcagtagctgatgcttccttgctcttaccccagaggagaagatagaggcctccaatcacaagagcagcacctatcgcactgcaaagacaaaaagaaaaacaaaagtgcgacttttgatgtgtccatctgcgtaataaagttgtcttttggccgatagttccttcaatttgtaactttttagcaacacgtcaatagtttaagtgatgctagttgatag

SEQ ID NO: 42393 - DNA, 610 bp, Oryza sativa
gcacggattgatgcattaatttggttgcaatgtagatgtgagacttggagttgaagaacaggtagcgctgcgtgagggtgaagagagctgtcacccacaaccacaaggtgagaactccttttccttggctcgatcctttcatagtattcctgactctgatactaagttaatgtatttagtccacgattaatccacgtacataccaggtgattgtgcaaaaaggaggtgactttatcaagagttttgtaagtagagtgctctctcaccttttcttcactttatgggcatcattttcagatcgatgtttgggcacccaaaattgaatcaggatattttactttcgcctttgctctgaaaattatattctgagtgtccccctcagatgtcatttgtcggataaaatatatactctaatttttcagcagtaacattccactagatcgaggagcaattaggtatgcagatagcattagcattcccccccgggatgaacgagagccatcgcttttttcattttttttttggaggaatatcaataagtggagggacagggctatctatgcagcagcatgcgtgtgtgtgggtatatatagtccatgagcagagtgtg

SEQ ID NO: 42394 - DNA, 886 bp, Oryza sativa
ccgacttatcacttgatggtaccttgtccatccgatacgcgtatccagacttatacaacactggtttgtacagctctgccaatatttagtgacaattcatgcagtttctgttagcatcatcttatgctttgctttgtctttttttactatcatttactccctccttcccaaattgatcatcatctaatggacttcaaaatttctcaaattgatcatcatataaccgcatggacatggatttcatcataatacaattaatgcagcatgagagaatgtgtgcatgctaaggtgtaattggcatggtgttttgatcgatgcatgcattgtgggagaatgtgtgcatggttgtcttgattgatgtgatttaaattatccttggtcttggtgcataaacatatactccctccatcccataatataacgcatggtaaaagttacacggtctccaaaactaatctttaacttataatttctcatatgctataaggtttgtagcaacaaaattataatcatatgaaagtaaatttaaatgtcaatctaatgatataatttttaacaaataaaattcatttcatattatattaaatgttggtcaaatgttttaaaggttgaatcttgaaatacgtgcacaccttatattatgggatggagggagtatgatgatcattttgggaaggagggagtatataattactttttgtcatcagaggcaacagctgtcggttttctagtcaaatattgctttgtaattttcagtagacgattatctgagaaaaatatgccaaatgatgggaaatgatgagggagctttgctgaagagtagcgattcttaagtacattgttctccatctaatatgtcacactattgcattttgacactagagag

SEQ ID NO: 42395 - DNA, 629 bp, Oryza sativa
agttactacctccgctcttctctagatcccattcaggacattgaaacattctccaatgcacatgtttggtcattacttcttgcactcacatattcgtaaaagttaataaaaaatataactacatggaagtatttttcatgacagatatactaaagtcattttcacatataaagtcttaatatttttttcactatttggtgagttaagatttcaagggttgactgtacgcatatctagaacatcatctacttgaaaacagatggagtatcttttatagatagatacctgcctttatgctcaatcctgttgctaatagtaagttcttgactttgttgcaggtggcaaatccaataaccaaatatccttggtgcatcagatttctttaatgagatctaatatcaaaacaaattaacctagaatagttatatttctgtagctatttgtgcaaatgaaatacacactttatagcagctataattttcaggatactagaaattggcctaattactaagcaccctctagcttgcaatatgcatggtttcagttaaatatttgatgacaagaggtattatgctgcatctaaacaatatcaatgttggtgtgttactataattaaattgatcaccgtc

SEQ ID NO: 42396 - DNA, 3331 bp, Oryza sativa
aggaggaggcagcggaggagcggcgggtgcgcttgggagcagaggctgaggaggaggaggaggcggctgctgctgcggctgcggcggcggcgcgcttgcggctgcgcgtttccatacaagcggtgacgggcgggggggagggggtggctcgcagccgtgcctaggcggcgaccggcggcgggcgcatcgatcgatcgatcggagctcgactcgatctgcggcggatcggattcgctcgccggagaggagaggatggatcgaggggggcgagggatttggggattttggggcttaagacggtgcggtggacgtggcttggctttggttccccccctcctatagccgctcttcaaccaaacggaatggaatgcttctcctaaaatcaacctcccattttatttttattttacttaattttattataacaagactacatattttttaactaaattatcacaaactgtagatataataagtttatatattggaaaacttccaattttatgcttgagttatcacaaaactacaagttttaggttatgggagggatcacaatcttaacaaaattcaaacatcttgagctagctcaaacggtgcatctcaaacggatttcttcaaaaattgtagaatatcattcaacatatatcaaaatccgttcataactaattaaaaatcaacgtccagacatggctcaaaacttgcactagccaatcaagattgcaaataatgtttcagtcccatatacaacaatatctaataaactaggtcttacatatttatatgtatcccacgtaagaagagttttatttttagcggtaaatatctatgttcatgatcttagaaagcgtttctaggtacattcaaataagtatggacattttaccatatcaagcataggtataagtatggacattttacccatagcaaagcatgggtattttgctagtattgtaacaaagataattcactgttgccatctctatctatacttatagggtcctcctagcgttgagggcaatattttttttattgaaaattgaggacaatatttagtaagacgtttaaaactttgatatcaaatacttgttattccattacaaatgtcttgaaaatataacttagcctcaatattccacagcaacaatttgtaaaatcttaccatctgtacagtattatgacaacatgtatacttgggataacttgcaaggttaacttgcaacccctaccagctcgagtctttggttattatttacgaatgttttcataacatgaaaacggttacccatccccttaaaatctttgttgacctatattattattaccattctgaagtataaaaccaaccaagggattccactgtctaacttatcttccctgggttattaaggttaggagcactataagcaaggtataccagtttataaagcgaagtaaggattaaacagatgtacaatgacgagaattgcctccctatttacatttgaactgcattgcgcatacgcaacgagtgcatatttacatagaaatgtatattcgcatgagcacaggcgcatgtacccacacgtcaaaaggtcgataaaagatgaacaagcaggtactgcaaaagacaaccgtggaagtagtagtacgtgattggtaccgcaaaatgagtgaacatcctacgaaataacatcttccgatcgaccttgtaaacaagaaagaaagaaagtagagaggcagctcaggacacctccacgaccaaaagagaagaaagaagctactactgggctcgtccacgggcacggggtgggtggtctgtcaacagtcgaataagcttgtcggatctccccattgcatctcttgacgatttcactttttcttcctgcaccaaccacgcctacactttgtcagcagctaatccaaatcaaaccaattgtgcatcaaacagacagtggttttgccgctagctataaataatgtcatgaatcagcgcttaacaagccatctgcatcagcgatcaaccagagcttagatttagccgccccattattgtgaaacacttggatgtggttccaattgttgctgaggtttcaaagagacgtacctttctggtatccacaaatatatcaggacctgtgaattctttgagcatcatagctgacacaggctgcaatctcctggtcgaggaaatgaaaggtaaacttcaattccatgacaagcatgcttttttttgcgggacacaaaaagcaagactcttaagcagtaattatgcaagaaaaaacatttctgaagtactcaccttctagtgttctttctattgcaaggcttagaagcagagagatcctctattttatctgtcagtttttcagcctgattgtccttggttggagacttcgaacgataaccataacaaaatatgactattagaaaggcgcaataaaaagaaactagcctaacagagcatgtcatttttctttttacttcttaactaacaatattccagtagaatatctccaagtgtttatagacttagcattatatttttcatcataatgcaacaagcaaagaagtgccatccgccccagactagacagtaatgatcttactattggagctttccttggggaagattttccatttagcgtacatggatacatgcctccatgatcatccactacatgtggaggttgagcacagcctacaaaaattgtgttccattgataatgtaatacaacatttcagaaggatatagacaatcatatacaacatgcccacaccaaattaagcacgaccaatgcttttgttttatgagatattacacattacataccatattccacaatggttatttctactgttggcttgcatctttctgactgaggatcctgctgaagagcaccctaaagaaaaggcacaaacatatgtcttagactttccaacaaggcaacaacgatttagcatagaaagaagaagcgccacttgcatgcaatcatatttcatcctgagaaatagattaaaagaataagaatagcagctaaccttgattatgtaaggaaatattttcagtgcacaaagggattatggacagtgttctacaacttgactaggatattattgtgttatttttggaacttgaaggagctcagtaccacagtgaaaatagaatatgcattacgctccacatccccatacttccatagctctaaagaatcaatctcttctttcttcccaagagctctcttcccagcctagcaagaaacatccccttctaaacccccaatggcagccatcaccagttcactaccctccccaaactcccataatagaaaaacacaacgaacaaatcaaaggt

SEQ ID NO: 42397 - DNA, 921 bp, Oryza sativa
tgacgtaaaacacgaggactgggagatctgcttagctcctgtgcaggtccaaaggttggtgatatgagggcgtgccagttagtttgatcctgcaactgacaagatatgcaaatagtagatcaaaacagccgatcggctgacaagccgatggagtagttctagccgatagccgataatagccgatgccaataccagccgatagcgatagggtttaagcaatcggctatatgtccaatgtagatgatgatataaaggcaatcggctgatgatggtgtaataaaataacaatataatccagtataaattaatcggtaaataatgatatgataaataagcatcgatccgaaagttaaagcacacatcggctggaggtacgatgtcatgaaatccacaaagattagattaaacagtgaaacctttgttgtcatctgctaaatccaacttatatatatatatatatatatatatatatatatatatgcaatccttatgagccgatgcaacgtccagataactcaccggctgaaaccccgatgaaacccttattggcattcaagaagcaggctagagattatggttctaagcacgacttagtagatcaaacttaactgatacagcactaagtatgaaaaagaaacataatatctagacaatcaagccgttgactgagttttcagggtggtagatgtataagttaatctaatctagcatgacgatttagccgataccggcataaaccctaaagcgagaagcagccgatagagctaaattgagatgctaagactagattaacatagacatatgataaatagccaggcaaatatattatccaaaccagagtaatccaagaggtcgaatgtatgatgcagccttgaacgacgccgacgtagacgatacaattgcctggaccggtggaacatt

SEQ ID NO: 42398 - DNA, 1092 bp, Oryza sativa
agagagagaataacttattgatgagcactgatgaggactcaaatttgacactctcaccctttcatacaaaactaatttcacatttgacgaaaactaaccctcacctcattaccaggatccttcgtcccaaaacaaactaatgtaatacgggatgtgacacattctagattcgtaatattagaatatgtcacgtcacgtactaagtagatttatttattttaggatgaaggaaatgcgtgtttataagtttttgatgggcctatatctaacaaaaagaatatcaagagattcagcgactctgccagatttgtgttcgagccctcgtcccctttcttcttcattcgtttttttatctcctgggaggaggatacacagcactacgttcactttcttatgttttaggcctattaattaaaatattaagattaaattgcaccttggacgagctattattatcaagttttatcctaaaccaatctacacttaatgtttccttttttttaccatgattctattgcttactgggctacccttctcttcacccatctgttgaccaaaactcaccacacacacgaaggcctgagatgtctgcttagatttagtgcaagtcctatcaaatcgggtttaggacatgctagttaatttgatcctataactaataagatagaaaaaaaaaagattagatcgtggggccaattgaccatagggccaatatattatcgtaagcccaaccgatgccgatggaatttcggatcgatcgctataacaacattgaccgaaacttagatataatatatttgtaaatcatctaactttattatagccaatcttaatagaccggaccaaaccgacacaatataagattgaaagtaacaaaattgaatctaaaaaatatatatatcttcgagatgcatgccgatgtgccaataatcaattaagacttatcattgctctatctgaagaaaataaactaacatcggatatgacaacttaaaatataatcaccaacaatttagggttattaaccaaaatctagatagatcgtacccaactgtgacaatataagattgaagataataaaacatcagctag

SEQ ID NO: 42399 - DNA, 692 bp, Oryza sativa
  unsure (1)..(692): unsure at all n locations
tttccataccagattttacattattggaaccaaacccaccctctgaggtntgtgctgcccgctgactagagctaattctgtgtgccccagcatcaacattttgcatgttttcaccgtagttgcccgggttcgatttcgaccaactcaactcccttctagagcctctatcatgtgcatctttctgcatggaaaattcattggagacgtaagcaggagcgttgtccatttgatctgagatggccccatttccacaatcatttgtctcatctccactatcggcagtaacagttgacaattcagaggcattcttgcgggcacctttgcctacatcttctatggccttgctagctttctttccagctttctttgttgcaaacttcacatgcctaacaataacgtatgcatgcttcgagtccaaatgtgggccactttccactatgcagacatcttgtatctgttcaatttacgacatcatataaaaagatcattttacggacagctccgaaaatgtaaccaggacatcaaacagttgtcaaacagaatttgctgacattggttgcaagcaacatgaaaataataaggagcagagcactcacaagtcctaacaaccgagatagtggccctcctaaatcttcttcttcattacctgagggcatcgccatgcactgccaaataggaacgggctgcaggaa

SEQ ID NO: 42400 - DNA, 591 bp, Oryza sativa
ttattcaagaagtaataccctactcctgtccggggatgattccgccgagtatgttattgatcgtatgatttgggaaaaagagaatcatcccgagaggaacccggacccctccttatataggggaagggatccgtttacaaaatacagtccatatccctaacggaatatgcgattacagataaaatacaatcgtaaccgactaagatctcgggtatttccttgacatataagttagaaactaacccgagtcctcataaagatattctatctatatttggtaccgtatatccgactaaattataactgtcatgttgatatggggtatccataatctccacagtagcccccgagaccttcgcagttgacaaaatagccttctcgaaacaaaaaacagtaatccgagtgcttcaatttaacttgctctagcttgccgagtgctaaaagactgtgaagggcaaaaataaaacatggtgcatcgagtagatgcacctacttaggtgtagcccctgactatgtgattagttgaaaaactaaacatgtagtcaagaaccgagtggttttataaccaagcatgcatggtactcaataaaa

SEQ ID NO: 42401 - DNA, 1122 bp, Oryza sativa
agaacaagagagggatttgggtcacactgagccaggagagattgggagtgacctactttgtgtgggacccactagaatgaaagttctcttggttttgggtcaggcactgtggttcggggcaggcgcaggaaggggaaccggagggagaacaagagagggatttgggtcacactaagccaggagagattgggagtgacctactttgtgtgggacccactaggatgaaagttctcttggttttgggtcgggcactgtggagagcgtgtccttcctgccaatttctttgcttcattcacttttctaagaccgaagacacgctatacgtgtcttgcactactactgcccttatgataaggcagtgatgtgacatctattatttggcttggcattgacgaggttcgcctgctagcctgccacaatgtttaggaccatcaggcatttttttttcaaccccaaagattcgactgacaatgggagcgcaagttgacgataatgggcgtgtatagttccccgtccaaattttctttatcgtatacggacaacgtagactaataacaaaacaaattataaattttacctgtaaactgcaagacgaatctattaagcctaattaatccgtcattagcaaatgtttactatagcaccatattgtcaaatcatggtgtaattaggttcaaaagattcgtctcacaatttacatgcaaactgtgcaattgattttttttcgtccacatttaatgctccatgcatgtgtctaaacatttgatgtgacgaaaaagttgaaagtttaaagggaaccatacacagccttaatcaagaaatttgatgttgcgctacagtaaacatttgctaataacagattaattaggcttaataaattcgtcttgtatcctgacagaatttataatttgttttattattagactacgtttaatattttaaatgtgtaccgaatatccaatgtgactacaaacccaaaaattttcccaaaccatacaaggcctacgtactgaacgtcacctacttcgtcgatttcagaatgcagatgttaccccgatgaaagaaataagcttttaaaaaaatctaccttgcctccaagcattaaccattagatcaatgtgt

SEQ ID NO: 42402 - DNA, 734 bp, Oryza sativa
  unsure (1)..(734): unsure at all n locations
aatggcctccaatacctctccagaatgatagctattatgttgctctttattttgctgatacagtctctgagagttcaaggacctttaatgtatatataaatgattacagcttctatgaaggcctaacagtaacatcagctggtctttctgtctttgcaacacaatggattctctcaggcttgaccagagttattttggctcctatttctggccttcctccacttatcaatgctggtgaagtctttggacttttcccactaggaggatacacatttcctcgggatggtatgtcagtcgctacatatattttttcttccatttgtatcttttttcgtaataggttaaactaaatgactaaaattctgngcagtatgatccaatacaagctgttgctaaccaaataatcaacttatgtattatgcctttggtggcacttatgtggccaacaaatcatcattatatatgtagcagcaggtcatcaaaatatgttttatggaaatttgttgctgcatatcaggtcatgggactcgcaaaaaaaagggccacagtacatttcactttgtaactctgtgaggtgttaatgttgtagcatcacctatatttagataatggaagtattatttccagcctttgcaccaactaggatccatacatccatatttgtggacaccagaatttgaaccttggtgggtggattcatgcacccatgactccaccaccacaacaatggtgct

SEQ ID NO: 42403 - DNA, 5792 bp, Oryza sativa
  unsure (1)..(5792): unsure at all n locations
agagagagagagagccggggagggagggggagatgggccgagagggattcggcccatcgaacccgagggaggcaaaatagacttttgcggagggatttgatttgggaaggatttggattcgggattgaactcgacgatagatcggggatttgagatctgagatggcacggacactagacaataagcaaagaaacggatttcgcaaatagggtttttaagagatagtttttccgctaggcgccacgacggaacgggcgctacagaatttctataaaattcttctactaaattcttttgattcaaatggccacaggaatcagataagagatatactcaaacaaattttcctaagaggttagtccttttgctaaattttctttaaaacctagattaaattagccattgcagataaattttataggatttgaaaactccaatcctttaaataaaatgatcaaatagaaaaaatttctataaaattcttctactaaattcttttgattgaaagggtcttaggccattctcaacccaacacactagacatagtttccataagctccacatcatcaaaaaaactagtactagacactactcttacaatgcaaaaaccattattccatacttaaatttagtgctacttatctcacatgatgtcttggatattgtgtagaaccatgtctcatgcaaaacatggtttcctttgctttcctcatttattcatttgccacgtcacttttcatcttaggtagtaacttatttaatgctatagacaccattcttgtcattgggttgggaatggcattaggagtagtacgtccgctgtacgctgcacgagccggggagcccaacggttggtggctgcctgccttcgccaatttatttcgccgcaggccgcacagccgatcgatctgcagagcagcagtaaaaacgctcgtaacgacggggtgttttggaccggaggaatggcaggttccagatcgatgcaaattcgcggtgaattcttcttctgctactgctactgctgctgccgctgcgttatattagctgtgatctgggctgtgaagtcgctcgggggatagaaaaaaaaattgctcgtggctgtcaatgtgaatgtttgttggtgcagataggtcgttaggtacttgcatgatggtgagggttttgggggcggcttcggatgcaagggattgggttacttctagcacggttggtgttactacgtacgtacgtgcatgcgtgcgaatgattatattctagcttcaagtgcacactatctgatcccagatcaagtcgtggtagggttcatacactgggttgtcgatatatcagttacaccttacgagaaagatatggtgaatgcctgttttcagacaaaatatcttttttttttagaaacacaggccaataaatctatgggtatatctatacctttgaattctaaggttgtgtttgtttctaatggttgggaacctttctcctctagcacgtaaaatgaaacgacggtgttaacacacgattacttaagtattnctaaaaactttaaaaatagatttatataatttttaaaggaactttcctttataattttttttgaaaaaatacaccattcagtagattgtgaagcatatgcgtggtaaaagagagagtagagattggaaaagtgtatgattaattaagaagagaattggagaacattaaaaagataagaaaaacgagatgaaacattatagtatacgattaattaaatattaattattttaaacttaagaaacagattaattaatactacctccatattttaatgtatgatgccgttgacttttttttcaacgtttgaccattcatcttattaaaaaaatatataattataatttattttattgtgatttgattcgtcatcaaatattctttaagcatgacataaatattttcatatttgcacacaaaatttgaataaaacgaatggtcaaatgctagttaaaaagtcaatggcgtcatacattaaaatacggatggagtatgattttctaaagcaattttcgcatagaagtttttttataagaagaaacacaccgcgcagcactttgataggcgtgcaggcggaaaatgaaaaattttcctctcagaccctgtttagatcaatttgatgtggcaattttttttagaaaaagttttggtggcaaaagatttggtattgaagttttgctagttggtgtttagatgcatggtaaagttttaccattttactagtaaagacagagagagcacggttcccaacatacttttttggtaaattttgctactctaaactttcaaatgacaaataccaaattgccaaccttttctaccagtgtttagattcattttagcaaaagtactctaaaacagcaaaaaaaaatttgttattttggagaaactaaacaggacctcagccatcttgtgccgaacacagctaattaattggataattccaaaggcgctccgatgtaaaccaaaaatcttacacattgatttcatgtattattgcgaccatagatactgttgagagtttgtaataaataaatcacgtaactggaaatagtgtgcactctactttactaattttgaaatttgtaattaataaatatgatatcgtaatcatttcgaactctcagttagtttagtgatatgtaaaattaattataatattccaatttactactctgctatgttccataatatagtaaccgagaataagacgagagtacaacaaataatctagatagacgtatccagattcgttatattatgaaatatgtttcatccaattataggctgctataattacccataactagttagggctaatgacttatctgtcgtttttagtctttcatgggtaggctcatggggggcgctgatccgcggctactcgcgcagccgtgcatgcgcaatcagctacacccctctagtagatgtatatacagatgtatatacgtatgtataacatgcatatgtataaattttgtatactaaggctgtgtttggcattccttattcccaaaaggaacagtgcgtatgaaaaacgaagcgattcattagcacgtgattaattaagtattagttatttttttcaaaaatagattaacttgatttttttaaagcaacttttgtatagaaactttttttgcaaaaaacacaccgtttagcagtttgaaaagcgtgcgtgcgaaaaagagagaaatgggttgggaagaaggggtgccgaacacagcctaaaaagatcaaaaaaactgcaaaagataaaaaaagaacaaagaaaacagaaaaaaggaaactgcgcgccaaagaaaataaaaagaaaagggaaccacgttgtccgccgcccccactcttcgcgcgtgaaacatgtcgagtcgtgtgggggagggcgcacgagactagttacgaattagcattcacataggagaaaagtagaggttatcgtaccccggcagtataagcccgataaccatttagttatcaccacgaatagtaggaaaattggacggaatttattaaataaataaatatcgcttaaatgtattttgaatttggtagagctattaggctaccttaccgttaccgcacccaactactacggtcggtaactggcggtcggtaagagaagctctccttgctgttcccatctttccaatgccacccaccgtgctatgtttaaaaaccgtgaattaattatttctccgttcagctgaaatcgaatcattccatataaaattcttgtattctaaactggcgcttgcccatgctgtgcgttcgtaaattgtgttttttcggaaagagaagtggctcacttagtgaaacaggacttagacttacgtagctgggcgtttaagcctccttgagctgtgttttttatcttttgtaatcaaggatctgtttgtattctgtttttcttcttaatcaaattccggcagagctcctgccgtcgtcttcctcaaaaaaaaattgtgttttttctactatattcaccacctgaaacgtttctaacgatagcattcaaaaaaaagctggaaggctggaaattaatgggcagcacgtttgccttgtcccgtcctgttgcacatatttgtacagaagtgggccaacaacctgaagcctttgccgttatttggcgacatctttcggatgggtgttacatgtagtagacgctttgtgtgtcaggtcaggctgcccctctcaacggtaaattattctccctgggtcaccaaatccctttcctttgtctttacaatcacaagcagagacggagaaaaggacaaagcagtaggaggctgagctcacagttcctaattataattgcctgtgtttctagaccgtcgctgggatatgatgcatctggatctggacggtaggtagctgtccgtgcctgaatctgttgctgcccacacgaagctgcgtcgtcgcaccttctcggctatttcaggacttctgtaaagcgacagtttcatcagacggtgagtattcagaccatcagtcatatttacaattttaaactgaagatatactccctccgtaaaaaaaaaagatttttttggacggggagtataacttagtggtcaaaatcgtttttcatgtactaactttgaaaattctatgatcaaagagtataacataatctctacgtctcaaaatatatataaggatttttttatgaatcttgataatttctggctataatacctgttcagattcataagctagaaatgattatattttaggccggagagagtagatcatcaagatcatcgtcatatttacaattttgaatctgatcaacaggtatttattctatttgtaaatcataaaaaaattgaatggaaacttctatgctcttcatcaataaaaatgaacagtactcctacaacttcaccaatacatcaatgatgctttctcatatagattgttcttatgttcattagctttagcgacacggaaaatgttgaaaatacttgagttggggatatggggaatgcatgcatgcaggcagcaggttgtgtaccggcaaagtgccaaaccattaaagtttgcaccattaattgggggcaacacagctcacaacctaaccatatgccacgagccggtgtaagcgggattgggagccttcagtcatgaacgagccatatttttttttcttttcttacaaacaaagaaaaccacttggagatagggttaattagtcgtcaaacgtatgtacgacttgtagagctagctggaaacatttgatagttttagttgataccctaatgttatggaatgtagcagcatgtgcataggagtatataatactgtcacattgctacgacggttgttgtatgtactaattattaacaagccatgtgaaaaatacactaaactaattgacatcgacgcttatttgtattaatttcttgagaatctattgggtgatctttaataaattttaccgcgtttagacaagtctgcaggaaaatgtgtgttattacgcgcgtcgacttcacttgattggttttgaacccctgcagcttaggcaagtctacagcttgagattggagcaagaaacggtcagttcattaaataattatcaccgctaattggtcccatggcatgtcaatttcgcggctaatcccatcgtgaacaatcgttcaattcgtcaattagagtacgtcactgcatacctgaactgaaagaaagttgggcatgtgaacagtcaagtcgtcatagggaagaaaaatactgaaagtaccacgcgagacaaattcaaaggatactat

SEQ ID NO: 42404 - DNA, 2064 bp, Oryza sativa
atttgttgaactaaacacaatcttaatatgaataagcggactagtttcagctatgcttcagttttcgaatggaatcgtttctgtttctgttcttgcccatgccatatgagcatggcaatttcgcctacatagttatgcattgcatatgcgttcttgttgagaggtaggtttatacaagtgtttgcagtttttaattttaaatctgtgcaatgaatatgttcatttaaggatcagtgctatcctgccttcctatcttcattgccaggagaggagtatatatttttgttgcaacagcaaatctgaagggtccaaccggagcctggaggataccaagtggtgtcaacctatggaacctgttacctgtttagtacctagggtgtgtttagttacgccaaaattgaaagtttggttgaaattggaacgatgtgacggaaaagttggaagtttgtgtgtatagaaaaatttttgatgtgatggaaaagttggaaatttgaagaaaaattttgtaactaaactcggccatagtaagcaaaataatcactatcctatgagaaaaatatctgactgtcagaaagttgtaaaagcaaggtgctagatggaagattcaagattctcttgtactgtttgtactgctcatcgtatggcaccatcaggttgtaatacatcacatcacactgtcagattattactactatttgttttatatatatctaccataacttgtgatgttattacgtgcaggattaattgggacatgacaggttttgttgttatcagaggctcacctgtgcagtttagttgatgaggatgcttcaaatgatataaggttatcttcaaaaccaaggtaacttatttggacaattcatacggaaataaaaccactaaaactggaattatcgaagggcaataactggaattatcgaagggataatttctttgctttgtgtgcgttgatttgctgtgttctgtctggagtagtcccctttttttttaacaaactcatgcttaatagactctcaatttgaagtttgtatgttaaattatagtggattaaaattttatatttcatctaaaaagaaaataaaatgattcatcaaatcgcagatccatatcaatggatttgtggagctagcaatacctagcttcataaaatcttggatccgcagttgtgccaaacaaacacttgagaaatcttaagatactgaggctgtaagacggccgtgatgacaggggaagaacgttaataatcacaatctggatcagctgaccactgtcttgtgcagtagggtagaaatgatggaaacagctgtgacatgacacctctaaacttgctttgttacccgtaattagcagtattattgatttataatcctataatttctttttaatcatctgcagagatgttcatcttaggggccgtttggaacagttcggagacagtaattttacaggaaacagttcaattctcgtaggatttatgaaaaaaaaaatctgcatttcaaaaggaccttaactggtcattagtgcctttttcgaaatttatctctctccactcagcaaacaatgatattttgaatgttgtactgtgttttggcgaatagacgctcaatctcacaggatcctaatgcaaacaggacaatgacatatgcattgtgtttcaacaaacaatctacaaagtccaaactagatatgcagtagcaaggttttcttttttataaaaatgtgcaatggtattgagaaagctatcgatgttattggtgtggtggtgaagttgtgcattagtgtggtggtgaagtcgcatgactatacttacaaaggatcaaatctttgtgctcataggtattacgcatatgtaggtgcaattttaatagatttttagtgattatagggatcggttgctagtctatgtttctttaagcatgtgaagcacactcattggcatatgagtgcgcatcttccattaaattttatatattaagaatatacagacatgtactccctccaacttaaataacttcatttttcaccatcttatttgtttcaaaatattttttttcaaacaat

SEQ ID NO: 42405 - DNA, 2166 bp, Oryza sativa
actccaaaacgtaatgtgtgcatgataggtagaaccaggtattaatagtattgtaagcaactattgtatgaactggttattatattggctatagatgatttggagctagtagttagctctactaataaacttgctcttatagtacttgccctcattggtgcgcgggcaatgcattgcagaccgtgaacgctaacgcatcggcaaacacatggcacacaaggatcaagaaaactacatggttaccgggactcaagacatgtaccaccacgcaagggtgtgtttagttcacatcaaaattaaaagtttggttgaaattggaacgatgtgacgaaaaagttagaagtttgtgtgtgtagaaaagttttgatgtgatggaaaagttaaaagtttgaagaaatagtttggaactaaacacggcctaactaacatagttgtttaagatcagttgcacaagcaaactggcagatttgttcagaaattcagtttaggacttctgggtagggaggacagtaaagctctactagtactctatcgtcactcatgtgtgctagcatcatcgcgtggaatcatgcacccaagagatcccctcgtttgaggccatcagcaatgtccaaatcttaccaacggggctctcaacaaggctctgctaactcaaccaatcttatctatcttgctgcagctaaaattgatgcagcgtttcttgttgacacccagagccattaatttttcgtatgtactggcctaacggaagtgttatgtactggagagtttccttgtcagtgaacagatcatagattttttttagaaggatattttttacctagcctctacatccaaccggatatatacgtgttatgtactggagagtttccttgtcagtgaacatatcatagattttttttaaagaaggatattttttttacccggcctctacatccaatcggatatatacgaccattgaaataggtaacttagccccgaaaacaaactaatcagataacttagctctgcaaacaatctaatctgaaatttgcttctataaagatttgaactcagaaccttatcatactacgtaggtcactgtaactactagcctacgtaagcatgccggcagagtgtgtgggccaccgagtttccctctcggtatatttgtcgcacgtccacctcggcgaagcggcgcagcagttcgaggatctcctcgtgcgtcgccgccgggatcgtccctcggacagattgatcaagaagaacttgttctcatgaccaataacttcattaatgaatctgacggcaacatctcttcagggagcctgatttccccacatttgcaacagtggcagttcatagccaaccttccagtccattctccaggatcctcgcagcttgattagagaccaggacctgatgacaattgacaacgcaacctgccgcgtcttgtgttcagattccagatgcctctcaagcctatggaactgtaccgcatgttacaaacaaagcttcgatcgaactctgctcacatactagcttatcatgaatgagcttaattagtgactgtttcctaatctctaacctagcataagccttgaaaggcacaccatcacaagcgacagtagaagctcttttttagtctttctccaatccctcatttcatctgaaacacatattgtagccatctctaagcttgtgccctcttttatccttcagcacattggacaggtccaataatgaatatctgcagtatttatgcagtatttactgtttctgacaaacttctactactatgcatgatatgtgctccctccgtctagtgctgtgtttagttcctgaaattggaagaaatttagggaaagttggtagtttggaaagaaagttgggagtttatgtgtgtagaaaagttttggatgtaatgtgatgtgatggaaagttgggagttggggggaagtttggtgtgagttaaaccgggcctagaaatataggggacttttaagtactcgctccgggctgtgtgtttagttccacgttaaaattagaagtttgaagaaattgaaacgatgtgacggaaaagttggaagtttgtgtgtaggaaaattcgatgtgacggaaaagttggaagtttgaagaaaaaagttgaatctaaacagggccccggtccctaaatataaggaattt

SEQ ID NO: 42406 - DNA, 1151 bp, Oryza sativa
ctggcttcttctgctgctgaagaaacactgacaggcagctttaatccagtccaagagcgcagaagggcacgtgagaaggaacttatggatgcatggggaggagtgggtctagggaactccatgaagcctcatctctcgaaaattgagaaggacaaggtaattctgtattactcatgcattatatgaagttactaacctatcatctataaagtataaacatgtcaaaagaaccatggctcacaatgtctccactggatttctcaggttgcgtggagaaaagctgaggaggaacagaagcagatgtgtgctgcaaatgagctataaccatagctcacaatatttctactggattttactgtatgtactgtttgttgtttcacatatacacttccagctcggaggagagagcatgccgtcgtcatattctctatgcctgtatattctactactggtaaagtgaacgttaattctgggatcttcatatcagaaaacaagaagatcagcaactttctgccaaacatttgtatctttgatatttctctccttagcttctatacacccactatgtcgtgcactagcttggcatatcttgcgtgcttatccgcggaagcatatgcgagggatcaacatccagggattacaggctttctctcccaacgccgcaaagtttgacgttgtcatcatctgatcatcaggttaatagatgggtaccctgtccctgttagatatgatctagcctattctatctctttatctctgcttgctgtcttgtagtccacaattactgctatttttcatgctctgtttttcttgctgcaatgcatggacaagggacaatttcacatgaaattgactatgtttgagataaggatgctaaggtgatatataaaagctacagtcactattgtgggtgatatagatatttgtttatcgatcactgtcgtatagattctgtttattattgaatgtctggttcctttagttgagcataagtaaaccgatacttatttcttgcgtattcgtatgcttcatcagagatagggacgaatcagctgccaaatgaacctccatttatttatgtgtgttatctccatttccattctctctttgagattcttcgcgttgacaactgttttcatccttttgattca

SEQ ID NO: 42407 - DNA, 608 bp, Oryza sativa
cttgatgcttaccgaagggttcacggatcgtggcttagctgttctacaaaaggggaaaacaatcctacatgtgctacttctccgcaactgctttcggaccaggaggagtgcatccatcaacacgacccctatgactggggcgtatcctatatgttatatgtctacagccctacacagtcagattaaacgggggactctatacttgcattacactgggtggatttatcagaagccatgcgaactcatgcctactttcaaagtcgtgcattgctctatcgggtatgaagcatatccccgagtggaaacgattaatccaccattacctactgaactataaagactggatattattccactctccactataagtacacgtggctacaggtggtgaactacactatgactcgattgggactcaatgtgaacggcactcacaaggatacactgtcggtactgactctgaacatctcctcttgaccatcgctgatctaacattaccgatctatcgacctgctgcgcatactacacatacaggtacaacgggtaacataggtgtagctatgccaactcacatggagtccatagatctgtgttgaatcataccaggc

SEQ ID NO: 42408 - DNA, 647 bp, Oryza sativa
cactgcagcgccacgtccaccaccgttggcatatatatatgacaagagagaagtgtcacaaggaaaggtgacggggtgcggtccgcggggcagctagggaattagtgacatcatggccacatgtgatcagctctcctatacttgggcatatcgaaggaagcttaagaggttgcggaccttctatttaccctagaaccattgatgatcacttgccctaagatgtcgctgccctccaccggaacaacctgagcccgagatccatgtcagcgccgcatgagccagatctcccttgcagtcgccgttgttgttcccgatcggtacagccccaccgtcatgcctgacatgatgggcctttgtcgtgctcaactagtacaaccagctgttgaacgagttgtagtgctacgttgactaggtcaacgtgttacgtagaccccacatagaatgaaaccatccaaggaggtaaaacgaactagtttttttttacgggaaccagcaggagagactccaactgaaatgcattgcaaaaatcggagagtatttataaaagactgtaccgcggtggtgttaggggggagataaattacatgttgtcactacatgattgccatagagggcagtcctgaacttttacctatacaaaaataggg

SEQ ID NO: 42409 - DNA, 1046 bp, Oryza sativa
ctttctcacatcaaccaatcgcaacactatcttatctgattttatcactcaccttaaccttaaggtctgtttggtagagctccaactcctaaatttaacttcagaagttgggtctggagtggagttatgtagcagcataaacccaacttcatctctctagttcattttgtgatagggttttatccagtttcactaccattttaggtggagcttaaactatttggctgaactccaactccaaaagaggtatagctagagctgtgctaaacagacccttaatatctaaaatccatatatcattatgttattggaggagaagggggggaggggaaggggggtgggagggtatattctttcatcaattttattttctttgtggagttgggaagggagaagccgagtaataatagtcacacccatatatcttagatctgttaataaatttaaggctgtgtgtgttttataacagaagtcgaaaatgtaattttttttcattatctaaaatataccatagatctataactattaggaaggatgagttgggttctttgctagatggaataaagaagatgcacaggcgatgattttgcattttaatctcaaagtacagcttccctgcttctgacgcctaaggattgtttaatgatgtttttgccatatgagaggcaatcaataaactcatgcataagcttgcttgaatcactatcaagctgagagaaccaccctgctaatattttttttcaaataatattcctatttatgctaaatatgactcttccttgagctttgtaggagttctaaactttcacaaattttgacaatttgactctttacaaaaactaattatacaaatgaaccgtggccaaaacttatttcaaaaataaccctttttattcagcgctaaaatcccatggcgctaaacttagacgcctcagcgccacgtcaacttgcgctgaatgtcgtgccaccgtggatgggagtctgagtcggcgtgccaactcatattcagcgcaacgttatttggtgctgaggtgtctaacttcagc

SEQ ID NO: 42410 - DNA, 896 bp, Oryza sativa
tcctgcagccccatttggcagagcagaaaaaaagaaggcagagcatcataggtaggaaagcactgaaaagaatttgacaagccaatggtcaaggaagaaactgaaaccttctggcatgtaaacataccttttcttcctctactttaatgcattaggcagcactcttgccataattaaaaaattgtttgtgattattgatagttagtactaaaaagttaaaaagtgggtgtaaagttttgtgtatataggtgctcctttatgttgtcggtgcttttttaattatcccgtgagtgcactatttccacggtatcccgtggggtagcagccctcattgaaaaaactgcagaactgggcgttctccgaataattaagtgctacttatcttttcccgatttttcaacggtctggttgaaaaaaatatactcccttcgacgccttcgtcccataatacaagggattgattttgacattttgcttgcactgtgccaccactcatcttattttttaaaaaatggaattattatttattttatttgtgacttattttattatccaaagtactttgagcacaacttttatttattttatttgtgacttattttattattcaaagtactttaagcacaactttttatgtttatatttacacaaaatttttaaataagacgagtggtcaaacagtacaagcaaaaagttaaaattccttatattaaaatatataagacagagggagtattaattttagccgtacgagatttatcaactccgtcgaaaagttaatcaagtacatttagtactccgaatctctcacggaccagaatttgtaccagcaggtgtccctttaaaaaaaagtggtatcaaattttactatttatttctcgtcaaaatctggtgtt

SEQ ID NO: 42411 - DNA, 629 bp, Oryza sativa
gcaatctctctctctctctctctctctctcgttagttctctgtatgcgcgtgtctttcttcaggctcgtgtttgggcggccggttggttctctgctcctgctgatagtgcttgttcttgtgctactacggtttgattttgcgagttttgctcggtggcaaaagctagtcgtctgttcgttttctacgggcaggctagtggctgtgaattggttttgctcgaggtagagcgtcaaccgacggaattgttcattgtctcgaaaagaaacaacagaattgttagagcaaacatgtctttgtgtatatgtgttctgctcaaagtaactcgcctttttttttctagctttggttttatcgtgctgctctgcttggccgaagtgctttcttggccattgagagtgcgacaaatacgtgatatctttgcagttgttcattttagagaacttcttattagatagaaagatctggttgtggttactgacttacccggctaggaaaattgtttgttatcttcgagctgaacatggaggaggtgccgagaggtacgatcgcaaatcacgcctccagactcttggacgagcacactcgattagatcttgatctgcagttcgtagcagtacctgttgattat

SEQ ID NO: 42412 - DNA, 617 bp, Oryza sativa
agtcaagttggagatagcttgtactcggaacatggttttttgccacatggacgataacatggctaaattttctttttccctttttttattcccatctttttctctccttcctcacctcgcgtggagaaaaatgtggcagatgggagaggaaggaggcaaagtggagcaaaaagaagggatgagaagggagaaaacaagaaggaagaagggagaaaaaaataaaaaaaaatctatatcatcgtctacgtagcatgccacgtaggcaagatcacggtcaaacgagattttggaccgggatgatccattaaaccaagtttatggatctcgacttgcgttttgcaagttcgtggacctaagtaaaactttgttacaagtttaagaaccgctagtggaatttactctatagatattatgcaagctctcttgaatacgcatgtagcacatatgttacataataattagaactactggaaaaggatgttggtgtgttattattttatattcttttccacagttgatgtttgtgctattaatttataaatggaaaggatgttgatgtgttattaattcatatgcacaacctcatctaatactcctatataaaaaagaacagtcct

SEQ ID NO: 42413 - DNA, 595 bp, Oryza sativa
aaaaaacccatctttgctcagggaaaaaaaacttagcaatatacaacaaggagtaagattaacactgacgagaatggagaaaaagcagcaaccaaatcaagtgaatctgcagcttgaaccagagccaatctcggtgccctcctcctcaaaatctccccccacagctctccttttccccacccaagagtagaaatttgaaaaacacaaaagaaagaaagcaaaaggacacagatgcggtaggtgaggtggggttttgctctatccccagcaaaatgatgcgagatccgttaacccctggaggcaaaagcaagaagaggacacaagcagctcagccaaaaccaccccaaaacttagggccagccaaaaacaccagcatacaaaaaagaaggggaaaatgaagaaaaagaacaaagatttgtgcctattagatgcggggttttgccctggagaaacttaccggcaggagaaccgcggtggcggcggcgacgggactagggtttagctggagcgccgccgacgagtaggacaaggaggcggagctggagagagagaagggaagaaatgttgggttttcctttggagaagagttgaaacg

SEQ ID NO: 42414 - DNA, 680 bp, Oryza sativa
ccaggaatatcagtgacgatcctgccagggtcaatatattaattatgttaaactaaagcgcatactttatcagattgagcgctattttatgagtagctgagcatatattatattagtgatggccatttgtgttggttcaggtaggaacttgcagtggttgtctaccggagggtgtttcgctaggtaagaagttaattattatctacactgtacttcctccggtcatgaaaatatgttgtcttaattagatatgtttcatgtcaaactttaaattgagtctggacatccatatataatttttaaaatatttatattggatgcatgaaaattatattaattgtgtgtagattgtcctaaaaaggtacttctataaaattatgagttcatattgtttttcaatgttttgtaatacaaattaacaaggctgtgtaaatgtccaaaacataatgtttttttaccggaaggagtagcatcaatgacctagctaatttagccatgtatctgcagatcacttctggtttatattttttcatggatatttgatactcatgaggtttattcatgttttaacaataggagccatctatggcctcagcggggattaattacttgtaaaataatgatatatatttaccagtggaggtgctccctcaggtacggatcactaggccctggcacgt

SEQ ID NO: 42415 - DNA, 2041 bp, Oryza sativa
aaacccgtttaaaatgagacggagggagtaatcaccaggaacaggtacgaattacagatcaagatctacgcgagtactcgtccaagagcctggaggcgtggtttgcgatcgcacctctcggcacctcctccttgttcaaatgttcagcccgaagcccgaaggtaacctaaacaattctcttagccggccagccgggcaaccgaatctttcaagggaaaaaaaactaaaatgaacaagtacaaaggtatcacgttcgctctctcaataacaaagaaagcacttaaggccaagaagagcaacacgataaaaacaaaagggcgcaacaaaaaggtgagcaactttgagcagaacaaatactccctctgacctctgttcttaaacaaaatcatgcctagcatcccccgaggcaacttagtagtagaaaggaaaaaaaagtcttccattaatagaaaattgggtgggtgggaagtaaatattataccagagataaaattttcgattcatacactgatagagatgaaattactccctccatcctaaaatatagcaacttctctgctactttttttccctcaatcaattacaatcattcccggtatactttctcatctcaattgatcataacaatttattttcaaatctcaatttcttaactccacgtaaaatttcaaaactacttgtatttgggattaatttattttgaaacaaaatttaaacttcaaaaatcccttactttggacagatggagtatataaaaaaagacatgttttgctaaactcaaaatacgccctctgctctaacagttctgttggttgaagctctactcctctacctcgagcaaaaccaattcacagccactagctgcccgtaagaaacgatcgaacggatgactagctttgctaccgaacaaactgtggcaaaatcaaaccgtagcaaaccacaaaagcaagcacgagcaggcgcagagatccaacaatcgtccgcacagacacgagccaggagaaagacgcatacagagagctaacgccggagagaccgatcgagagagagagagagagagagagggggttgcacgtaccgccggaggaggccggggccggccgcggtggccgcttcacgccagacgccgccatggatcccctgcagcggcggcgaggggcgaggagcgagttccgcgagtgggaggagaagaaactccagctgaagctaactccgcgcgagccagcaacaaacgacggcagtggctttatgaacttcccgctgtgtgccgacctgcacggcgctcacgttgggttaaaaccccagcatagtccactgtatggggcccacgagacagggcccagagaaatcgcgtgggggccactggcgttaatgccgagaagtcgttgtctctgctgtattttatggtgtgagcacaggaaaaggaaccgtggcagaagcaaacagcagctcggcgacggcgtcagcagctcagtatcgacaatgtttcagaaaatctttttttttcactttaaaaaaatggttctgagtcaaaattacgtggccaacctgatagacttgtaggtgcatcagtttcagtttcagtggtgttcatttctactgaaaacagagataaagttaagaaaaaaaaattaaaaaatattattaaatgattaattgaattttaatttttataaacttataaagtaaatttatctgatatttcaaagcaatttttctataaaaagttttcacacgaaatgtaacgtttagcaattaaaaaatatgctaaagaaaaccaaggtaaaacctatcataattagaaaaaagaccatctgcccatgccaaatccagcgtttggtacgcaggctagcagcaattcatagctcatggccctcgtcatctccgagtggcaaacaacggcagccaccggcacgatgccgctgggaatgccatcggcgaccaaggaggcaaggagcaggtgggcggccgtgtgaagttcgtgatggacatgtttagtaactaagcggttgcctgattacttggaaatggacatgacctc

SEQ ID NO: 42416 - DNA, 1082 bp, Oryza sativa
atggatgaagtgatgaacttgtgcttgaaaatgacactccaagttgatattgtttattttgttttgctctaaactctcttacatgctgataaaatgatactccaagtcctatggttaatcttttttggaacatctttatcccaacatcattttctttgcgggagccgtcatcatgctttcagactctactaattaatctgcaaagtgtttttacaattatccctcgctacaatattttaaagtcatttttttagataatgaaatattaaattcactttcctttcgatgttctttttattacatttttttagcagtacatatttctgccactgtcagctttatcaatcttggtgaccatgtattttctttacagatatgtatcgaagaagtcataagtagatttttttgctatttccaaaggaagaaattagctgtgtgtttagttcatgctaaaattggaagtttggttgaaattggaacgatgtgacggaaaagttagaagtttgtgtgtgtagaaaagtttgatgtgataaaaaagttgaaagtttgaataaatagtttggatctaaacaaggcctggtgtgttcttcttgacattttctcagctgtagaggtacaaaaggtgtgcgcttttgactctagaactgaactgaatgatccatgcagttgattgtgacttgataggatagtgaattatgaaaggggtgtacattttagtcttcggactgaccacatgataactctgtacctagccgttcatttatagtctcgcctgatttttttttttttgatccgtcactgagcagactatctctctgttagtatttagacaacatgtatgcgtcatattagaagaagatttaattttttttgttacgctgctttgttgtggaatgaaaaaaacgttgtagaatatatcactatactcttgttgcatatggaacgttcaagcctatattaattatttaatccacgtggggggatttatttgactatggatgaagatgaacgtgagctatagactgacaaagtccgagctcacatgatgtccatgttacgttgcttgtccttctctatttatc

SEQ ID NO: 42417 - DNA, 1169 bp, Oryza sativa
acaagagatgagggaggttaaatggacttattcctataaagtataccgccatttcgatgtctggtccctgaaggccctggacggctgcacgcgccgatgctgctgcccaatagccgctcgcccgtggcccagtggcccgtcttgctgctgcagtgtcagaccagcccacattttcctcccccatacaatgggcccaaccacccccgcccacagggtggctttgccttgctctcacgcactcacgctggcctccccgtagccgtcaccgtcgcatgcgtcctttgcctgcctgcctcgtgcctgccacctccgctggacactgtggcagttagcgaggtagctagtgagccacggttcaagaccgaaccctctgcatcgctgtgcaactgtgcatgccgtctctctctctgtctctcactctaatccgaaacacaaccacccgtgagtccgtcaccgctcctgctcccagtagtccagtactctcgctccactctcctcgccgagtcgccgtcgccgcctcggccagcttcggattgggttccagcaccggggcggataatctgctgctgctgctgctgctgcaaggtcagtctcgcgcgcgctcccttccccgggttgatcaccgcgtgcggcgccttggtgacgtgaaagcgatcccgcgcagcattacgtagttttaattaattctcttgtgtacttcacgctagcttcttgcgggtagtctcgatttctgtttccgtttctgcttccgttcttttctccttttggacgaatgcgctgcttcctgtggtgagagcaaaaggctctggttgcatgacttgcatccaaatctgagtaatttagacaatgtatgcagatcttctagcagcctggaccctagagggggatactatatacagtgcagttgtttgtctgtgagactgtgaaactgttttttgaagggagttatctgtgtaaatgtataatcatttcattctgaactggtcatgacatctgttgaacatcgcaaatgtggagtaagaccagttgggtgaacttgtaagtttagtaaccaactgaagcctatagattaggtagcctcatgtatgctcttctccatatgattcatacgggtggccctcgtagctccagcttcgttcttctgtaggtgtccaaatccgaaaaaagaa

SEQ ID NO: 42418 - DNA, 672 bp, Oryza sativa
tgcaacctgcggcggcgacggcgactgtgacctgcagcaacgacgactgcagctccacgtggaggccacagcggcgacgcctagaggcggggctgtgccaatcccggcaccaagtggcggcggcggcggctgtgttgggcggaagctgcaccaatccctccctcccatacttgtccattcttccccaagctgcaaacgtgacggttgtgccgaagacggcggggactgctgggctgcacaaatctctccccattcttgtctaattttcctaacaagatatgtgcaagatttttatatgattctcggatattgaatgtggtatggaactattgaatgtaatatcaagtgtctttgactctttgaactgtatgagaattgcaaaatttatgttagtttttccaaaacagctaatgggcttagctgccgctatagccagctatagctggtcgtagctgatggaaagcctagcagctaaagggcatatccggagattttaatccttgtttgtcatacctgatacctcattacctttagctgtctagtaagaagtcgtcagaaattggcaatcgacgctatagtctgccattggctctggtaagtggcaatctcaagaaaaagaaagcaggattataccattgtggttgtatcttcactcaatttttcatctgattg

SEQ ID NO: 42419 - DNA, 573 bp, Oryza sativa
cccgccagcgcatgcacgcgagacgagaaggcggcagcggcggcgacgcggacgccaactccgccgcctcgccctgctgctcggcctcctcgctttcctcctcttcctgcgccggcgccggctcatgcggcgtcgacgaagacgccgggtcgacgtcctcgtcgtcggggagtaggcgctacaccaggctgcacgcgcgcagggtgtgtgcaccggccgtgcgtggctgcgggagcgcgccacccggtgcgcgaggtggccggtgtcggcgcgccccggcggcgagccggcgaccccgtcccgtcgtgtgtcatggccgccaagccggcatatgtactactaatgttgacaatttagtagtgtacacagacgttcacaatttgacacaatgtaagattgaccaatacttttttgtcacatactgtctctaattgttattctagcttctggtttctctgattgatctgatatgctgtttatgcattggttcaagttcaatgaagggtttccaaaaccgccggttcgcgtggttaccgtagagtacagtaagagaaaaaccgtggtaacctcctt

SEQ ID NO: 42420 - DNA, 1210 bp, Oryza sativa
gagggccaccgccggccgccgcgcgcctctggttctccccgccagtcgccggaatacacctctatattaggagcagatattccgccaccgccgccgctccctaccgccgccgacgctgctccagccaaggttcagagaaaaggccgagggagagagagagagataagggagagagaggggaaggaggaagaagggaaggagagtttgcactgacatgtgggtcccactacgctgagtcagcttgtcaaccgggtcaacaacgccacgtcggacgaaaccgccagctaaaccaccgagggagatgatttgctctggttttcagagaaggaggaggcgttatacccagttttccatttgaggggtgttattcacgcaagcgcaagagatgagggaggcaaaatggacttattcctactttatacaaggaaaaaaactatacaacatttattttttaatatcggctagttcgattggtttagtcactaattcagtttgcttcgagcatttatccgctgagaaatatctcacaattgtttgggtgacgatctctgggtcaaagtcaagagtacatattaccttttttttttttgcttggaacgacatttaataatatagtttttaacaaaatatatttcttcttctttgcaggttatctttttatcatgcattgactttggtctcgggctatcatccataagcctagtttgtaggggtttactactgcgactaatttgtatttaaagtaggtggccagagagtttttctacctcgtacacggatggcgatctagtcttcgaatagagatccttgatcaagttataatttagttttcttccgtgggtatctgtatgtaggcagtgtgaactatcacgatacaaaagtcgagtgtccttagaaccagtggtgtggatgatgaaagaaaatataggtattgccatgaacttaatataaacataagcgataaaactctaagcaaacggcaaggttcaacgtgatcccatagtaggccgggcagtaatagaacgtgacgcctattcactaatacatgtgatatgcttaggcatcgggttgccatcaatgccaatacacccatccgttgtatgcctcttacattcagtaatagaaatccctagccaagttagcaccaagcatatacatgggcattagatttactagctagtttaagcaagtctcgatccatacaggttac

SEQ ID NO: 42421 - DNA, 1260 bp, Oryza sativa
catatactactcctcactgcgcagctaaactctagcggtagcagcaaccagtgcgtaggcgtagctagctatagctactcgcgcgctgcgcgccgaatcttctttgagcacgcacggatgacgcatgttctctctgatgtgacgcccccgtgtcagggccgatcgatcgatggatcgtgtcggcaagacgccaaaaggacacgttcttttttttcaactttgctgtacatgcacggcgtagatatggctggagtctggagagcaacccggtcgtgtcaaagccgcactcgatcggcagagccaggagtcggatcgacccggccgcttgtgctcatgcctacccataggtgacatcgctgctactgtagtagtagcagtagcagcgcctaggtcgttcaattgttcaaagttgcacgagctgatcaggaagtatggtaggagtacgtacacagtgatcagtagtactccgtagtagcttagcctgctgcctgccatcgtgacatgatgcacctgagagaaaaaaaggggccaaaatgattggatacgcctttcgctttggtaggggagggaattaattgccggcgacacgtctggtgggtcgcgtcgctcgcacagccggaccgccgatgatggcgcggttgaatataccgctccccgctcgcgcgttgccgacgacgcgcaacgtgcgtgcaaggccggtgtgagacccgatcgcgaccgatctgccgccgctactgatgatgcccgctgctgctgccctgctgcctaattaacatatgcttctcctcccgcgatcgatcgatcgatcgacgccaggacggcgacgacgaaagctggggacaaaacggagcccgggggaaacatccgaacatggcagcacacgtgcatgggcagaggcgaagcgaacggtgcgccgcgcgatcgatcgccatcggacggcccggaccgtgtgcggggaaagtagaggaccgaggttagctggcgatcgagcggcgactgctacctgctccgtttgcagccggccgcagtgcaggacgacgcagcggcagccttcggtttcgcaggatgcatcgccaaagcggggagaaaaaaggcaaaggttttgcagctgcagatcgaacagatggaatgatgatggagagacgaccaaaaactcggaattaagatggccaggagaaaaaggcattgcgactcatgcatatgcatgttcactgtccaggcaggcaggtcaccaatctgatctgatctctgatccgagtc

SEQ ID NO: 42422 - DNA, 1526 bp, Oryza sativa
taaacgccgtacttgtcttctcataaacacaagcagtacacagtacactccttaccatctgcattagtttctcgctccggttaatttccagcacagtgggcggtgaaatttttggtgatcaatctctttgcacggtctctcgcgccctgtccgacagttctgttttagtggtcaatccaaatccggcccgctcgtatgcatgcaggtaatctctctttgtgttagtatttaacaccgtgaaaggaccacgcaaaaaggcagagtttcgacagaaaaaactctagctggttaatggcgtgtgtgacgcctcacctatgcgtggctgtacacgagaaaattagtgccacccttttcaatctataggtaagctacaagtaacgttaggtgatgtactgatgtgcccgtgttgacctgcgtggcatgaaaatcactgctaacaactggtctaccacatatataccgaagcgaattatggcctagctagcgagatagatgctgtaagtaattaacaagaaataaaatggattagttagtacctatatagtctagagatattacgacgttggccgtgccaatctcctgtgttactgtgtgcgcccgtccaaacttgccacgctcgagctgagcagatgatctgctgatgatgatgagagctgatgagctgtagagaagctagaggcaggcacggcgccgtggaacacgtcgatacttctcctcgcggagacgaaggatgcattgcgtccgctgtacacgcccatgcgctgtcccccggtagtagcagcggatcgtgacatcgtgttgaaccggcagaaacatccaaaacgaactgatactactagcagcagctagtactagtattattagacgagagggccccggcaccagtcactgcaggttaagcgcacacggcctcgcgagtctctgtagatatgcacgatccgtcttatctcttctctgctcctgaggccggccgtgagaggtttaacgggattccttcgttggtgtagtagtagacgtgtagtcctgtttgcctcgcggtcgcgggctagccaaaaaaaaaaaaaaaaagccttggatacctccgcggcggcatgtggcacccgccccacctgcgagcgcgcgtgatacgcgtatttgtgtgtcgcgccttgtccgcatccatccgacgatttccgatccgatgcagcgagcgaccgcgcgcgcgctccgccccgcggcccgcgccaacgtgtgcagctgcgtttccgtgcgcccagccccggttgcgctagccgctgttgctgccgtgctacgggcctacggcgtactccttcgtccaaaaaaaaatcaaattctgaatttatgtgtctaactttaaccatccgtcttatatcaaattgttttataatttgtattttcattgttgttagatgatactccctccattccaaattgatctacatatagttttttaagttattcctaaatgatctatatatttgtgtttatttattaagtctattcgttatttgtgcattggagtaaat

SEQ ID NO: 42423 - DNA, 582 bp, Oryza sativa
ctaagacccaaaaattctagttacatgtaaaactcggatccaaaatttttaaacttgcgttcacactttaaaaacttgttaaatttagttgaattttgtaggaatgaattattatatagcgaagcaactttgtacaaatttttgaaacatttatacatgtgaagtcattttagatcgaaccccttgaaccttaggttctaatggtttgatccgtttgatccatttatatttttggagcaaccctacaaatccgttaggacaaattgatccgtttgatccatttatatttttggagcgaccctacaaatccgttatgacaaatttacggataggtttagtgcataaatggatcgaccctaaccattcccatccttactcaagcttataagtaggagattctcagccacgtcaatattttctgtgaccaaactaagaacgcgtgaccaaactaagacacatgttattcataaaaaattggcagcatcgttaaggcagcccacactcgtcgctagggaaaggagagagggaggaaagaaagctcggcttgtctcgacgactagggagggagaccgtcaacgggga

SEQ ID NO: 42424 - DNA, 521 bp, Oryza sativa
aaagtgttcttataattattctcactacaatattttaaggggcaattatgtttctgcccttgctttacgatttaattgtgattttacccttgttttttagggtttgtgattttgcccctgcttttttgaaatgaagcagtcgtctgcccctggttttgacagaagtttggtgggcccgaaattttagaattaaatggtgaaacaaaatgttattatcatttgtgaatgaccattctacccttcaatgaaagaggcaaatccccaatccatgtcccgaactcccgatttccactccaaacgctatagctgggttgcaagcggcggcggcggcggcagcgcggggcagctgccgcgggccagcgcgcggcggagtcggtggagtcgggcgcgggcagggaggcgcggcggcggaccggcgggcgcgcggggcagggaggcgtggcgccccccgcggccagcgcgcagggatgcgcgacgcggctgccacgcgcagggaggcgcggcggccagcgcacggcgga

SEQ ID NO: 42425 - DNA, 685 bp, Oryza sativa
tttttttaaaaaaaagggtcattgtgaccctttatatctgtacaatagtttgattaaataaaatattaatgagttaggggcgtttccagaatataatgctttgtgctcgaaggaatatatgtttggcaacacgctaagcacaacatcacttttttttttgaattacacggaagaagcacatgcttacatatcaccacgcatatacatcagtacatcacatacccgctagagtattccttttaacaaagagatgaaagccctatgataaataatttagaaatttcactaaatttctagtgaaacatactcatcacttatgtcctcccgtgtgcgtaattgtaactgttgggatttaatccccggtgtttacaatcatgtagccatgacttcaccaccacatctctaatacttcccggacaccacctttgtttggagcttgtgctcctgtcctatgccatgcacttaatttggtgttttcgctttgtaggcacgcgtgctaactttgaagattgttcacttgttcctagaatggaaaaggcttgatggaattaccagaaaaaacaagaataattcctcaaatagattagcccaaatagtcaaatataatatattattttagttgtgaagaaatgaagctaaaagtgcagttgccactagtcagtttgtatttttggcaaaaattcat

SEQ ID NO: 42426 - DNA, 550 bp, Oryza sativa
aattaaaggatttatgtaaaaattttatatgatttaaattctgtaggaaattttcttatttggccttttgttttaaaggattgaggcccctttgaattagagtaaaaatggagaaaaaaataaaggaattgaaatcctacactattcatgactttgattcgtagaaatgagaaaaggaaaaatatatgtaactttcatgttcttacgattctataggaaaaacgtagaaaatttaacatccactctaagagcccctttgatttgtaggaaaaatgtaggaaatttaaaggatttcaatcctatgaaaaaaaattcctatgaaagcctttgaaacaaaggattgaattctatactatcctttaaaattcctatggaatgtataatcctatagagattttggaggaaagttagcaagaggtccaacctcttggaaaatttcctttgagtctatctctctcatccgatttctgcgtttttcctgtggttcaatcgaatagtcattcttatgtttttcctgtattttccaatcctctgttttacatctgcattc

SEQ ID NO: 42427 - DNA, 757 bp, Oryza sativa
ccgcgtcgagcgcgaccttcacccggacggagctccggcagggggaacaccttggcgctgctcgtgtacagcgcgacgagacggtagatctgctcgtgcccgtccatgtgcttgatcatgtcgacgaacttctcccgctgcaccgcttgatgatctcagcctgcaacgcgagcgtctcagtgaagaagcaggtaatcaccatggttgttgatcgagagttcgagctcatgaggcgtacaccccgggtggttgtggtggtgtgggtgatgccgcggctgcggccgaggcggaggcgggtggccggagttgccgaggaaggcgaagcgaatgagggtctcgccggacttgagcaggctgcagaagttgtcggcgacggtggggattgtctttggcctagcatccgacggcggcgcaggcaactgacatgtgggcccaataatatgtttttattgttttactcactgacatgtgggtcccatttacatttgtttttattttagtgctacgtaagcgccacgtcgatgccacatggaagtcaacccgccacgtaagtgccacgtaggacaaaaccgcctccgaaaccgccgagggaggtgatttgctctggttttcagagaagaatgaggcgttatacccggttttccggttgagggatgttattcacataagcacaagagatgagggaggttaaatggacttattcctataaagtataccgccatttcgatgtctggtccctgaaggccctggacggctg

SEQ ID NO: 42428 - DNA, 698 bp, Oryza sativa
cttctcttcttgaagacgtcgttttggtataccctagggggcgatctcggctgtgtacctttgttggtctagtggcagccggtcacgcttagcggcggtcggtccggtgctagccttttcttgggcttgtgtgttggcgatgtcggtatgtgggtggtggtatttttttcttttcttggttatgaccctccaaggttgtaatcttgtaattttttccttctctatcaatagaacttcgccccgtctcgcgcgagtcgttccaaaaaaaagattaattaagaagaggttatcttataagtagtaggaaaccggcagcgaaggctcaacccagttactcactaattaggtccatcactatagctatgtctgtaaatagaggggaggatgagctattctacactactccctccgtcctaaaatataagcatttttagcatagtgacatgtcaaatattttttaactttgaccattaataggaaaaaaattaaaaagaccaatcatgtaaaactgatgttactagatttatcattaaacaaaggaagaagaaactatcataatatgtaactctttttgtttagaacatcttaactttatagatattgttggtcaaagtggcatctcggagatcagtaacacacaaaaaatgattatattttgggacagagagagtcgtcagaatgaaggaatgaatgatatg

SEQ ID NO: 42429 - DNA, 666 bp, Oryza sativa
ctctgtcatatactcataaatataaacccctctaccttaaaaaaatgcacattttgggacggaaaaagtttcgtgtgtattgtatcaggaccaatgagacagagcccaccctgacaccttgctagggcggaggcgtactgacgttgccacgcagttgcaccaactcatggacccttgtcgaggattagagcattagcagttggccaccacattttgccgaacctaacgtgccatgtgagcaaagaataatgttagctacatgtttcacagcaagtcacttatagtgggtcccactaatatcaccttttttcacttttcatctcccctttttcctatcttcctctccccaatggcggataaagcgaggcgaggtcaaggcgacaacgccggcgaagcggcccacgcgtcgagggcgatgacgttaggtggagtggcaaggtcggtggcgcgggagcagttgacgagcgaccagatccatccctcgccttgtccccaaaagcagtggcaaggttggcggcacgggagcgagggatggcgaggtcggcggtgctcctcctctttgcattttccatggtggaggaagtgaggcggccgcggccggtttggcgacggcaccacctctcctcctccgactggcagggtacggcactgcaagagcttggtggc

SEQ ID NO: 42430 - DNA, 540 bp, Oryza sativa
tttggcttaatagtgttatagtggtttatggctttaaaaagtcaaacgaaaaagctacttgtttatttagatttagactttttggcttataagcctaaacaaagagggccttagagggtatccgatttttttttataaaaaaaaacattgagagggaatccgaagctgctgtagtttttagtgctacactgccattttgtggtaccaaaatttgcattggcatctccttattaagaactgtaaaatatctttacatagtaatatggagaaatgctgcaaatacttaacgtttgcttgtgaaagtcccaaagttgccatccacacccttattgcaagtacttgtggcaaaggatttttttttcatcgctatctttatactgctagctagtaagtttctaaaagcttggtattattagaatgtattaaagtggatgtaagtggggatgacaatgaaccacgtagagctttccacggaaatggaacagactgttcattactaccaacttcaacttgatacgtgatgcgtcatgcacctttgat

SEQ ID NO: 42431 - DNA, 709 bp, Oryza sativa
ctactacattgattgttgacagtatatctgttcttttattcttttatatccaatagtacattccccatattaggatgttgcgtggctggacatcttcaaggttcccattggagtctagaatgttgcgcattccttgtgttgtttgactctttaataggtatttactggaggcagtttttattttttacttgcaccctttgtttctctttctgagtacggatggatgtttcgtgattcgcagttccttgtggatcaatagggcctgctaatagtaattagcgtgagcacgtaacgtgctaatctgaaatagtttcagaatgcaattttgatgggtgaaatagaaatataaccaagaaatgtgtttcaagtgcacatcaaattttggtagggttataatattttatttaggttacacatagatgcaatcattcaaaaggaaataataaattcccacgtgccgtatcctctttgtcttataagagcagatatgctcataaaaataatatgaatgcaaacaaatggtggctggcaatggcaatttagatttttataaaaaatggcagaagctatggcagactaatctttcatatttggtggaatagctggaaggagagaaatagaagtatctttcaaagtttttccaccgatccattccaggtttcttatctcattaacaataaggttcttccgtactactagcttgaagaga

SEQ ID NO: 42432 - DNA, 5809 bp, Oryza sativa
ccccaccataatatatatcggtgtgtgtgcgtgtgtcgtggtgtgagtgcagtgtgtgttagtgtgcgtcctgagttgtacccttctaaaaaaagaatatatatctcgatttccattggttcttgccttcttggctgatgttcttcttcgatctaataactcaaaaggtcggagcaaagtttgccgcaagttggatagcgcaactcccggtctccttttcagaaatacgcgcgcgtgcagtattttggctgcacataacacacaaatttctcgttggtataaccacaagcagagtgagctatacgcagagcacgcagctgttctcacttctcaagtcgtcgatcgatcgctacggcatcgatatattcatctgcaagagaagttatgcagaaataagatcctttcccaagagaacaaacagtacaaggttacacggatctgtggatatactgatggcatattggcatatgctaagcgattttgctaaaaatctggcgacaaatttttggcacgaaatcactcggatttacttcccttgtggattagtctgtgcatgatttaattagcggctgtgatgcgtttccttcccacgcacgcatgaggccagcaacatctagcttggcacataattgatgagtacatacattgcacgtcgttgcagctaggtgaagagattgaagaaataaaatataaagttacagtcctatataactaaaattacattcgtaaattcagttgatatgacatgtaagtgcactataattttggtaaaaatgttgtgtaagtaaatatgtacttgttatttcctttaaaatataaaattacaatcctatataactaaaattatatttgtaagtttagttgatatgacatgtaagtgcactgtaatttcactatagttacagtgtaactatactatagtgaaattacactgtaactatagtgtaattacactgtaacttttagtagatgggttggtgatatatttttttcaatgtaaagatctaacaaataaaatatatgcaatatatataattaatatatgttgatacatgtatagactcttctaatcaagtgatcaaatgagcataatccaactaatctaaaatctgtgtgatttggacccaaaaatctgtcgtgtgatggatagctagtcccgggtttcctggaccgtcagatcgtctggatagcatccccgtcgtatcggacggctgcgaggagctcacctttcggccttgattgtgactgcacggacgactccagccaatcagccaattgtccgggaaactatttttccacgcaagtaggcggtcaacgtatacttatgtagttatatagatcctcgtgtttaaatttgtaggcaactttagaaaaattttaaggattagcatgacacggagaagctgcggtcgataaaaagaaggaaataaagcgggatgtcaaatcgagcaccgtccaggtttatctcttctactaggcactgaactccaaagagcaagagagaccaatccaactctgaactctaaagaattggagatcaatcaaacgagtaacgacgtatgccaagaaacacctaaattatataaatgccaaaatattatagttgtaattattagctcgcatttttttcggggaaattattgatttgataatactttatatgttttcggataattgtcgcaactcccctatttaaatttgactaataacaattttgttctgtgggttaatagaatcacggtatgagatttatctcacgttatattgctttcgtaatatgcagagttatgggtagttacaggcgaagtcagatagatcccaagcctagagctcacatgcgggccattatatattttcaaacgttatacggtagattcatataatcctaagggtttttttttggtttaggttattggcttgaacttttgacctaagtttttcttatatgttttattagccaatggctttagagcactaagtttaatggtgaagtcatacatgtcatagttatggataacacatacccaataataatcgactaagctcggcagagtccaccatatactaagtcttatacggaatcatacctcgtatatagaaggagttccggataaggaaggataagcaaagttctacacggaaatgcttaccatcggccgtccggccaaaaataaaaaatcggacgtctcaatctaaaagaacaacagtgtaggtgcatggtgaaacagttggttaggtgtactgataagccaacggagcatgcatgcaaacatgtttcaaaatttaaatgattttttctcttaaactatttgtctgaatttcaatctaattatatcattggattcgttacaattaaatctttataacaagatatcacatgactacattccgacgacttttaattttactttttaaatgttgcacacattgttactgaaatgttccaacaagcatttgttgatgtttcactaatgcattagcaatgtttcatgatgtctttttttatatgtttcagcaaatatattttttatgtttcaacaataattataattcgatgtttcaatctaaatataaaaaaatgtttcattagtcgggacttaatgtttcatgtaataatgattattgttgccatcaatactttttatatgttgtacttctttggaacaatttgtgaagtgggttgaaacatctccacaagtgatgaaagaattatttttaaatagttcaacacaagtttgtttttttctagaacacatatatatttttatcaaaatatatttatgtgagatcttgttataaattatagattgggtatatattttagaataaaattttgtttaaagtttgattaagagagagaaagtaatagtgcctcgggccaccttggcaacttgctctactcctgcattcatgatgcatgcatgcgacaacctcgctcctccaacgtgtccctgcatacagatgaggagcagcattcaatatttgaaaaaaatattgaatgtatgatttgtagcgtccgatttaaaaatatttcaacataattaagtatttgtgcaaaaatctaatggtataattgaaatttagatcagatatataattttggagaaaaatatttacaatttgaggaaaaaattagacacgtgtaatagaagggagagggagagagagtatgcaagcagcagcgcaagcaacacatgtagggcaggcaagcaacgcggcatggaagcaacgtgggcgtgcggcagtgcgggggtgagcgttgaccaacaagtgaaacattaagttatatatggtgaaacaaagaaaacaacaactgaaacatttaaatatttttatgaaacatggtgaagatacacgttgaaacatgttgttgtcacatatgaaacaacaagtattgacggattgaaacatatgtttttcttttatcaaaatataatcatgcgatatcttgttgtaaagatttaattacaacgaatccaacggtatgatcggatcatagattgaattagtaatttaaaagaaaaatcattttgaagcttgctaaaatacatgcatgtatgcatgcatgaggtggagagagagtagtagcagttaatttcaggaattttgtgaaacacaccgaagacacatattgaaacctatcactatcacgtatgaaacattttattctaacagtttgaaacacatgtttttcttttgacataatataattatgtgatatcttattgtaaaaatttaattgcaatgaatacaacggtgtgatcggatcataggtcagataagtaatttaggagaaaaactatttaaagagaggaggaaagaatgaaaagaaacagttagacacatacggagtacgttacaggacaaggttcgttctcacatgcgctcgtttagacgtccgatttttggtgtgatgccggacgtctgagccgtagcgctctccgagttctacatggaaactataaggactactcggatcgtatccatattagtcttcctagttctatttggacaaagggacatctatgggtataaatacaagaccccttagaaggagaagagacacacaaaccaagacaagtcagaacaaaccaatacgtcgccagatatcgacatcagagattagcctagacagactcaatctggtgcccgcggaggccgacaagagggatctaacgccgtctctgatctcgtctcgacgagctcgtattcgaggggggaagactaccctatcgtcgactatgtgttggtgatccatgccgccaagtcaacgacagctagataagttatcccaaatattgtacttgtttgattctgatgaataagagcaagaccggtttcggccaacaggagtaggattgttaccctcctatgaagaggcccgaacctgtataaaaatatttgtttctgtctcttttacctcaatctcgcatataccctggtaccaacgattcccataccatacaaataccgtagtcgtgacctaaaacgttgacaatacccaacttcaaataagaggaaaaaaaacttctccagcctaacttttaattttaacagtgtgagagtggctttagcttgaaaagccaaatgtaaaaactactcgtttgtttaagtttagtttttttttgtctcacaagctggcttataagtctaaagaaaaatagtctaaataggattatagacttatacctatgattcgtacatttatagtttagttgtcgatgatgccacatatatagtttataagcagtcaagcaggggcggagctagtgttatagcaatggtgtcacatgacaccagtggtctttggcctattccatgtactcccttctattcttccatggatgacaccaatgaatattgtctattgacactaatactcagccataattggcccattcttcgcacaattgctcaacccataaacaacatctgagtaactaacacgggcaacagctaacaagcttgttatttacaacccaaaactagtacggattgaaacaagtggatacattttgttaccacatgtatgaatatgatggaaacaattcttgaaaagaaaattaccacgtgttaatgaaacgactagtacagataaaatgtatcaaacattaatattactagagagtgtggattaatacacaagttcatcgaaattagttggtctctttaaatttgttactcgtcactattttttatgatttttgcatacatcatttgcaacatatgattgttagatagtcgactataacaccttatcgacctaaaatcctagctccaccatgcaatcaagtactaatcataagccttcagaacattctagctacctgctgccggtttccgtcgtaatcgtgaacttaaactacatagctaggacaaaaaagaaagtatagtttaataaatagaatagtgatcctccgaactaacagatttgtttcgtaggttacgcaagagtttagaagaatgcttaagaaatcgatccggtgctaatttaagtttttttttccaactatatcgcactgaaacatactccttattatcaattatatatcctcttctgataatgtttggtagtaaggtgactaacttagtaacgtacccctaaactctgcaaaagatgaggatagagctaactgtccattcaatcattttttttcctacctgacatactgatgatattcgagatcttgaaggcaaaatcaaattcatcaaggccataatcaaaaataaaatatacatatgagatggcacaaatgaaaaaacataaggccattctcagtgaagcgtcatttttgtattttcaaaggtg

SEQ ID NO: 42433 - DNA, 770 bp, Oryza sativa
ttcaaatttttggaccaaatcttgtcctaaatgacagatatttatgactggagggagtatctgtctatcagtgatgtatgtatagaaactagagggtgcagaatagaaaactaggatttattgatttatttgcttgattattagaaaaataacaatatactgtaaaacttctccacactattgaaattattgccatgtttctcttaccgctagctaagtaacgatttgctttggagttgtatatggagttaccacaaatcaatagtgtcccaactaaggccccgtttggcaagtcctaaatccccacccatccctggggatgggccaggaaatctgatggtgtgaggattaagatccatcagtttttttaatgaaatcactatcgcctctttctatgatctcaaatttaagccatacaggattaaacactactactacttgttttgtggaacatttaaagacccatgcaaaataaacaacttacatgtgccgatggccacataatagccaaactgattatataactcttgtataagactttacagtaaaactgacttacatgctaataggtggattggtgaaaatgttgcattctaatgttgtaaatgaaaaaacaacttcgcgaacagttttctctaaatgtaggacaattgtgccaatgtattctcatgccatcagcactgttttaaaacacagagttcatgggacaaagcgtgcagtggagattgacagcccacaacaaatgtctcctgatcaaccatccgatctac

SEQ ID NO: 42434 - DNA, 3480 bp, Oryza sativa
tttcaaccttctagttctggtgcaagacaccttattgaaaattgaaccaagagctcattgactaatgactagaatctcggaacagttcaacttctcataacatctggtgaactaacagcccccatcccctttcatgcgcacttcgatcctacttcctccgtttcacaatgtaagtcattctagtattttctatattcatattgatgttaatgaatctaaatagatatatatgtctagatttattaacttcaatatgaatgtgggaaatgctagaatgacttacgttgtgaaacggagggagtactattttgtttttcccatccatccttaatcaacactaacaaatgtgtgagctccacggcattaaaaatctaacatgcaccattaacccgaagaagaacggcaggcccttgacgcaattgaagttgagaacgaaaactaattgctggtctcgaatatgatagcggagtgctcaaagtgcgacttgtaatgtgaatcccccggtcattggggataggtcaacgaagccgatagacaaaagacatgttcgacgaaacgcgggcaagggagtcgagcggatcgaacggagcggagcgtaccatcttacggagaacccggtcgtagtgggagaaaggtgagcgagggcgaggagcgccgcggcgccgccaccggcaagcgcgcgcttgaggaggaggtgcagggcgaaggccccgggcgcctcgacgcggtcctccaccaccaccacgcgcgctccggagcccattgcctcgctcaggaggtccccgcccccgtactcctccatcggggccttggagggctggaccctgatcgccgcctcctcgctggcctccgccgccgtcttcaaaggccccgccgcaccttccctgctcccttcaccgtcccgttgtgctcgccgccggtccgccgccgccgccgaatgacagaggaaaacctaccgcgagcgcgaggactccacgccgccaacacgatggcccaggcacgagacgggcacgcctcagtagacgggccgttccggcccacgtgctcggcaagcagcccaagcacggcccaagagcttcaccggccgggccgtgtcgacctgggcacgacgggccaaaagcagcacggcagcccgtttagcccgcaaaatatatatttattgtaataataaaagaaaagacaaaaacggaaggtaaaagaataaaaaatgagggcgaatgggaaaaaaattgggagaaattggaaaacacgggaaaagagaagatatagaaaaaatagataaaaaatatactcccgttataaaaaaaacttaaggatgaatataaacatacatatgcccatattcatttataggaatagactctttttttttttgaaacataggaaatagttcagatttttttaatggagggtgtacatccctatgatcatagaggggtactaaataatatatagtgggctagtagtgaattaggatcgttatagtagcttaaaagggatcgcagacactatattctgatattatgatagaggatgaaagaagtactcggattttttagtttattgtgtatatatcatgagttcaaattctattaagtccaaattcaatgtagaaggtagaaataggcatgtatgtaatactgtaattaatatttagatcttgttgattcttataccaaccaatatttgtgcattgatgagagtcagctgcggaaaaaaaacatttaactttagctttcaattttcaactctagtaaaaataacgatttttataacgtcgtattgaataatcgttactgttattattaagctaccgtagcatttgtaacattacaagtcgttatttggaagtttttttacaatagcggtagcatccttacggatgctattgttgatataataagtcatctttatccccactatttagtattattcacgtgattggtattactactgcaagtgataaaaaggagttggagaggagcaattttttttattctctctcatccgtcaacattttttaagactaccggtatccttcgatattgctgcacctttgcactgaacaccccccaacctctctctctctctctctctctctctctctctctctctctctctcttcccccgtcttcttccatcgctgccgcaacggcgcgcgcttgcgcgtcaggaggagaagtcggcggcggccatggggagctgctctcatcggagggcggcaacgagagcaggaaggagtccgcggagaggccacagatcacaccggacgagacggccgcctcaggtaattaatgctacggcctacgggctctcctccccttgctcttgacaccctctgcttccgcgaacgtggcatcggttcttggccatagcattgcttcggaatctgatttcggcgctaattaatttcttggtttcgagtttcgacccgtttatgggcgatgactggtcgagcttcgtggttttctgacttcctatgcgagggttcttgactcccttcttggattcaccgggcgggcgatggttgctggctctcgcgcgatcaccgtggttttggattcctccccttatctttgcttcatcggttatgacttgtgatgttcttaaacgtatattgagatttttgctcgttagcatcaaggcatggacctgaattctttttatttctggaagttggaacttgggatgctttgaaccttctaaaaaacagttcagaaggcaccatgatttttctattttctaatccgtgctatgtcgcaagtaatcagattttttttttggaaatttagatagtccgtttaattttcttgccgatggtgtaactaatgtcgtggaacgtgattctgggcattgaattgccctttctttcatattatggtttgcctgtgctgttctgattttctttgaaaggtgttgaaactctttacttgatttcttgccagtggagtattgatttcgtaaagaaatggtgtttgggcattggcatgattttgtcctgatctcctgagtaaggttctccgcttgggtgtttcttgtcagctttcactggcttttcttggaacggtgggagtaatatcacaaaatacgcgtgttttacttttttgtctgtattgctttcggttgttttgataacaatactagtagaaatacttttactttgtcttatatatgttaatgttattaccttatgttctgcaatcttacaatggtttggtttaatttgtcttctttctcttgttgaatttaaatagctgacaccattgcattagtgtgcctcatgctcatctgttatcattgtttctgcagagatggatgtgaatttaaataccacaaatgctgattccatctcgaaccatggtatggagaggcttattcatggccagtcattcacctacggggagctgtatgcggcgacagggggcttcagtgacgatcgctttctaggagagggcgggtttggccaggtgtatagggggg

SEQ ID NO: 42435 - DNA, 1851 bp, Oryza sativa
ttgtgggctaagtgagtgacattccagaacactacatattgcctagatggacgatggttaaaaagcctgaattgcctctagttacaagcattggtgaacaaatgcaattgccccctgaatctctgaagctaatcaggtataccaatatgtgcacaaaatttacacatattgcaaaagatgcatcaagcaacgagaaagcctaccatatggctctacagcgtacgagctcaatgactgatgatttagcagctatgaagcagagtagaaagaaacagaaaaaggcacagccagccccagataagaggaatttcagatatccccttggcatcaactaacccaacactacagataaatgacccccccatcatacaaaagcaagggagaccagtttcaacaagacgcaagcctggggtccatgcaaaggcgtcaaagacatcagttaggaaaggcctagctagtactgagaagtgaattagagctacgagatgtaacttataatgttgtgacaagattgttgaaacttacttgcacagttgtattaaattacttttagcttccatagtagttacttcacagtgatatgtaagttctcaggaagaccatgctgagttctttgcagaaccaagatgctattttaatttgttacccaacctaatttatgtggctataatttatgtgctggttcaggaaaaaaaatgcagtgtttcattaccttaccttaagtgtaggatcaagctctttgccccataatacttgcatccattgcacacgattttcttgaaatgagagcatcttgtgtgtaagtagtttcttaatgttggggatgtcacttggttcaaatgctagcaactgtttgccatcccacaactccacaaatttcggcatataaaaaccacaatcccggctgtttttgtttgcaaaaacaaaaagggataagtttgagtaaaaacaataaatgaaaatcactaactaaaaaaaagcatgttacgtacatgttatcttgctttgggccatcaataaaaatcagtgggtaattctggatgattttctttgaagacctcatgtaaaacctatcctacatggtcttgatggatacaacaacaagattagatgctgaaatcagctcttcgtcatcttctcccctcagcgaatcgtaaacctcgaatctttcagctttcagattaaggcacaccacgaaatagtgaccatccttatcattcccattacccaattcctagagaatgggaaaaattgtctgcattcaagtgaaaagagggagaggagtggaaaaaaggtttttctgtaaatataatcataatttagtaagtataaaaggataataaaaagtgtttcagaataacattttctgtcaatataacagaaaaagttacttccacaaacatgctgagttaatttgcagagacatttaagttacttctacaagcagacaggaaaagtaactttacatgtcattgacatcaggaatatatattttcttactaattcttctacaagcaaacaggaataagtaactttacatgtcattgacagctggaatatatattttcttactaattctttatggtcaagacggttcgctctcgtttgatcgaagtgtttcttaagctcattcctgtccaactgcaaatccaacaaatatccctgcaccatgtggaaaaaaaaacataaggtgttgcaatgataataatagtacactaaaaagtaagagatttttgtaaattttatatactcctattctggcaggaaaaattctcttcgaattgtccttgatatcagcagacagaacaattaatgccaattcacatgtgttattgtccagtggggctgcag

SEQ ID NO: 42436 - DNA, 690 bp, Oryza sativa
attggtggaatttttcccaaaccttgaaactgacttccgtaatccacagacgttgactttgctttgacttgctcttgattcaaaccacaagtattttcaagaaactggcttgatctgtcccatgtctggattgcagctgttcctgatgctgcttctctaggctgaattgttgacctacttcatggatgtatcttagaattgaatctgtcgacttgagattggggtaactctgctaatggctcgcagctgactcctttaattactaaccaatctactacactggttgttccctcaagtaaaacgatgacgagttaaaccaaaattcatctctgcgacctacccccccttacagtgggtagttatactttcgcctgactgggaactattgaactattctccttggaaaaaaaatcaccgacacttctcgaattacgaagagccctgactttgaaaattgaaaacttgaccagtcaatcaaaatgaagcaatgacggtgctctttcatcccggcaagacctggaacttaacccttagctgaggataggaaattccacataaaggcgactctcacttagctcatgagcatactgactcttaactgactttcccatcagttctaactgctggcatgactgtccttcttctgacctgacttcggtgtcgtccacctaaatgggttgtgtagttgat

SEQ ID NO: 42437 - DNA, 611 bp, Oryza sativa
acatcggctcaaatttagcacaaaaccgataccacttattaccaatatataatttgatatactagttctctgtggatcattgccctttaatttcgtcctctaattctagttcactgtggatcgttgtagcaccctagtttccaaaacacattgcagttggaatattaattaatctaccctcttctaattaactggcaccaaagataagtcaatcacagacaaactatgatggcgtgacgtgaacttgaatagaaaatgacagattaactaactagctggaggaactgcctagccatgccaaaaatatgatagtgtattatgccatcctgaaaatgacttaataatacaacatatactctttaagcacagcagctgtactctaatgtcgttggcatatttagctaacttaatttaggcgaagagtacaaatttcacatcatataataagtacaacatcatgtttgcactactggagaagtgctcatctctcccggttcgcaacccctttactcccgggtagcgaaccgggaggaagaatccgggactaaagatgagatggcggtctttagtcccggttcaaatacccgggagtaaatctccatctttagttc

SEQ ID NO: 42438 - DNA, 2109 bp, Oryza sativa
gctttgcgggcacgagaccgcgcgttgtcgcgctttgcgcgcgcgggaccgcgggctgtctcgctctacgcgtgcacgagggcgagggtatcgagggagcggcagtgggctcggtctcgcggtacgcatgcgcgagaccgccctcggtatcgcgctccacatgcgcgagagcgaggagcgcagtggggcagcgctgtcgcgctttgcgggcacgagaccgcgcgttgtcgcgctttgcgcgcgcgggaccgcgggctgtctcgctctacgtgtgcacgagggcgagggtatcgagggagcggcagtgggctcggtctcgcggtacgcatgcgcaagaccgccctcggtatcgcgctccacatgcgcgagagcgaggagcgcagtggggcagcgctgtcgcgctttgcgggcacgagaccgcgcgttgtcgcgctttgcgcgcgtaggaccgtgagctgtctcgctctacgcgtgcacgagagcgagggtatcgagggagcggcagtgggctcggtctcgcggtacgcatgcgcgagaccgccctcggtatcgcgctccacatgcgcgagagcggcggcgcttttcgcatccgacagcaccgacacctttatttcccatctctatttctttttgctttttgcacgggttctagccatctaccttagctttttagggagaggtggaagagctttgtgcactctcttatcagtttattgttgtagtcacgtcatgccggccatttgtaaccgctgtagcgttcgaatccaatgcgctcacggggttaaattgagaggagaggagatggtcctcatagagaaagacagaagggaatgaactaactgaggaggagaggaagagcaagagaagagaggaggcagtgcatgcagtggagagaaggaaaaaaagacacgtaagttgattagttttctattagcacaaattcgtacaatgaggatttagaaaatattagttcacgtagttaatatttgtttttaattatgttacagaaaaatttaggtatgtattagttactactacaatatattttgttaggtcgtatgtaaaaatagaaatgtagaaatttaatagagtagattcaggttaaaaaataggtagacataattaatttataaggtacaaaagtataatataagttataattaatttgtacgtagtagtaattataagttataattaattagtagttcatgtgatgtttaattttatatatacggccaatattatatgtaacaaatgaaaaaaactgaaatattaatagttatatttgtagttattgatattgatattaatagtattgataattattaaatgtggtacaaatattaaattaaagttgtaattaatttgtagtaatttaaagttacaattacttagtagttcatgcagttatttattttgtaagaaatggaaaaggtataaatatttgttaagtagcgggaaatatatgatgtgcttaaagacatgcttaacattgtaggtagttacgaatgaacaaagaaatgcagtagtacgaagaactttgaaattgggacttttatatgagcaaattggttgaaaagaagaaggcaatagaaggatggtactataatggagacagtttgtaattaatagacagtttgtaatttatttggtattgtaattaaagtgcagttaaatatatttatgtcgctgcaactagttttatactataataaattggtagttatgattaatttgattatgtaattaatcaagtgaagttgaacttagttctattaatttatcatgttatgattaatttatagataattttgtactaactgatagttacaaatatttcgtatttaagtaaagtttcggtccgttagataattaatagttaaagttgtaatatattaaatgtactcatccaaatttgcaatagtagtattgtttcagaggtcatatctaagtaggtacaaacagtccgtagcaaagaagatgatgcggctcaatgagtgtcattgtcctagataaagaatagaaagaggtaaccaaaatgatttttaacttagcttccgtcaatgttttttcggtacaggtagtcatttgttgtattaaaattaattg

SEQ ID NO: 42439 - DNA, 640 bp, Oryza sativa
cactataccatccaaatcctgacacccttaccatgcccgaagtttggtactggttaacatgcacattttctttagatccgggtatatatagtgttaacatgagggttatgtggagccgatcggccaacaacataagatgggagttaaaaaatgtgacacggagtaaggcctggcaggattggctcgctggctgtaggagacggggatatgaatatgtcatgctggttcaagcatgtcaaggaagagtccccacgaagagcgcagcggggcaatccagcaatcgtgaggagttggggtatagttcacacgaagaagatgaagttgtagctccccatcgtggtggcgatgttggtcctgacattcaaaatctatccatacaaggagatgaagtggtcaaccgccattctactggtgaagccgatgaaggggaggacatacctgctatagttgaagaaattgagagggtggaccgacatgcagtcaaagatgaggaaaacctcggtgctaaagagaatgatgacgaagatgaacaagaagttgaggaagtacctatgcctgcttcgtggaaccttgaagaccctagttatattgcagtaaactcttgtcatgattcaatatggttctacggggatggccaaat

SEQ ID NO: 42440 - DNA, 1100 bp, Oryza sativa
aaaatcatgcaggaacatcagattccagtttgtcgacattacaataaacaactttcagttccaaaccttatattaggctttttcagggatattacgttctgactatatgttggagatgtatgagaataaaatctgccctgtaatgcaatgggatataagattaatcaagcaaatacctctagatggcatgcataagcaaatgcaccagcaataatagcttttcttactgcctgcagaatatcgagatgataatgtgtttagcatatgcaaatcaaagcttcagtaagttatggacttatggtattagtaacatggaggaaaagaattgtaaacagaacttaataaaataaccagctctaagattgaaacaaactaacaaagatgtgggccaatggtagttgtgttagtacaaatagtggtttgctcaggatatccccacttaatacatgtatttacatatactctttgcatttggatatattctgtgttaacataggattacattattaatgaatcacctaaatagtcaaaactaatattttacaccccaaactatccaagtataaatgcattaagtattaaaatgaggaaaaattatgttggctagaatagaataactgccacagtgacattatcgaaagatgtacgagacattgggataagcaaaataatggcttcaataataacaccgtagaaaagagactataagtgatttctcaaagagctgcttagaggagagggtgcatctatagctgtagcgaaagacgtgagagttaattcatctgaatgttccaaggggaaccctaacttcaatttaaagataagagtgcaatctgattttgtgcctaagggtattcttcaggtgaatattatcacatgaacagttcctccctgtacattacagtggaattagagaatacatttgagagctaatgttctctaagtaccaaagcaaattaatgaaaacgtgaatcctgtaagtaccaatacaaattaatggaaatgtgaaacaatacctccatatctctatcacatgatgttagtggtatgccaaacctcttgataatcctgacaagctgctccctgatgtcaataacctt

SEQ ID NO: 42441 - DNA, 6019 bp, Oryza sativa
aaatcagttttcactctaaaattctcctagctccctccttgaataatcatgatatagtatgttatatgaacggtatttatattttttacttaattcagcgtgaaaagtagccataaaaatttacctcgaccatgagaggtgcataattcatcattgtagaatcactaacccattgtaatatttgatgatgaatatatggtattgatctttttggaatttactatatcaaaacaaataaacaattattttaatggtttccaaggctggttggtaaaggaatatgtattatattaatagtacatatgattcatccaaattcttacaatgaggaaagcattgtaggttgtagttatactaggattctaatggtgagagacaaatgcacaaaattgaaagacatcattgcaagaaagcacatgtagtgagtttgatcatcacactgccatgacatcaaacttcaatttcatatatattcttagatgtgcatagagcttggggttagtgttactttttgtgaaagcataacattaatttagttaagattcaagtaaaattcaaatgatgtgtttccatgattacacaatattcaagtacaatgttctatcacctggcttttgcacataaattgtggcttaaactgtacaaataggacactctacaatgaattctttttactcaaaagtctctctacagctagcatatcctgaactaggagtacctatctaaatctccttttaggcaacaattttgcataacctcaatcagtattcatagcaccaatttaacaagctagataaagcaaacatatcaaaaatcggttcaaataagtaaaacattaatacgattagtgtactctaacttatgaagaactaatttaggattatatatggtttccaaaaacggaaaatgaacttaagtaaaacagaaattttgtagtaacaagtatagatacaacagcagggacaaccattggtcgtgtgctatctattactatatattatccaaagatctactctctagaagtttataagttttgtgggcctaaaaattgccactttaatcaaagatgtaaaatagagaaagttatttgcctttaatcatggtcaatctagattataactatagattgactgatggttgtatagagaacatgtcgtcggttggatatctatctttcgtacatggcccaccaaagtttagatttctaaatttgaagtagtttttcaacaatataatttagtaatcttagcaatatatactatacgagatcttctttaatgcttgaaattaattaggacccttgatcagcaatgatctaatggatagagagagaaggtacatggaaaaaggtattaaaagggtatgccaggtatggaaggtggaagggtaaaatggtaattgtttttcattaaattatttttcggtaaagggcaaaagcgagagaagctacaaacgtttcagcaggaggaagaaaaaaacgagaggaagaataagaacgcgtgcaagaggaacctacatgaactacctgctgatcgtcgctgccgtaaaagcccgccgctcgcccaggccgcacacgcctgccgctcgagccggataccgctgtcgcacgcgcccgtaacgcccgccggtcgcagctgaggtacgcagcagcatgtcgccgtcaccgccgccgcacgaatcctcgggctgctatctactctgctagttccttgctcgttctttgtcgtcatgccttcatgcagccagcagttgtattccaggttctgaagatcgattttgccagcaaaaacaaatcaacaatgccctgtgctgcgcatccgatcccctgctggtttctgcgcctaatttggctatttgatcactacgtacatattctgaatatcgattgaggtgagccactcgccacctgcatgacatcgtggatggccgatttgttaggcactcgacggggtgggaattaagcaattactaagctatccatgttaataaaaatttttgttcctaaattagcctttaaagattaacggtggataacaattcgttaaggaggtacctggagtaccttccaagcacagtaaaagatctctacagcgtccaggcgagcgcggtttgccgttagcaagcatcaaaccgactatagcgctgccgtccggcgactgtagctgaagtgaacagctcctcagatccgggagcagctagctcccttcaaatctttttttcctctcatcacatataaaaggacgtacggtacgggccctcgagacatatgcagccagcctcgccaaccaggcttaactttcccaatccacagacagcgatcgacgatgccgctgccgccacatctcacagcatgcagctccgctagctcgccacccacctccgacacaatgatggccgccgcccatgcacgagaggcggctcgatcagcccatgttcccatcgatcgatcgatctcgccggccgcgcgcgcgcgtccgcggcatcggcagatcgggacgtggcgaggcacatgaggctataaatgcgcctccccctgcctgcctgcctgccgggcccgccctcgtacgctgcccacccgcgattttcgtacgacgaaccactggaagaaacgcgataaatgcgatgtttgctgccgtcgttcacccacccgtcgccctcgccggctgccggcagattgatctgcatgcccgggcgacgaacgcggctgccggccgcatatcgtgagcaagtactacttggacccctgcaacgccggcagcggtacgtacggccgcgcgcgaggtgcccaaacgcgccggcgcggcgtcgctgtcgatcgtgccggtggatacatgagctagcacctactagcagtgtggtaatccatcgatggatggcgacgggacgggacattggtattagcggacgaggctactgccgcaccggcgttagctacaggggactactgcatataccgatctcgcggacaggtagctagcatgcagggtcaggtcagtgctgtcttactccaagtcctcgtatgtgtgtgcagctagtagctactccatcggtcccaaaatataagtatttttagactctgacacgatctctgagatactgctttgaccaataatatctataaaagtaaaatgttttaaataaaaagagttacatattatgatagtttgtttaataataaatctagtaatataaattttacatgattgatcttttttatttttttactattaataggtaacgttaaaaatatttgacttgtcattatgctaaaaatgttacgcttgacatgatggtagtcctgtagggattcaggctgctgacagctgccatctcacaagtcacatgcgtcgacatgacatacatatatgcatatgcatgctgacaccacgactccgcaacaagcaaagcttgtctcatgttattcggttccacttgtagtactgtaccactgagcagtggcactgggggtatgtgtctagtaggtcaccaaggaaacaagagtcttaaaatgtgtatagtatctttccatcattatgtttgagtagttcaatttaagggactgtatataatggcagctttgctgaagaaaatgtgaattaaatccacggttgtagcagtgacagatggataaagctgtaaagaaacatagctcgaggcttacgagaagctcaaactcggatcatcctaggctcagttcaacctcggatcgagttttgaatgagctgaccccgaacctaactctaaggctccagggttgcgggctttgtcggatgagctcgaatatcttgcgagcccattgttgtgtgcaatttttattatttatgtgatgaatcagtacatcaagtataaattatattcctgctatgtagtacatattggcatcacatatttatctttgtacttcttctttgttagtgagattagttagaaatttatttttcataaaaatatattttttaaatgtgtgttgtaatatttgcatgccgagctcaagtccacaataaagttgagcctacttataagctgggaagtggactaggtttagctcgaggggctcaagcttgtattgagcttaaggctagacaactagggtcgctcgagcttagcttgtttactgcccttattaaggaggcactagatgagccatatctcatacccctcaagtaaaaacacgcctaaaggtggactcaacactagaataatgcttaggacaaccaactaattttggcccacatcatatttaatatggtaaattttaatataagtcaaacaccttacgacgacgcaggttctgcactcactgcgtccctccccacccactcctagctacctcccccatgaatcccatcgacatatgccactacccctaccctcaaagaaacaaacgagtcttgtcgcccgatgagccctcttgcacaaatctacccacttccctagcaacgtaaccatcaatcaccttctaattatcgtcgctacttatggttgcccctatccgcaggtacatatgtgccctagacatccttctaaaatccacataaacatttgtcttcccctcttttatactaaaccctaacctgatgatctcactagagttgaaaagatgtcatccaagagtttggagcacacaaaccgccaacacacatgtggtaaatttgattgattttttttgtaaaaaaatagtcgatggtctttttaactcacgctgcaataatcgacttgttgacagatcatgctaggcgctgggtagagcagaaaggtgccatatcttggggggaaaaatagtacacgttagttctttaatttgcttctgcttccacaccacgatcacctgtgcaaaaagaagttggatgccattctttcgctttaagatgttatcgacctacctacatatatgttcactttatcacacaaattgtgtccaactttttctccgagaggacatacgtacataactaacaaagctaacaaagtgcagctccacttaatccgaagaatcctgcaaaaagaaatgggctgaaatgtgctccctgtccccttaaagaagcgagccggaatctaccatttgacactttggtaaaaaccccctcatttcatcagatctacaggcaaagctcaacctgtagggttacatagggcaatggggtccaagctttttttggcatctatgcttccatgcatccgactggtagatggtcccccgtagtacgttctctccgtcgatcgccgtagtgccaaatcatatcaatcatgcgcggcttcatctcaacaagaacatggttccctcctagtagctagcagctgcttgcattgcatgcaggtaggtacagtttagcacggctttcagttgacagcaagatgcatattttcgtgtagccgggggacctctcgaatcgctgtcatgcatgtcacaggggagcaacgggacgacgacgccttaactctcgcgacgacgaaagtatcacgataccagcacagtttacagggccggccggggggcgtcgtcgcagctggctggtggctgcgcatcaacggacaacgggatcagagtaaaagacgtgcagagcgcagttgaaagggagagagaagctataggtgggaaaactcgattcgtcccttaaggatatccctcattttttcatgtcacttaaaaagttactaaaaaattgaaaaaaaattagtagcatagatcagtatatgatatgtcacttcacaaacatacaaattcaaattcaacttatacacgtagaaataaaaataacaaatttaactatgaatataacgcataattcacggtcaaatttattttttttgaattgtattagtcgaattttaactcgcatgtttgcaaaaatatatattatatattgatcaatcttgacaaatatttttgaattttttgataactttttaaatgacatgtataaaacgagtggatgtcctctcgaggggacaaaaatccacttccctataggtgagtgagagtgagagtgagaagtcgatcgggggaagtatcgggtgc

SEQ ID NO: 42442 - DNA, 1789 bp, Oryza sativa
ttccccaagtcgatcgtactagctagctatagcctgcagctgcagtgtgattaaaaaggtggactggagagatggggaaagtttggacgggtgaaaattggccaaaccggagttcagttcctagtgtacggtaaacgtctcaccattcacgtcacttttaattatggtcggacttttcatctgcctttagttcttggtcattcaattaaaaaaatgtatagtagtagtacataattttaccatgcatggacccaaattagagtgatttggacgatgcaacatttagagcatcaccaacctcctattccatccctaaaaccaatttgaagggattttagttaaaaaaaaaccacttcaagaaatcccctactccttcccttcccgaaatcttctcactgttgatatgcgggagagcgcgcccccttgcccactcccaatctcaccgctcccagtccctcctctctttcccgcacgtcagatggaggatctcgtgcccaattccacgcgttagatggatgaaaacaagagaattttgttggtagtttaacagaagatagtttgtcacgtttaagatttgataaaatttaatcaacttgttaggtgtttggttataatcatagttgtgtcaagattctgttccaacaaattggatctcatgtgttaataacttataaaagtgtgaaaaaaatactttaggcttagtaagttatggctaagaatttgatatcatattttaatgacttaaaaagatgtggtaagattcctttagtcttagtaattaagttgcggctaagaatttgatcgtctcaccttagatgaagtgtggtaactgacggtaaagtgtggctgagaaccaaacagaccctatgtaacgtacctgaattctaggattaaggaatttccatcaaaactagttgaaagggaagttcttcaattttgtaaaccaaaaatttctattttaaacctaggtggagttgatccaactcttgcaagaataaaatttgagaaaaaattaaaaactttttcacctttaacctaggacttggatgcaacccaagtgaaagcatgcatacttgcataaatcatattttgacttgagtccttcatatgcatttggattttcgatttgcatttcataataggtctcatgaatataattgcaatctagacaaacaactaaaccattagggcctagtgctaactaatggaaaataatacacagaaaccatacaccttaaaaaaaatcaacatggctaatgtcaagcctcacaaaactaatttggacatccatctgaagacatgtcatgaacatgaaagtgaacaaataaattatatcatatagggtatattctattttaatcatctctataagcattctcttaatttaatactaaagtaaacttatgcataaatagggaaggagcttatgacatgtgtaaggtaaactgtaattctaacatatcaacatcacctcatgttaatgagagtccaaatataacttttataaacattttcatgcatttaggaaagggaaacacatataagacataagtcctgcgaattatctaaaataattcatgcaagataaaatcatgggaaaattcatgtaggctctactcaacacatacaactcactgtaattttggtataatttaataactaaatttggtacctcaaataaattagtcaaactaataaaaactagattaactgtagttcttaatcggctcaaaccatactttgtctaaaaggcatttaactgcataaaagtgtataagtaaaataattt

SEQ ID NO: 42443 - DNA, 1140 bp, Oryza sativa
tatttttaattccttattttaattatttttaaattatattcctacttcgactcttcttttattttctaatttcggattttattttatttttattttgaattttagttaatctcgtattgggttcttatatggacacttctttcaatattacttatttttaatttcaaatttcagctaattttagattgtatttctacttggactcttcttttgattaatgtggaaatttctagcccccacaacgaacgtggtgccttctttcaagactgttttaataatataatagatagtatataagacttttttcatatataagttggcattgtgtggttcttatgggtgaggatcctctaccataatctcactatcattatagtcactagtgtgggtctcacccttctattgccacacctgacagtgtttataataataatgttataatggtaggggatgtgaacccgtttcttgtgttggacggggattataggggagattacttacaactaactccatgaaacgtcgatcttccgtacgtataggcattgatatgcaccttctagcagaggtccttaagtaaattaaatcctgcagaagccaacaaagagatcaccgaacgcgaagcagttgaaattaacctagaaaaaacacggagggaattaaaggatagaaaaccaaccaatccccaccggggatggctgatcggcgatcagtcgcgcgcggcgcgcgacgcgtggtcagtacatacatacatacatacatacatacatacatacatacatacatacatacatacatacatacatacatacatacatacatacatacatacatacatacatacatacatacatacatacatacatacatacatacatacatatatatatatatatatatatatatatatatatatatatatatatatatatatatatatatatatatatatatatatatatatatatatatatatatatatatattgtatatttatattttttgtgtatatgtataaaaagtatatacacaaatataaaatttgtatacgatgtatacaaatacaaagtttgtattcgttgtatataaagtttatatatgtatgtatataaaatataccaactttatatatatgtatataca

SEQ ID NO: 42444 - DNA, 918 bp, Oryza sativa
cccccccccccccccccccaaaaaaaaaaaaaagccaacatctggataaacacaatttggagcaccatattggcaaattgctattccaaccctgcaaggttgaaggcaccgggtcgccttcgacgatgtgtaccatatcatcttttccatataaactattccgtacactaattttcttttatcattgacaaaattttattggcacagcagacagatggtcctctgggacccacatgtcagtggctgacagcactacagctacggcgggggacgggatcctcggactgcagaaaaggcaagctttcgaacaagggtaactagtctgtcactcgcagctttatgaaagataagctatacgctggcaatccaaaagaaactactcggattattgatcgctacaataagtagcgttggatccgcggaatacacgcgtaacacgaataagaatcccgtgttattatcctgtcttgtgcaattgttactattattgaaagttgtttatgacagtcggcaccagctgctggccagtagccagttcgtccattgtgacttttgcaccattataaatatcaactgtaaaacatagtggtcagtcatcactacgatgatgagatttagtttggttggttttgctgaaacattctctatgcgatcaccgtaaaaagactactccgtattaatctatatccgcagtcatggtctcatggaccatgaagtccactttaatagcgagttggtttgcagcggacatcaattctactaatcagtttccctaaaaaaaaatctactaatgagtttgctttatctgatatgcttacgtttgtcctatttttgtactaaccaccccttaaaattccgaatacgacaacataacaagcaagatcagcccccacaggttattacaataaaatacttttt

SEQ ID NO: 42445 - DNA, 1164 bp, Oryza sativa
agattatctatactatcctaaagaagctaatggtggtggtggttctatcaccccccccccccccatctatctgacaagtgggggccaccatctatcttgtgggctcatcattactgaccaacaatgtactagagtgagaagctatatttgcttcatatatagtgtacaacacattgtttatcctgtcattgttaatcacagagtgataatttagtttcaattagagctcgctgcaatgcaccggtattttgctagtttagataaaacatgctggctggtcattctaggtttgagggcttactaaatctagctgttctttaccttgtgctcaagacatctcacaatcactgagatgttctccacttgtcgaaaaaggtgaaagcaggttctaaaaacagcaaccccaagtcccaaactccgtttcttatagagatattatacacttcgaggcttcttttcatatgtccttgacttcatgcatagttcattctaaagtagtcaaaagatcagtcggttcattatcctatcgttgagagaacacacacctgctagcatctatttgcacggagctctgggagaagctggtagcaacaggagccaagtggcaagcaaacaacatgttgctctcagggaataagaatcaggggcggatgaacatatcctataccatctaccacaaacaagacaatgctaagcaaatggattgctcttattggcagctagatacttgacttgctttgaaataatgctagagaatctaggtccatgatcatttattttgaactgaagtaagagtacaatgcaaattagaatgatgctacttgattggcaagtagataaagctctaacaatagtaaatatttttggtcttttactctttagtccaataaattctatcgcatcagactatccccacaaaaatgatgaaaacaatatacccatgagttgcatataccatgacgcagggtaacagtgattgtcattaacagaaataattcctctctgacaatgccacgacaacattcatattgccacacagataattcaacgcagtacactgcagcaatataggaataggaaggatataaagctatggcagctactttccgctgacatagtagaactatcagtctacacggcacgtactcctttgcctcccaatgt

SEQ ID NO: 42446 - DNA, 787 bp, Oryza sativa
ctcctcaacactttaaaattttatcaaatccacccatcctcatccttatcctttctatcctctctctgactctctcacctctctatcctctctcactctctcacctctctcacactaccaggcgcagacggcacgggcgcggcaggcggcaccgcgcggctcggaggcgggctcaaggcatgcgcacggggtgggcgactgggagcagtaggctcgcagcggcggacgactaccccccgctcggatccagcggagacggctgccccccgcccggatctggcggcggcggccggtgggagggctcggacggtgaggaggagccggatccgactaccgtgacggcgacggcgaccgtaaggagggcggcggcagcagctttagggctatggttttctttttttggattttctttttttcagtttataaattttgcgtgcgggcaacataaccaccccgcatgcgtaaatcagatgtttcgcgtgcaagtgcgccatccacacgcaaaaatagcgatttttacagatacttcgtttcagacggttggaagatccgcacgcgaaaatcacttttgaccgcacggaaaaatcgtttctctactagtgtgttcccctcattgagtaaagtatggtggaatgttaagagtgtggttgcggataagatataatgaaatttaaaatggacgtaattgaaggaatatatagtatttaaaattcttaggaccaaataaatccctcatatttactgatgcagggagtatatagcaggtacgagtactactaatgtgttg

SEQ ID NO: 42447 - DNA, 1399 bp, Oryza sativa
gcagcttacaatctgatcagtattaattggtcaccggccagttatgactgtggaacagctcggatgcagttgatcccttagagcaaatacaatagcagactataagttagctataaaaatataaaaaaggagagataagagcagcgggctacagatttgtagccagctgtagcacagaccccaagatgtatgcgtgtatgataggtgggaccagacattaattatatagtacatatttatatgtaactattgtatgaaattagctattaaattgacaatagatgatttggagccaatagttggttatactattaaacttgctcttatgcgcataaaaatgtactacctccgtcctaaaaaaatttgcatttctagctctaaggctttgtcccacaaaaattgtatttctagccatgtggggcccagcaaattgattcatctagataagtttccttaagttctctcagcttgtaatttaagtatgctaattatatgggttaattctctcaaacttccttttaatcatttgtatatatgaaatgtgtgcatgcaattggttcattaaataaggtcattgtggtcattttttaatcctactgttttgtcctaaattagctagaaatgtaatttttatgggacggagggagtatgaaaaatattcatatataagcatgaaacatgtcatattgtttgggtggaattcagcatgaaaatacaataattcacaaacaagatatgcaatctaaagcgaaaacaaacaagcacgcacaatatctttactcaaatgcaaaatagtcattcatatattttttttccatgttttaatcttttattttgtacttacattcatatcaaaattagttttttaaaatattcatacattttctaaatcttacttccccaataagctagatacaagtttggaaatcaagatgacaagacattctgatctctagaaagcatacactgtttgccatgaatggatactccctttagcaggtcagtaccatgcaattgacatagtagctatcagttatatgagcagtgaggttcagaaacaagaaaaggtaccatgcatctgtgtctagtgaacagtgtacaccatatgtatgtgccacatctatctatctataataaaagctaacaaaatacggatgagatctagcccgtatcacttgatatgagatgtacttgatagtgcagtggtaagaggtgtgtggttttaatcccaaggtcctgtgttcaaatcataacatacatgctcataatttcttattaaatttttttcggaggaacgtctctccctccaaatctcatttttttaagttgatgcctttagctatagactccttcggcccataaatataaaggattctaaagagattaaggataagaaaga

SEQ ID NO: 42448 - DNA, 1456 bp, Oryza sativa
aactcacagaagatgatgtagctgctagtaatagctagctaactagtatgtatgtataaggacccgtttggtaaggctccaaacttcaactcctatctctaaacttccactccagtgggagctggctcctatgagagttgcagaacagctaaaaagtgtttggctagcattcagctctagatctgaaattgaaaaaaaaaatgaaagaaaaaaagaaaaaagaaaaaagaaaaaaaaaccgatctggacactgtcccggcgcccctaggggcgccgcccacgcgccttccccacgtgcgtagccagccaccgcgcatcttctccccaccgccgcgagccgcctgcacgccgtcccgcaccgccgctcgtcttctccccactgctgcgcgtcgtccgcacgccgtccccgcccgcgcgtcgtccccccaccggcgcgagccgcccgcacgccgtcccccatcgacgtgcgtcttcttcccaccgccgtgcgccgcccgcaccttccccccaccggccagttaggtgatgaaatgtcactactacaaaatgcattctcccaaatggcaaaacctatttttaggtgaggttaagcaacccatctatccgaaaatgtctgagaaaatcactatttttccatgcgggtggtgcacccgtacgtgaaaaatccaatttttgcatgtggtgcttatatcatccgcacacaaaaataaaagtccaaaaaaaatccccaaaaatcaaaaccctagctaggtgcggtctaccgccgccgccgtcgttggatccgggcgagggacggccactgctgctgaatccgtgcgggggacagtcctgtcactgttgttcgtcgcgcgcccgccgaaggcgcccaaggtcatcattgccgcctgccagtcgcccctcgccggcgcttgggaggaaagttgagggagagagaggagagaaggtgagaaacaagagaggagtaatataaggaggagaggaggtgagagaaggaaggatggtgacttaaaaaagttttgaagtgtgctgagagggaaagaagaggtaagtgaaacttctagacagacctataagagtcctgcctgtgaaaatacattttccctgccgtttaagaggcccgcctgtgaaaatatgtttaatttcacataaaacttctcaaagagattctcttatgaaattatattgccgttttggattcggaaccgagtctccttacaatatcaactttaaacggacctagccgttgatatagaaggaatttaggggcacatgaatacttgttggaaagcttatggaatatactttcatattattttggttccatgtaaaattcctgccaagttatcaggtatctataaaataggtgacgtatctcatctaatccaaatctgatttaggccttgggccttgtgattgtgtcataggttatgcacaagggatggatgccctaggacta

SEQ ID NO: 42449 - DNA, 1045 bp, Oryza sativa
actctctacctaattctaatgtacaaaagttactatagagcctcttgtaattcagcttaaagttgtgtgttgtgaatgagtgagaggagctctatttatagcctccatatgacggttacagctatgggaaatgaccaaaacaccctcaaccgtcattgggaatgcatcagaagcatacacgtggaaggccgggatgaaaggagcttgtggtggttcgaccgaaccctgggccccacctcctggattcttctttggcaaggtcactgactggtgggccctgttggcggttatggcaattatgacccgttccatgacggttgcacctgtcttgtgggccctccaatccatgtgctcgcgtctaattggtcggaagtgtgtttcctcgcatgattgttgtgttttctccttaaaatacctacatacgcatatttcaccaacattagtagaaatgattaataataatcccttccactaagttggataccatgttttatttcattatatgcaagtattgacggtcaaatattatgatttaaggaccgtcaacaacacccccacacttaacctttgcttgtcccgagtgaaggctatggactctacaatatggttatgacttccttactaataatcatgcaagcaaattattcaaaaccatacttctacttgtggatctttgtagtgtttaccatgcgatcttgggcaattgagaaatggaacaatcttgactcaagtcaccctaactttttatgaagaacaacttgggaggtttttttttcaagtaacacaaaattataactttgctttgctcctcaattgattctcttgatcactcaaggtgtatgattcctcacaaaggtataagattgtgcccttttcttttcctaccatctagtaaggcttatgtggagttcagggtatcaaaaagagtagagcattacttgcatcacatatattgcaaagtcaaataatggatccacggaaatacaagacatactttctggtcaagaatgtgcatgtgtatgtgtaatttgtgggtggaaaatgg

SEQ ID NO: 42450 - DNA, 2910 bp, Oryza sativa
tggcattaattgacaaaagtttggcgcgcgagtcacgaagtgattttttttccaggaacgcacccaatacactgcaatatgtccaaaaatcatgatttggtgttttttttgaacttttttttgaagtgaaaaacatcgcacccacgtgttccaatgtatgccaatatggtcattaattgacaaaagttcgccgcgcgaatcagggagtaattttttgccatgaacgcacccaatatactccaatatgtccaaaaatcatgttttggtgctttctaaactttttcataccggtgaaaaacatctcacccatgcgagtcacggagtgattttttgacacggacatacccaatacactccagtatatccaaatagcatgtcttgatgctttttgaacctttttaattaatctccaatatgtccaaatatgatgttttagttgtttttgaactttttcattccggtcaaaaacatagcacccacgtgtgctaatattggcattaattaacaaaagttcgccgcccaagtcacgaagtgaattcttgcaacgaacgcacccaatacactccaatatgtcaaacaatcttgttttcgtgctttttgaactttttcattccggttaaaaacattgcacccacgtgtgccaatattgacattaattgacaaaagttcgccgcgcgaatcacgaagtgatttttttgccacgaacgcacccaataatctccaatatgtccaaaaatcatgttttggtgctttttgaactttttcattccagtcaaaaacatcgcacccacgtgtgccattattggcattaattgacaaaagttcgccgcgcgagtcacgaagtgatttttttccacgaacgcacccaatacactgcaatatgtccaaaaatcatgttttggtgttttttgaacttttgcattttggtgaaaaacatcgcacccacgtgtgccaatatatgccaatattggcattaattgacaacagttcgccgcgcgaatcacgacatgatttttttcaacaaacgcacccaatacactccaatatgtccaaaactactgttttggtcctttttgaacttttttgttccggtgagaaacattgcacccacgtacgccaatattggcattaaatgacaaaagttcgtcgtgcgaatcacggagagatttttttttaatgatcgcacctaatccactccaatatgtccaaaactaatgttttggtactttttgttccgttaaaaacatccctcccacgtgtgcaaataacggccaacattagaattaaatgacaaaagttcgccagtatgtcacggagagattttttcgtaacgaacgcagccaatatatttactccaagatgtcaaaaagtgttgttccggtgaaaaacatcgcatccacgtgtgggaatatcggtctatattcgcattaattgacaaaagttcgccgcgcgagtcacagagtgatttttagccacggactcatccaataaactccaatatgtccaaatagcatgtttaggtgctttttgaactttttcattccggtgtaaaacaacgcacccacgtgtgccaatatcggcatttatagacaagttcgtcgagcgagttacgaagtgatattttgccacggatgcacaaaatacactctaatatgtccaaatagcatgttttggtgcttcttgaactttttcactccgatgaaaaaaatcgcacccacgtgtgccaatataggcattaattgacaaaagttcgttgtgcgagtcacggagtgatttttcgtcacggacgaatccaatacacaccaatatgtccaaaaatcatgttttggtgccttttgaactttttcattacagtgaaaacatcgcacccacgtatgccaatatcgacattaattgacaaaagttcgctgcgagtcacggagtgagtttcagccacggacggatccaatacactcgaatatgtgcaaatagcatgttttggtacctttttaactttttcattcgcgtgtaacagcgcacccatgtgtgccaatatcgacattaactgacaaaagtttgctgcacgagtcactgagttatttttggccacagacgcacacaatacactttaatatgtccaaaaatcttattttgctgctttttgaacttttttattccggtgaaaaacatggcacccacgtgtgccaatatatgccaatattggtattaactgacaagttcgccgcgcgaatcacgaagttatttttttccacgaacgcacccaatacactccaatatgtccaaaaatcatgatttgttgttttttttgaactttttctttgaagtgaaaaacatcgcacccacgtgttccaatgtatgccaatatggtcattaattgacaaaagttcgccgcgcgaatcagggattaattttttgccatgaacgcacccaatacactccaatatgtccaaaaatcatgttttggtgctttccgaactttttcataccggtgaaaaacatctcacccatgcgagtcacggagtgattttttgacacggacgtacccaatacactccagtatatccaaatagcatgtcttgatgctttttgaattttgaacctttttcattaatctccaatatgtccaaatatgatgttttagttgtttttgaactttttcattctggtcaaaaacatagcacccacgtgtgccaacaatattggcattaattaacaaaagttcgccgcccaagtcacgaagtgaattcttgcaacgaacgcacccaatacactacaatatgtcaaacaatcttgttttcgtgctttttgaactttttcattccggttaaaaacattgcacccacgtgtgccaatattgacattaattgacaaaagttcgccgcgcgaatcacgaagtgatttttttgccac

SEQ ID NO: 42451 - DNA, 4615 bp, Oryza sativa
ggattttttgggttttgtttagataaaagtttagcttcgctacttttccgtgtaatcccgtgatcggttagatcgctggtttgctcgttacggaaccccaaacctatcatttgtattcaattcctatctgcaattcagattgcttttatcttgttctttcttgtttcttcgatttgcttgcaggaataaggttgatctgcaccggcaagatcaataacccatggagaggtgtatcgatcgctaaggcacaacacaacaacgtctagtacggttgtagtcgggtcgtcaacgttgctccctaattgtagttatcttcaactcatcgaaagatcgggccaacaacagccttgagtgtctcgagtggaactcagggttcatcatatttatactaagtgctctagtactaggactctagatagagaaggaagttcctgcgcaagtattagagtagtaattaataacttagacgtggtgtctaggttagagattacctttgtttgttgtgtatcccacggagttagaggtaggtggcagatggtgttagccctgagtcccgtcctagtaatcctccatgttcagatacatcatagagctatagccagaaccacgctggcagaccagcaggggtcgatgcccgaagcaacaaataggaaattacctttgtttagcatagataattaaaaacacatagaaagtcctctctagcctagcctgcctatcattagttgttgtccttggatcgtcttagccttaggtagattacacacgttccctgagttcgatatactttaggggtcacccgaaggtgaagtgctacagcggtattccgtgcgcttgcggatttatctgtggtcgtaagaaataccaacaattaataacatgattaatgatgatactagtttaactcctggtttgtaagggcaaattcctggtttggaggtttgatctgtacgaccggggttggttgttcaggtttagttaggcctatgcagcattggtgtactgttcagtgttgattaatattgatgattaattactttactgttttacaattctcaaatgtttgctaaatgctgcttttatacatgagtcctatattgtgccattctttggcatccttgtgcacttgcgtacttgctatgtggcttgcggagtattctatgtaatcaccttgcaataatcaatcaaaacttagttgaagaaaagatgcgaaggagaaaacgttcggcttataccctagttgagctgcctatgtgagtggagatgaagccatcgctagaccgttaatccgttgctgttgttttcttttcttttataaatatgtagctttattatgatgatggatttgtatattaaattgtcagtttgtgtacctcggctgattcctggacaaggattttatgcacaaattagttcagaaattactagtgaaatttctgggtgtgacttggaacacactttatagagactccaacatcacacatttggtttttgatgtcttgcgacacaaaagtccaagtgtgggggaggtcaacgagcttgtcatgacgagttccatcaaccaattccatcctggtttgcagttggtgttagtcctaccttgctaaaaaaagaaaaaaaaagggaaaagagagacagaaggaaaagaagaaaaagatgggagaagaggaagagaactagtagcgatcatgctgcctggatacactcaacccctctcttgagctcatgtgtcgcattagtttagccttcatccactcctagttgtgcacaacctctcgctcccgcagcacctacacgcatacaagcaagaggagatgccctcttcttttctcggtgtttgctactccactctagttggcacttgtatatttgcgtaaaaagatatgcatcctacgtctctgcagcattgtgccaacagatcacgccttcaaggcacaatgttcctgcacgtgaggtgtgtgcataaccaaaccacttacatgagttggcattgtaaagtgtcttcctccgctacaatccgcatcaagacagaggaaagattgataatcacatgtgaccataccaccactccagagatttcaacatatacatcatgctggtggtaagtacacttaggtatacaaaaggcaacaaaagattcacctcatcttttactcatacttatctttatttgaataagacttgagcatacatggttatgtttcttgtgtctatttgcgtatgctctagtttgggtgtttgtgcaagacatctataggcttttgaaattaagcatggtacttaggttaaggtagtcttctttaatcaaattagacatggagtcgagtttgattaatgaactctcagagttaatatgttcgtggacattggatatatatatcttctttggactaacccctataggaaagttttcaaattgacgggtaagtcctcaagttcaattcacaatggaggtaggtcagggccaggaacaaatcaattgcaaacatgcaaaggataacacatcagctttcaaggtgcacggtaagtatactgtcaattgcttctttgttatgatcgtgcaattttatcttaagctctgtataagtttttgcttaatgaaaatttggtgaacagtaaattttttgaaaaatgaaagatttcaagaataaaagaaatgtctctcgaaaaaatgataataataattggcaaacttgtgggatccacgcttcttaagttttgaatccaattcctttttagcatggatgtgaacaactaatcttgaggctacgataaaatcttctcaaatatttgtagttcctcgagtatttgttgtccactaaccttttgcaggaaataaaaagacaactaaggagcagtgtacaaaaactgcaacacccataccacgctccttggtttatgagagagatgcacagggaaccaagtagagcaaatgcaacactttgttacattcgattcggttctaagcttggtaagatctatttggtaagaaacccaagcaccccgtgtatcgtcgcctcatatatccgccctgctaagatacccaccatgctccttgttgctatttaaaaaattagataaaaataaaataaaataaatttaggcacttcatgcgcctaaagttatttgaatacaatttggctcaccggtattacaccccggtggaagcctatttgatttttatgttttttgttgaataaaggcaaggtacaaaacaagtatgggggagtctttccggaactcccgacatgcaacagcatcaacttgacacatcaatatgatgaacaccagcccatggccgtgcacaaaattcagcagccagaaacaagtcctggctgggttggccgaaccaagtgttcgcccgacccttgcctggcccggctctgtcaccctttcaccgtgtggtcaggtttgcgcgtctcctctcttatcctcccatgtttgtgagtcaaacatgcatggaaaattcgaatagaatttattttgactccaaatgaaacttaaaaacattaactctcaacaaataaaattttcctatgattaatcatctatactatttgttctttgctaacacttctcacttgtgaacaaccatctatcataggaagctcatctacccaatagttcaacatgttgttttactcattcatcatcatcattcatcatgtgacacatccaacggtcaaaagtcatctgaataatttgtatccaacgtcccagattagcgcgcgtgcccacccctccctccgcatcctctcccgcactgcgcctcctccgcatccgggcgacgcgcgactctctcgacctcgccgtctcgccgcgcctccttcgcatcgtgtcgccggaccagatcaccgcgccctccctccggcaaatcaccgcgccaccggacgcccttccccccggcaactctccctctgcatcgccgatctgccaccgatccccgccgccggctcgccctccatgatccccatcgcttgtcctccgcctccccgccgcacgaggtcctcccgtcgccaggtcgccgcggccattttgctccaccgatccccgccacacgaggtccttccgtcgccaggtcgccgctgatgagatttggacccttttgagaattgttgtggcaggagttttgcaccttgcctggttctatgttcattgtagttactagacgactcaaacaaaagatgcatgcttgcttccatatttacattgttcatttacacatgtacacctgggatacgtttttcagatgcatttttttttcaaattcatatgctcacttgctgttattccctttattttggattctcttctagacttgttagaatttatcttgtggtttacttccttctgaatggaaacaccaaacccgtacagataaccaattggtaaaagccatatgcagaggccattgagttttgttgcaaactgtacttccaaaaaaaaaaactctggctcattctttctttaccgcagttcatgtatttgattccattgaacattcgagaacaagtcccaatgaaccattttatacaatgttgcatgagaggactcacgtctactgtgacaactcttttgatctcatgcatattcatgattcatctcatgtatcctt

SEQ ID NO: 42452 - DNA, 1725 bp, Oryza sativa
cagccagtgcattaattatgctaccgctttaacacaaacctttattatcattacatatatacaactgcaaacttgtgcttttctgtttattatcatctgatatgtttgagtggttctatgctcgcagtctccaactagaattgtatgcatcttaaagcacctgaaggggtaagtaatacccatccacccttgaatcatgccttagatttggcaaatttgttccagccactagtcttctctataggacaatgctattttgtgactatttgctgcaagacaaatttcagtattccctctgttctgtaatgtaagatattttggttttgtcctgagttaaacttattcaagtttgaccaaatttatagaaaaatgtagctacatctacaacaccaaattcaaatttgaccataactaaatatatttttataatatatttgtttggtgttggaaatattgctatgtttctttataaactttggtcaagcttaaataaatttgacttcggacaaaaccaaaacatcttacaatatgaaatggagggtgtacatatgatatatcatttgttgtcactagaggagagttaattagggtggagtgaccagtgtgccctttggtgcatttcaaaaatattgctggacatgaatttgaaatatcaatcttaattcacaatcatgctaaatggtgcgcagagtagcaagcatccgagtgcctccttccctctgtttcctcgtttttcctttcttcccgtcctttactcattacatccgcttttctagttttttctgttcctcacctcctccccacatttcacattacactccagagtaaaggatttactcatccactcatctcctgtcctttcaaccatccactcatctcctgtcctttcatctttgtcctaagtaaaggatttactcattgactatctactaatctcattgtccagcttcataactaattaatcctgtgtaaagaatttacttatcgatcatctggttcataagtaattcatctttgctaaagatttacttttatttactcattgaccaataatacagctaggttcatctcccattcatcttagagttctttgctcatggactgctttccggttctcttcatagagtaaaaatattactaccgctcatattagtctcttccataatgtttaacagtcaatctactcccacatatttgttttttcccgttttgccctacttttggttttgtcctgcttttgtgagtggaaatgatatcagtagaaaacttataaaattgtatgaacataaaacaattacacaactcacacacaaagaattacacattagtcttgaacaacgaaaaaaaagaaaaaaattcagttgatgactgacgatgagacgagagcaccacggcggatggaagggctccctagagctgatgcagatgatgcatgatggaggggctgaagaggatgggcatctccttcaatgtcggtgtgggcgcccctcccagcaaagaagcactaaggcggatccacatccgccatgaccgtgagaggtaggaatgacaacaaccgagattcggtcgcaacaccagtagacagatggcgccaaatctagccgcttccatccttgaggccaccggatttgatcagctgcttcctagttcccattgtccaccgtgagtggcaggcatggagcatgctttgagctaacacctcactttgttgcttgtccgccgcct

SEQ ID NO: 42453 - DNA, 1565 bp, Oryza sativa
ctctcattggttgtggtgaactgatatgcttataatgttgtcccaggaaacctgcattggttcctttttaggtatggtatatgacaattaaacataataagatgatccaagaaatcctaaacaatttaatgaatactagcatattgcccatgcgttgcaactggattttaattaattaaaggaaattatcattaacctgttattaccatctcttaattgctgtatatatttgttattgacatgtggaccctttagtcccacactatcctttttccttcctataaaaagtagagagttggtggaagtggttgacatgtgggtcctctagccccacatgccatttttcctctaaaagaaaattgggagttggtggtggggttggtggcagaagaacatcaccactactaccttttataaggagtatagattgctatatgtgggaggacataaaaaggataaatgggaccaaaatatatgctttcagcctcctatttctatctcatgtcctaaatggctaaatgtcattccatacgattgcaagttttctggaagtacatgtgacttaacgtgttccacacagagttattttagaaactttggaaatttctaatgccccaactgttataataattgaggatactgttatgggcagggatcaaaaggattgccaggcagtctgtctactggctgctagagatgagaaataggttggggtgtagggaaggtgatgtcaaatagtagtgaggataatcaggcaaagagtagtgaacggccaaatatattttttcttggtactatttttcgcctgtttatctcccctacatagtttgtggagtggttctcatgattttactaaattgatgcttttcagctaatatttcccacaacattcccccataaaataatggttcagatttgtactgtatatgttttcgctttatgtggagttggttttggaacaaaatcatgacacaggaatagttgattaagtgctgagtggttaactatggtccggtttgttgtctcttctaggaaacttatttctcagcttcttgaaacacaattgttgcttcatgtgaacattaccttccaaatggatcggaaaatgggtgtatacctgtatgcaaggtttttttaataattttacaccaaaatggttgcatgcaatgtgaatatcagtattaaaagcaaacctatttattccctgtcccaagcaatatctgtactggtttgacctgcattatgtgtatgttgtttctttcacttctttttatttgtttgtgcgagtgttcctaaaccatgtcatgccatgtggtgtgtttttcaatgttctgaatattttattcagctgacacatggttttgctatttaacttatgattggaatcgatcctcccctttacttttgatggaatgatggctaaccatttgataattgtgttgtgaaaggtacttgagacaggtgatgacttaggagaggttacagaaactgttgattactttgttcaagcaagcaccattgctgctggcaacttgtttgggagggtatacaactgctaatatttc

SEQ ID NO: 42454 - DNA, 795 bp, Oryza sativa
caaacacgaattgctttcgttgttatttgttttttatttgtccaaacttcggtcaaacttcaaaattctagtccaccagtatatacttatcgcatgcaatttgtcatattgtcaagtagtttggaggaagtaatgctagaaaaaaaaagaatccttttgaggaagtagagatcaaataagcatatgatggtgaagtgcaatacctattttgctttcatatggctttagaggacacagacatgtgatgatttcctgatagatgaagatagaagttagcaatctggtgctttgtatgtttaggactaagctggtgcatagaactgtgttttaactattgggactgattcttatttcagttctagcctatgaacttgtgtgagatttggatggattaggtttaggaaaggcttttggaagtaaatttgatatggccagctagacgagttgtatatgtcatcttaattgcacatcaccaattactgaaataattaaatacatgtcttttttgtttcgtcgtgcagattattgtacttgtactctttctgtgaatgctcccagtatatttattagctcaagtgagcgaatcgctgcctgtacactttatcgtgacagaggtcctgaaccatggctgacaaagacacgtagtgatgcatggttatctactggtattgcggaggcaattgatggcaatggtacttcatctcatgatcaatctgatatatattgtatcatttgctatgaaagcggtaaactggaaatttttgaagtgcctagtttccgatgtgttttctctgt

SEQ ID NO: 42455 - DNA, 1216 bp, Oryza sativa
gttgcaacccagtcatccttgtgtgtccttgttgactattacaacctttggctatagatattgttgtggtttgtcaggaggagacatcgagatttagtatgctatttgtatcttcggaaacgtatcctgttccacaactctgacttggtttaattaactagataaatctccttaaagacatggtaaaacttgtccctttgcccctgttcaacaatagttttgacattgacatttctttctttctttatttgtttgttcagttcaaattaaaaaccattcaggtccatgccatcatgttgaagtgaatctgagcaacaccaatatgccattgccatgggggaaaaatcgcctcaggaattacctcagtccttgcttagatgggactcaatcccaatccattcacgtgtatagggagggaatttgaaactaaaatcttgggccatccaaactgctcttattccgcaagtttagggggttaggaacctggttatgtagttcaggatgagccagagttcagggaataaactgaattactctgaagccttctcatccttgaaaacctgaccatgttgcatctttgcaggtccctttgcatggcaccccacatcaggtcacgtattatgcagagcaatctctttatcccctaatagtgtctgttcctgtaagtattagtatatgttattactgcaattctaacataatttatcattggcatctaattatgtttttgaggcattttcgaatatgttcaacacataaagtccaaataacaccctccgccacctaaactttgattgagagtccatctagcatattgaactttaaaaccggacgttcaaacccccaaactaaacaatacagtttatacaaccccctaaggtgattttgcaaagtggtttttcatctaatttgcatgtatgttggatgagtttgatcacatgacatacgtattagacatatatatgttaaaaatctccatgcaaaacttttttttcactcccttattcgctgcaacaacattgtgaaagtgtcacatcactatgtaagaagaaatttatgacctactattaatgatatgtaaatatgttgtatcagttattcaaagctgctcatttaagcttccaaatgtgcaaactaccctagggggtaatacgaatggtattgcaaagttttttttttttttttttttttgggggacgggggggggggggggggg

SEQ ID NO: 42456 - DNA, 1880 bp, Oryza sativa
ggtacgttcgtggcaaaaaataacttcgtcattcgcgcggcgaacttttgtcaattaatgccaatagtggcacgtgtgggtgcgatgtttttgaccgaaatgaaaaagttcaaaaagcaccaaaacctgatttttggacatattggagtgtattgggtgcgtttgtggcacaaaatcaattcgtgattcgtgcggcgaacttgtgtcaataattgccaatattggcacccgtgggtgcgatgttttttaccgtaatgaaaaagttaaaaaagcaccaaaacatgatttttggatatactggagtgtcttgggtaggtttgtggcaaaaaattacttcgtgattcgcgcggcgaacttgtgtcaattaatgccaatattggcacacgtgggtccgatgtttttgaccggaacgaaaaagttcaaaaagcaccaaaacatgatttttggacatattggagtgtattaggtgcgttcgtggcaaaaaatcacatcgtgattcgcacggcgatcttttgtcaattaatgccaatagtggcacatctgggtgcgatgtttttgaccggaatgaaaaagttaaaaaagcaccaaaacatgatttttggacatactggagtgtgttgggtacgttcgtggcaaaaaataacttcgtcattcgcgcggcgaacttttgtcaatttatgccaatattggcacacgtgggtacgatgtttttaccggaatgaaaaagttcaaaaataccaaaacatgatttttggacatactagagtatgttgggttcgtttgtggcacaaaatcacttcgtgattcgcgcggcgaacttgtgtcaattaatgccaatattggcacacgtgggtgcgatgtttttgaccgtaatgaaaaagttaaaaaagcaccaaaacaagatttttggacatattggagtgtcttgggtacgtttgtggcaaaaaattacttcgtgattcacgcggcgaacttgtgtcaattaatgccaatattggcacacgtgggtacgatgtttttaccagaatgaaaaagttaaaaaagcaccaaacatgattttgggacatactggagtgtattgggtacgttcgtggcaaaaaataacttcgtcattcgcgcggcgaacttttgtcaattaatgccaatagtggcacatgtgggtgcgatgtttttgaccggaatgaaaaagttcaaaaagcaccaaaacatgatttttggacatattggagtgtattgggtacgttcgtggcaaaaaatcacttcgtcattcgcgcggcgaacttttgtcaattaatgccaatattggcacacgtgggtgcgatgtttttgaccggaatgaaaaagttcaaaaagcaccaaaacatgatttttggacatactggagtgtattgggtacgttcgtggcaaaaaatcactttgtgattcgcgcggcgaacttttgtcaattaatgccaatattggcacacgtgggtgcgatgtttttgaccggaatgaaaaagttcaaaaagcaccaaaacatgatttttggacagattggagtgtattgggtacgttcgtagcaaaaactcacttcgtcattcgcgcggcgaacttttgtcaattaatgccaatattggcataattgcacacgtgggtgcgatgtttttgaccggaatgaaaaagttcaaaaagcaccaaaacatgatttttggacatattggagtgtattgggatgcgttcgtggcaaaaaatcacttcgtgattcgcgcggcgaacttttgtcaattaatgccaatattggcacacgtgggtgcgaagtttttcaccggaatgaaatagttcaaaaccaccaaaacatgattttggatatattggagtgtattgggtttgttcgtagcaaa

SEQ ID NO: 42457 - DNA, 603 bp, Oryza sativa
attccggtcaaaaacatcacacccacgtgtgtataccaatattggcattaattgacaaaagatcgccgcgcgaatcacgaagtaactttttgcaacaattgtacccaatacactccaatatgtgcaaaaatcttgttttggtgctttttgaacttttccattccggtcaaagagatcgcacccacgtgtgtatccaaatactgccattaattgacaaaagatcgccgcgcgaatcacgaagtgactttttgccacgaacgcacccaataaactccaatatgtccaaaaatcatattttggtggtttatgaacttttgcattccggtgaaaaacttcgcacccacgtgtgccaatatatgccaatattggcatcaattgaccaaagttcgtcgcgcgaatcacgaagtgattttttggtaggaacgcacccaatacactccaatatgtctaaaaatcatgttttggtgctttctaaactttttcgttccggtcaaaaacatcgcacccacgtgtgccaatattggcattaattgacaaaatatcgccgcgcgaatcacgaagtgactttttgccacgaacgcacccaatacacttagaatatgt

SEQ ID NO: 42458 - DNA, 1610 bp, Oryza sativa
agtgtgttgggtccgttcgttgcaaaaaatcacttcgtgtttcgcgcgtggaacttttgtcaactaatgccaaaattgatatatgttggcacacgtgggtgcgaatttttcaccggaatacaaaagttcaaaaagaaccaaaacctgatttttggacatattggagtgtattgggtgcgttcgttgcaaaaaatcactacgtatttcgcgcgtcgaactatggtcaattaatgccaatattggcacacgtgggtgcgaagtttttcaccggaataaaaaagttcaaaaagcaccaaaacaagatttttggacaaattggagtgtattgggtgtgttcgtggcaaaaaaaatcacttcgtgattcgcgcggcaaacttttgtcaattaatgccaatattggcacacatgggtgcgaagtttttcaccggaatgaaaaagttcaaaaagcaccaaaacaagatttttggacaaattggagtgtactgggtgtgttcgtggcaaaaaatcatttcgtgattcgcgcggcgaacttttgtcaattaatgccaatattggcacacgtgtgtgcgatggttttcaccggaatgcaaaagttcgaaacgtactaaaacattatttttagacatattggagtgtattgggtgcgttcgtggcaaaaaatcacttcgtcattcgcgcggcgaacatttgtcaattaatgccaatactggcacacgtgggtgcgatgtttttgaccggactgaaaaagatcaaaaagcaccaaaacatgattcttggacatattggagtgtattgggtgcattcgtggcaaaaaaaatcacttcgtgattcgtgcggcgaacttttatcaattaatgccaatattggcacatgtgggtgcgaagtttttcaccagaatgcaaaagttcaaaaagctcaaaaacatgatttttttgaacatattggagtgtattgggtacattcgtagcaaaaactcacttcgtgattcgcgtggcgaacctttgtcaattattgccaatattggcatatcttggcacacgtgggtacgaagtttttgaccggaatgcgaaatttcagaaaccaccaaaacatgatttttggacatactggagtgtattgggtgcgttcgtggcaaagaaatcacttcatgattcgcgcggcgaagttttgtcaattaatgcaaaaaatgttatatattggcacacgtgggtgcgaatttttcaccggaatgcaaaagttcgaaaagcaccaaaacctgctttttggacatattggagtgtgttgggtccgttcgttgcaaaaaatcacttcgtgtttcgcgcgtcgaacttttgtcaactaatgccaaaattgatatatgttggcacacgtgggtgcgaatttttcaccggaatacaaaagttcaaaaagaaccaaaacctgatttttggacatattggagtgtattgggtgcgttcgttgcaaaaaatcactacgtatttcgcgcgtcgaactatggtcaattaatgccaatattggcacacgtgggtgccaagtttttcaccggaataaaaaagttcaaaaagcaccaaaacaagattttggacaaactggactgtattgggtgtgtt

SEQ ID NO: 42459 - DNA, 687 bp, Oryza sativa
gacaaaaattggctgcgcgaatcacgaagtgatttctttgccacgaacgcacccaatacactccaatatgtccaaaatcatgttttggtggtttttgaaatttcgcattccggtcaaaaacttcgtacccacgtgtgccaatattggcattaattgacaaaggttcgccacgcgaatcacgaagtgagtttttgctacgaatgtacccaatacactccaatatgttcaaaaaaatcatgtttttgtgctttttgaacttttgcattctggtgaaaaacttcgcacccacgtgtgccaatactggcgttaattgacaaaagttcgccgcgcgaatcacgaagtgatttttttttgccacgaacgcacccaatacactccaatatgtccaaaaaccatgttttggtgctttttgatctttttcattccggtcaaaaacatcgcacccacgtgtgccagtattagcattaattgacaaatgttcgccgcgcgaatcacgaagtgattttttgccacgaacgcacccaatacactccaatatgtccaaaaatcatgttttggtgctgttcgaacttttgcattccggtgaaaaacatcgcacccacgtgtggcaatattggcattaattggcaaaagttcgccgcgcgaatcccgaagagattttttttgccacgaacgcacccaatacac

SEQ ID NO: 42460 - DNA, 572 bp, Oryza sativa
ccaatattggcacacgtgggtgcgaagattttcactggaatgaaaaagttcaataagcaccaaaacatgattttttggacgtattggcgattatcgggtgcgttcgtagcaaaaaatcactttgtgattcacacggcgaacttttgtcaattaatgccaataatggcacacgtgggtgtgatgtttttgaccggaatgaaaaagttcaaaaagcaccaaaacatgatttttggatatattggagtgtattgggtgcgttcgtgacaaaaaatcaccccgtgattcgcgcggcgaacttttgtcaattaatgccaatattggcacaggtgggtgtgatgtttttcaccggaatgcaaaagtttaaaaagcagaaaaacatgattttttgacatattaaagtatattgggtgcgttcgtggcaaaaaatcacttcgtgattcgtgcggcgaacctttgtcaattaatgccaatattggcacacgtgggtgcgatgtttttcaccggaatgaaaaagttcaagaagcaccaaaacattgttttggacatattggagtgtattgggtgcgtttgtg

SEQ ID NO: 42461 - DNA, 1033 bp, Oryza sativa
aaaaatatcaaaaagcaccaaaacatgattcttggacatattggagtgtattgggtgcgttcgtggcaaaaaaaatcacttcgtgattcgcgcggcgaacatttgtcaattaatgctaatactggcacacgtgggtgcgatgtttttgaccggaatgaaaaatatcaaaaagcaccaaaacatgatttttggacatattggagtgtattgggtgcgttagtggcaaaaaataatttcgtgattcgcgcggcgaacttttgttaattaatgcaaatattgtcacacgtgggtgcgatgttttcgacaggaaagaaaaagttcaaaaggctacaaaacatgattttggacatattggagtgtattgggtacgttcgtggcaaaaaataacttcgtgattcacgcggcgaacttttgtcacttaaagccaatattggcacgcgtgggtgcgaagtttttcaccagaatgcaaaagttcaaaaagcacaaaaacattatttttggacatattggagtgtattgggtgcgttcgtagaaaaaactcgcttcgtgattcgcgtggcgaagctttatcaattaatgctaatattggcatatattggcacacgtgggtgcgatgtttttgaccggaatgaaaaggttcaaaaagcaccaaaacaagatttttggaaaatttggagtgtattcgagtgcgttcgtggcaaaaaaaatcacttcgtgattcgcgcggcgaacttttttcaattaatgctaatattggcacacgtgggtgcgatgtttttcaccggaatgcaaaagttcaaaaagcaccaaaacatgatttttggacatatcggagtgtattgggtgtgtttgtggcaaaaaaaatcactgcgtgattcgcgcggcgaacttttgtcaatttatgccaatattggcatacgtgggtgcgaagtttttcaccagaatgcaaaagttcaaaaagcaccaaaacatgaattttggacatattggagtgtgttgtcgaaacgacaaccgcataagtcgaaagacgtgg

SEQ ID NO: 42462 - DNA, 700 bp, Oryza sativa
cacatcaatattggagtgtgttaggtgtattcgtggcaaaaaatcacttcgtgattcgcgcgacgaacttttgtcaattaatgccaacattagcacacgtggaacgatgtttttgaccggaatgaaaaagttcaaaaagcaccaaaacatgatttttggacatattggagtgtattgggtgcgttcatggcaaaaaatcaccacgtgattcgcacggcgaacttttgtcaattaatgccaatattggcacacgtgggtgcgatgtttttcaccggaatgaaaaagttcaagaagcaccaaaaacattgtttttggacatattggagtgtattgggtgtgtttgtggcaaaaaaatcattttgtgattcgcgcggtgaactattgtcaattaatgccaatattggcatatattggcacacgtgtgtgtgatgtttttcaccagaatgcaaaagttcaaaaaacaccaaaacatgatttttggacatattggagtgtattgggtgcgttcgtggaaaaaaaatcacttcgtgactcgcgcggcgaacttttgacaattaatgccaatattggcacacgtgggtgcgaagattttcactggaatgaaaaagttcaataagcaccaaaacatgattttttggacgtattggcgattatcgggtgcgttcgtagcaaaaaatcactttgtgattcacacggcgaa

SEQ ID NO: 42463 - DNA, 829 bp, Oryza sativa
ggttggaaaaataaatatggggctttgtgtactgggatacagattgtgggtttgagtgtctctgttagttgcttcagattttaaggagcccatctagagatgttctccattgcgagctgagttttcctacgaggagaacactctagtaggagtagcttgcattgtggatgccctaatgaaggccttacgcatcctgctttctagaaagtgtaataccagccacctccattgacgcgtgggccccaggagactcctcccttctggccccacccgccatagacccctccaaaacccatcggccaagtcccaacggctccatcggccgcccgcctcgcacgcttcctgtaatcccgttggaggaggaagccagttaccacctcccgtctccctctcttgcggtggtggatttcttgccgacgtttccgtccccctctctcgctctccctctccgcagtccagaatcctctgctccgcccgaatcgccgccgcttcttccgaaccggtggcgcggccgcggagccctaacccctaacgcgtgctgtgacatctccggctgtgacaaggcagtgggggcctccggggacctcattttccgcaagtggaatccgctgctccacccgaatcgcctccgcgtcttccgagtcggtggcgcggccgcgagccctaaacctacggcgtgctgcgacgtcaccggcggtctcgaggcagtcggggttctccgggcggccatgtcgatggactcggtcatctcctcgcgcagcggcgccgactacaggagcttccgccagatcacccgggatcgtgagtgccttcctgccctgcccccacg

SEQ ID NO: 42464 - DNA, 761 bp, Oryza sativa
cagccaactgccttacctgtatgtgatacatacataatgatgcagcaagccagcaatacagtgtattgccaaagtgttggttaaatttcgaaaataatgagaacaattagtggtaattcactaatacattgtgtgatacgtttttcaatacacattcctgtcctgcttcttccatagcaagggaatcctctcctcgctgcttttcgcgatgtctttgcgtcatgcctgtgaacagcaggggatgaagctgattctgggcagtaatgaggggatgtcacactggatggacagttgaagctggagtttgatgagtatcctaaagtgaaaatcaagaggaagaagagaggtggtcgtggtgcttcatgcacatgaaagaggggttaggtcaagcagcctctattgctgtgctggtgggttgattgggctgcaagggcataacatgcctgttggtcgatacaatgggcaaaagtgccctatctctttcctcctttaccttttccttttcttatgatggcataatggatcttctgcgccttcttgtatgcggcataacatatatcatgctgcaattatattttaacatatatgtactcaaatcttgcccctccttttattttgaaaattgtgtatcactgtcttatgtatctatataactgatatgtgatactcaggttataatgcaggaaatttagcaatttctattatttcattattgttgagtcttttttctgtttttttttgcaggcggcgtgtcatacagg

SEQ ID NO: 42465 - DNA, 1424 bp, Oryza sativa
gggaatccagcggagcgggtagggtctcggatgtccagaattgtgggattcccctcgattgcgactgattgatttgatttgattcttctcctcccctcgtgctgggagacgtggagtggagctggagaagtcagcgccgtggatgtgggatcgatggggatgggtctcgtgctctcgtctcaccgaggattaaaagaaattgtggcgcgcgtgtggcttcgacgacggcgagaggtgagcggcgcgaggtagacgacgtaatggctcacgcactcttcggttcggtttggttttcttcggttcttcgagattctggttttttttttattcacaggagaaaaatataagccggattaatttctgttggaaaaaacaaagaaaaaccacgcaggcgttgctgcagtgcagagggaaggggatggaagtaaaagatggaagttgggaacggccaaggtgaagtacgacaagtctacaacctgagtttatctagtttttttttcccttgagtactctctcctccatttcataggctgtgtttgcatccctatgttcccagcccatctccctcgttttccaggcgcacgcaacacacactactgggccattaaacccttgcaaaaaattcctataccccagttgcttaaaacatccaattaatctatttttttaaaatagctaatcaaatttgcttaaaaaatcaaatttgcttaaaaaaatagctaatacttaattaatcacgcgctcccatcactagactccgaacacagcgtggagtactatacactttaattttttttctttaattaaattttaggcttgactaaaatttaggtcatcatcatcgattgctcatattctgtaataaatcaaaacggtttactagaaaataaaaataatttattaaaaattattaaaagtcaatacttaaaaagaaactacgttaaaaatatttaacatcttattcgttaaaaaaagttaagtgttttatagtattaattataaacgaagggagcacttaagaaagaaaactaaataaacgaaaaaaaatgttcaattattattccttatagtttttcggtttatttctgaccacctacaggacgcttccgtagattaatgacgttgaaactgtttcttaaacatgtaaaaggacatgcaaacacgtatgccacatgcgccacctacggcgtgctgcgtgcacgtctcacacatatgcttatcaagtgcgtcaaaattgatttgcaaattgcaacattcaaggacacgcacgccccatttgtcccgttggcagtgacgtgatttcgcagcgttctatcgtaaatgccagaaaactagtaatttaattttgatctgattaatgtcaacgaaaaaaaatgtgtcttatgataaaaattttcttagcatatgtttggtttcgggactaa

SEQ ID NO: 42466 - DNA, 697 bp, Oryza sativa
tgtgcttgttttaccactgagaaattcagacttcagtttagcaaaacgatctttggaattcgagaattcaactgaagcttatatatggtaaaaaatctagccagctcacatgatgattttacaaagcaagcacctggatagatcacaatatactatgcaaaaacaaaactacatctcgccgggtagaacatgggactcatggatctgaaagttgcacagttctaggtttgtaccttgcgaaacatactactgaaagttaaactgtacataagctcttctttcaggttagggaattgcagtgccggctgggttgccatggtagtaaaactagtaagcaccacagatgctgctaacttgaagggaaaagaactgcagcagcagaagctcaaggaagctcgaggtgagacgccctagaacaaccaatgcttcttcttggttttgcgggttaggagatctgcattgtacataacaggagcacattcagaactaacaatgcaaaatatcatggtagggaatgttagaatttaatgatgtaagaatcataagcgaaaattcgatgttcatatagtctaagaaagacactcaccgtcagttgcgtacaggaattgtagtgccttcacaccagaagcttagccacaactctacaaatgcgggtcatgaaagaatcagataccatcggtagattaaaagcgtcgca

SEQ ID NO: 42467 - DNA, 694 bp, Oryza sativa
ggcccggcacggcctgctacagtaacgggccgtgccggcacggcccgtttagccgtgccgtgcttgggccgctggccgagcacgcgggccggcacggcacggcccggctactgtagcgggccggcacggcacggcccggggcacggcccggcacggcacggcggcggcccgtcaggcgcggcaggcgggcggcggtccaatgggacggcgacacgtggcactaacggctatttgaccgttgaaatttgaaaataaccgttgggaggctaaaaattcataaaatttcaaaaaatctcaaatttcgccctataaatagggcatgaaccccagccatttctcctcatcccacactcctcatcttgtgctctcaagtgttttaagtgctctctttgttctcaagtgtgcatttttttttgattttgacaaaatttgctcaaattttgtcgaaaatcacaattagtttcgtagttccacagtttgatcgcagaggtttcaagagctccgcggttggaaagatgtaagtaatattcagatttgtgtatatatttgtattgtgggtgtgtaaaaacatcagtattcgacaattctgtttatgtcggtttaaattttcagaatggatccgaactttccataccagtcgccgtcgttcaccttgggtgatttcgaccccaactacatgtcggggttgggcggt

SEQ ID NO: 42468 - DNA, 1745 bp, Oryza sativa
catatattgccgcataaattcaaatgcactgaaactgaacaaatggagtatggacacatcaaatatttcgtaaggaacgaaacagtaaaacactgatggcttcttaataaggtaaaaaacatacttacatgaaacaccttcttccatcacatctgccatcttgcaagaaaatgacataatcttcaccgtaagtttgtccatgataagaacctaggagttacaaaacaattttatgcgtatcacattctccccttttgctgcaaggtgctataaaattattttctggcaatataaaaaacttgaacgccatatctcaaagaacaccttccatgccgattttgagctcttcttcgttgatctcaacatttcaaataataaacctatataggtgccacaatcataaacaaataaaacagtcagatagtaaaacggcagggatgtcaacaagaaccaaagaacacagtaaagaacatgtttaatctgtagcatgttgtatgtatgttcctcagttcacttgcactatgactttcaagtgccttgcttttgttatttctaattacccagtcaaactcaatagccattccatacaatgagtttttttgttatgcttgaaattcaggctatttcatgcacaaaaaacaagaaaagtcaaattgtttcaatgctggagaccatcctatgcaaagagaatcttttaaaggaaaaaatatctattatatgatggtgttgcaggttgtttggggtgatgtagcatcctatgtcatgcgtgcactgatgtcaataatgattcacaaaaagaaaactatgttagatttttactaacgagatgatgtggatgccatgtgtaaaaagaaaaaaaaatgatatatgcacgatgatacagatctaatattctcatgatagcagtgtctgccagttttgattgggccatgtggtgccccttactttccaaataaatcacagaaggaatgactaggaattaatctagaagaaaccagaaggctctaaaaatattttgaacaaaggagcaaatatctagcatagatcaacgaagcccacatgcaagttggttatcccatagtacctatcaatcatagattttattccgtcatgggcataggttttatggcatgaattccactcatcgagcataaatttataaacaaaacccaatacacctttaaaaatatcatcacctattttatcatttgatagacgatccaattataactatacacaacacatgaacactaaataatacccaagaaaagataattaaggatttttaaaactaaaggaaattaaactaattctataaaaaattacaaaaattatacttcttagtaacacatggaaacaatttgcatgtgctataacacaagcgtgccaaaaaaaacacgctgattttataattttaactcaaaacatgttaccagaaaaattaatacagaaaggacaaattaatctatgaaactagtgccagttttaatagttcagagctgaaactaaacaatattatattgaagttcagagggtaaataaaccagagaagaagctaactgctagcaagtataatagtaggctataagctggctaaatgctgagttggaggaaagaagagaggagagaggagaagcgggctgtaaacttacagccggcttggacaaaagaaccaagaaactccgtgagagagacaagtgggcactgtattaattgtgaagagctaactattgtataggtaggct

SEQ ID NO: 42469 - DNA, 1332 bp, Oryza sativa
taccttgggttattataacttgactagttgagctttatatattggttcggctagatattagatatgattgcttagccatgcttagaaacattagcacactattgggataacttatgactcactattatttaatgatggcttaatgatagttcacgatggtcaatcgtgattggttaattaattacttgccaactaaaacttgataatggtgggttgtgagcacatggttttgagagtcgtgctcatgacaattaaggaccgattcacgagtttcggttgtgaaacattaaccgtgccaaccacaagccagcgtgggcaacggctttaccttttgtatagcatggttcattgcggagcaccagactgagaagtggcggagataagcccacgggggtcgctggggagtccatgccttgtttataagggggtgattatgatccaggaaaggtgcgctgtagtggattgtgttgtgcaaggggtactgtcacagctcctttccgaggtaccgtggtggtattaaggcacatggtgacatgttgtggggctgtgtcttgtgggtacagtggtacacctctggccagagtaaaactattcgaatagccgtgcccgcggttatgggcgggtctaacaatgtctttcatgattagtctcacacttctcatcataataaaagatgctataactggtaataatttgattagctcctggtttggaatggtatattcctggtttggagatagaactatgcagccgggatggttgttcagaatggttgggcctatgcaacagggtatgttgtatagcgttagattaatattgtttaattattacttaactgttttattaaattctgaaatgtttattaaatgctgtttatgcaaatgaaaccctactatgccatcctttgttatcctgtgcacttgcatatttgctgcgtggcttgctgagtatgtcatatactcaccttgcaatcattcatcagaggaggagttctacagtgatgctgatggtgtggaggattaggtgtagccctggtcaagctgcctgtggagtggagtcgtctgcgccgtttatcttattttttccgctgcttagatctttattgattgagaggaactatctacctctgtaatgacattttattcgcttattaattagagtgataattgtactctattatcaatttgttattgtgtgcctcggctgattcctggacgagggtcacacacatgtaagcgtttggaattttgaatagaaattccgggcgtgacaccttctctccatctatagttttataggaatgtgggtgccatcaataacccctatgtaatt

SEQ ID NO: 42470 - DNA, 1394 bp, Oryza sativa
gtggaaagcaataacttatacaccaccacggacggctttgcccaacgtggcgagctgaaccccccaacccgacatgcatatattttttgaaatttcggaaacacaaaaactgatgtccgattcatacccagatggaggcaggcaaggcaggaacgaggaggtcgccgcgccgcccctccaaccctgctcgccgtcgccgcccgccgtgtgcggaagcagaggagccccgtccacaccgcgcctgcggaactcctcgccggcgacgccgcgccctagctccgcctccgcctccgcagattgggaacggagagagagaggagaggagagaggggggagatggatcgagagagaggcggaggtgggggaagtagtctctccacttcctctctctgttcttaaattctcttgggagggagagctcgcctcccattggagggaacacctggcgggttggcgggtccggatccgacacaggtcaagtgcctgtggtgtggggccacatgtcggtgtcagaggatgagggatgtgtgctcctcctgccgtgctggaagatgcttttaattagctcgtgttactgatgattattagttgtagtagctcgagttagttggaaaatggcggcagatgggaaccgtacaaggtagttggttaagtattgtttgtatcgaaagctccaattattgtcacttggtacacaaacagtaggggctcatgccttaaccattctttgttgcgtagggagtacttgtgtagggtaactaatagccaaagcatcacaaatcacaaaccagaacttgacagaaaattggcctttttaaccagcacctgacaaccagccaattttctgttacagcacaaagtacactgttacagcacttgacaaaaaacggtgggcctgatcggaactgctggctgctgcagccgtcacgactgtggccgttttcagctgctgctgtagctgatttttagctctcgcagccgcagcggcggcagcagcaagcgctaccgatctctctcagtgtttgacatttccgacctctttaaaaataaatattttttatacaattttataaagctacttaaaatctgcaaaatttttacaatccaaaagaaccatttttttatgctactgctatttacattgaggtgttgctttgttggcaaatggcaaatcacactgaaactctgaaacccgatcatatataccttgacagcgtgaaatggctcgattaatttctctaggataagaacgaattcgcaaatgctcctcctacggtaaacaagcacatcaccatccagggtgcgcacgtacgcagcacattgcaattaccttttttttttcccttgcttttttgcagctagtgagtggagtagtgaccatacttatccacagc

SEQ ID NO: 42471 - DNA, 738 bp, Oryza sativa
  unsure (1)..(738): unsure at all n locations
tccaggaagtcatataaaccagaatcgccagaattttctgctgatgactgtaaagagatgaaagttcaaactggtcattaaaaaaantgtgtgcacgataagagtggtgttgagaagtcaagttatcaaagtagcattttgtcttcgttccaaaggagctaactctgtttttaaatatttgatctttttttcataaactcactaatgcatatcactaatacgagggaaattgtaagtgaatagtgaatgaagataaataatggtttgagagagagatagagggtgaactaaccaatatatcccaactgcatacaatcatcaagggcaatgcgtgcatgagtgatagaaatcatggcagcaagtatcattattgtgatcacattctgcatggagaaatgtattttttccaagaatataagcccattcctctgctagtaaagttcccatgtcaacctattttactttaaaaccaaagaaactgtaaataaaaaaacgagatagagatttgcaattcactgggtacaaaagttagatgcacttctttaacattttagcagattgcttccaacatatgacatcaacttcccagtcagttggttattttacaatcttgaaaagcaatatttttctatcagtccaactaatttgagaaaaaaaattctgaatgagatatgtcaagagcagttgtgaggctgaattgttcagggatgtatggaaagcaagcttgtgtttgacgca

SEQ ID NO: 42472 - DNA, 2078 bp, Oryza sativa
ccaattcttgacgtgcggtgcccgcaaccaaacagaactgcagaaatgttaaaatgctgtagatttccatgtactcccatcagagatgactttgagaaggctcaaattcgtagactcctctcgaggttttttctacccaggggatgaccgcgatctcataagaccgacaggaccttccaaaaccagagcacgaactacggagatgagacacaacattgccacaccgtaacaacctcagcacaagcggacaggcaaaacacaagcaatacacaaagcaagaatagtctgcagaaaactgtaccacgagaatggggaaggcatggaaagaacaaactaccagaagcactttgcgcatatcggacatgctcaaaacacgccccatgcggcacgacaaccgcaccaacccgtctaccggtaagactcgtccaccttgcagtcaaatggacaacacaggggcgcactaagctatccggactgggaacatggacataaaggcgaaatttccagagacaagaccaaccaagagctaaaagaaaatggccaaggccctactgcatgaagacctgagaaggaaaacggcagcggcaccaaggacacatacacaacaaatgacccaaagaactaatatgaaagtgtgaccaaaagacccaaaaaaggatgagcatggataacacgaaatccaagccacaagggagtacaacagcaaggccaaaaggtgctagctgatacaactcacgggctgacagcctttcgggacatggcaaaacatgcaacagcaaatggatgggatccatataccgtgcgttgacgcttcatcacatggagccgtcacgctgagccacaatgaaggtaacattttcaaggtaaatggccatcatttaaagttttccttgctccgttagaagttgatcgtgacttagatgttgtgaatctagtctcttttagcttctacccggagtctttaggtcccccttgatccgttagtttttaatgccccaagtccttaggcctgataggcacgcttaggtctaggttgtttagcttatttatttcatttcattccatccttataatgtacctatcatgataaaaataaaataaaataaagttggctccttggtcttccaaccaagtgagtcctttttgcttcacttttgtctttgtttttctttttgtgtctaataaagagtcccatgtacaaagacaagtgtggaggtgatcttgcacatcaatgccataaccaaaacaagatcaccccagaagtgatgagccatgacgaaccacataaggaaaattgatgcagtcagaaccaatgaggggtcagccaaacctccagttcggctgaaccacctctaccatgaatcatcctctgttttatacaaagcgcaggtttgcacaatttttcctttggacatccattctatcttgagtttaatttgattatcaattctaaaatatcaaagataattaaactcaagctagggatagtaaaattagagttcatagtctacctgaaaataatatgcatgcctattattctttgctcattacttgttacttgtggtgacatatccaatagggaccctatgctatctaggtaattaatgaatgagatacggtctgatgatagaaattctgctcttcatgttgtgcacttgggaattttataaaaaaaagaaaaaaaatataacaatgctaaattcctcattgatatttttattcccactagagccataggttgatcattcatgattagcttgctacatacgttgcttgtcattacattgagcattgtcaagttttgtgaccctagtgaaatgcttttcatactttcatggtcgagatcacatatactccacatacacccacctatgcttgacttctacactggaagtgagcattcctcatttaccattcattccattcattttccacaaaataaatactccatatcatttatacgtcttcctccaaagttcttcaaaaaaaaaaacagagagagagaggcatgtctatgaaaaagaaagaaaaaaaagctcatacaagtatggagcatgatgatgaggaaaaaaaaagaa

SEQ ID NO: 42473 - DNA, 711 bp, Oryza sativa
gaacttttgcaatccggtgaaaaacatcgcatccacgtgtgccaatatatgccaatattggcattaattgataaaagttcgccgcgcgaatcacaaagtgagtttttgccacgaacgcacctaatacactccaatatgtccaaaaatcatgttttggtgctttttgaacttttgcattccggtcgaaaacatcgcacccatgtgtgccaatattggcatcaattaacaaaagttcaccgcgcgaatcacgaagtgattttttgccacgaacgcacccaatacactccaatatgtcaaaaaatcatgtttcggtgctttttgaacttttgcaatccggtgaaaaacatcgcatccacgtgtgccaatatatgccaatattggcattaattgataaaagttcgccgcgcgaatcacgaagtgagtttttgccacgaacgcacccaatacactccaatatgtccaaaaatcatgttttggtgctttttgaactttttcattccggtcgaaaacatcgcacccatgtgtgccaatattggcatcaattaacaaaagttcaccgcgcgaatcacgaagtgattttttgccacgaacgcacccaatacactccaatatgtcaaaaaatcatgtttcggtgctttttgaacttttgcaatccggtgaaaaacatcgcatccacgtgtgccaatatatgccaaaagacatgatcagcaa

SEQ ID NO: 42474 - DNA, 701 bp, Oryza sativa
tgaacttttgcattccggtgaaaaacttcgcaaccacgtgtgacattattggcattaattgacaaaagttcgccgcgcaaatcatgaagtgattttttgccactaacgcacccaatacactccaatatgtccaaaaatcaggttttggtgcttttcgaacttttgcattctggtgaaaaacttcgcacccacgtatgccaatattggcataaatagacaaaagttcgccgcgggaatcacgaagtgattttttttgccacgaacacacccaatacactatacactcctatttgtccaaaaatcatgttttggtgctttttaaacttttgcattccggtgaaaaacatcgcacccacgtgtgccaattttggcattaattgaaaaaagttcgccgcgcgaattgcgaagtgattttttttgccacgaacgcacccaatacactccaaattttccaaaaatcttattttggtgctttttgaaccttttcattccgatcaaaaacttcgcacccacgtgtgccaatatatgccagtattggcattaattgacaaatgttcaccgcgcggatcacgaagttattttttgccacgaacgcacccaattcactccatttgtccaaaaatcttgttttgaagcttttggaacttttttattccggtcaaaaacttcgcacccacgtgtgccaatattggcattaattg

SEQ ID NO: 42475 - DNA, 1509 bp, Oryza sativa
gtggttgcggtgtttttgactggaatgcaaaagttcaaaaatcaccaaaacatgatttttgaacatattggagtgtattgggtgcgttcgtggcaaaaaatcacttcgtgattcacgcgacgaacttttgtcaattaatgccaataatgtcacacgtgggtgtgatgttttcgaccggaatcaaaaagttcaaaaagcaacaaaacatgatttttggacatattggagtgtattgggaacgttcgttgcaaaaaattacttcgtgattcgtgcgtcgaacttttgacaattaatgccaatattggcacacgtgggtgcgaagtttttcactggaatacaaaagttcaaaaagcaccaaaacatgatttttggacatattggagtgtattgggtgcgttggtggctaaaaaatcacttcgtgattcgcgcggcgtacttttgtcaattaatgccaatagtggcacacgtgggtgcgatgtttttgaccggaatgcaaaagttcaaaaagcacaaaaacctgatttttggacatattggagtgtattgggggagttcgtggcaaaaaatcacggcacacgtgggtgcgatgttttttatcggaatgcaaaagttcaaaaagcaccaaaacctgatttttggacatattggagtttattgggtgcgttcgtggcaaaaaatcactttgtgattcgcgcgtcgaacttttgtcaattaatgccaatactggcacacgtgggtgcgatgttttttaccggattgaaaaagctcaaaaagcaccaaaacctgatttttggacatattggagtgtattgggtgcgttcgtggcaaaaactcacttcgtgattcttgtggtgaactattgtcaattaatgccaatcttggcacacgtggttgcgaagtttttcatcggaatgcaaaagttcaaaaagcaacaaaacatgatttttggacatattggagtgtattgggtacgttcgtggcaaaaaatcatttcgtgattcgcgcggcgaatatttgtcaattaatgccaatattggcacatatgggtgcaaagtttttgactggaataaaaaagttccaaaagctccaaaacaagatttttggacaaattggagtgaattgggtgcgttcgtggcaaaaaataacttcgtgattcgcgcggtgaacatttgtcaattaatgccaatactggcatatattggcacacgtgggtgcgaagtttttgaccggaatgaaaaggttcaaaaagcaccaaaacaagatttttggaaaatttggagtgtattgggtgctttcgtggcaaaaaaaatcacttcgcaattcgcgcggcgaacttttttcaattaatgccaaaattggcacacgtgggtgcgatgtttttcaccggaatgcaaaagttcaaaaatcaccaaaacaagattttcggacaaataggagtgtatagtgtattgggtgtgttcgtggcaaaaaaaatcacttcgtgattcgcgcggtgaacttttgtcaatt

SEQ ID NO: 42476 - DNA, 607 bp, Oryza sativa
agtaccacattacagctgaatctgtcatgtcgtacattctgcttcaaaattgtagtaatatttctatcccagttatggggaatccccattggggatagttcctccctcttggaataattccaaaggaaatgtgcaaaacaatcttatttacagacattcaccttcatgtctttttgtcatcactcgtcaccactcttttatgggcatacccaaatgatatgggtgttctttttcctcaggttaaacttttgaataagcttgctgcagctagaatattgaatccaaacgttggtagtaaagttttgactgatttggtcgagggccttgaggaggcttctgtgacagtggagataagattgaagattgatcagaatcatgcagatttgaaaggggggtatgtccctttccaagagaagctatattaccagttatctaacactacacaattatcattgaaacaatgtcatttttgccatttctagttgagaaaattacatgaatgaatcaatttgattttttttttgtttaacatttgttgttccctaccaccttattctgcacaaatattattattttgatttcgatacacgaaatcaatgactgaatg

SEQ ID NO: 42477 - DNA, 987 bp, Oryza sativa
caatgcatatacaagttagaataataatattccactagtattaggtttactaaccttttgaagagaataaccataaagtggaggagaatcgacatcaactcagatgataaatcaatcggacgatgtcaagaatcagacttatgcatgaatggaccaagaactcagaattgacacgatgaattgggccaaaattcaccagtctatgaagtgaagcaacggaggaggccgccagccaaaacttgggctggttgggccggcccctggttcggccgaacaagggggttcggctgaacctccctcgtcgccgttggatgcagggcttcttctggacggttgggattgatccccaatgacggttggagggtattaccgaccattccaaccatcacaaccgtcattacctgcctataaaaggacttcctcttctcacttcactcacacacctcaagcaagagctctctcatattctctcaagttagtttagtattcttaagctagtggaataggaacagagtagaaatcaggagtccggaagccttcggaagagttcaggtatggctctaggagctcttctcctctcttttgtaagctttgtactttatttagaatactcttctatatacatttatggtattgaaatactttccgagtatatgaatacctactttatattatgttcatgttatattgaatatactgctagcttatctgggagatgctttggtgcgggtataatgtttgcttatgcaattactctatgtcatgacgatgatattagagtagtatctggtagtttagacgtggtgtctagattacggatatcattatttggggttatatgctgcggatgagaggtgggccgctgatggtgacagcttagtacggggtattccccacgcatgtatatagtcctaagttcattccctagggagggtattcctccgtatttagccccggttgtatggtcatgacgggctgtcgtaggaa

SEQ ID NO: 42478 - DNA, 675 bp, Oryza sativa
cccttccttatacaatttgatatcaaattttgcgaaattgataaattaatgtatcatgatttattttcgctaagttgtttcaatttatgagaaacttaatcttggattagggtgtgggtccctccctcctctcgcatcatcatagtattgattcgctataaaaaaaacataatataacacgatctatttctcctaatttgtaggcatgtaggggtgggtccatcctccttccccactctctatgtgtcaaatgaagttagaaatttcacaaagtaaaattttgtaatttattttctataatttgttttattttcagtagtagtaagacaatatttaaatggaactaaaacttttaagtccctgttacatcggatgtttggacattaattataaatattaaacgtagactattaataaaacccatccataatcttggactaattcacgagacgaatctattgagcctaattaatccatgattagtctatgtgatgctacagtaaacattctctaaatatgtattaattaggcttaaaaaatttgtctcgcaaattagcttttatttatgtaattagttttgtaagtagtctatatttaatactaaagttaagtctctagatccaaacaccaccttaagacttgaatccaacgagattagagttgagacatctattc

SEQ ID NO: 42479 - DNA, 877 bp, Oryza sativa
atgagttttcgtgtccaaatttgatcgtctgtcttatttgaaatttttttataattagtatttttggtgttacgagatgataaaatatgaatagcactttgctcatgacttatgttttaaaatttttttaaaaaaatttaaataaaattatggcagcacttaaaatgagatagattgagtggagtttttggaagaggagagtcctgcatacagccatacacagtgttgctctgcatttataccagcactccagcagtgcacagttgccggtcaagagctgcaagagcagcagcttgacagtagtgtgacagcgtctcagccttcgtcacgcagcagcagcagcagcagcagcagcagaagaagagcatggaaatgggcttggttgcaaggacttgtttgatcgtctctctctctctctctctctctccctctcctagtccctacgcaggcgttggattcgatcccttctgccattttcgcgcatgcggcacatctccttctgcgtcatgatagaaagggccttcttttcacgtcactgaaaaaaggcgtgcatccaaatgaaggatggcactgccatgcatgcatgcccggtagaaaccaatgcagggccctcactcaactgtcaccttcctttccaacatgaagttttcacatggatcagtttaatttctgagataattaattcttcacttcaaaaggatgtgtgagattgtgagagaaaagaatggccctaattaattaaacagatatgaagggaatgaagagtttttttggcaagtggaagttggcactcatcgtacagtttggtggtaagcagaagtggacaatgtggcaactcaagacagctggaggtgacgaagtcgaacccccccccccc

SEQ ID NO: 42480 - DNA, 1168 bp, Oryza sativa
gtagtattatgaaccatcacaaaagagaccactcatctctgacgggtctttaactaacacacgtcacagataacgttatctctgacgggtggtagttatgacccgtcagtgatgagtgaaaattcaaatttttaaattttgcaaaaaacctcggattgaaacatgtactatataaaagttgtagctctcaatgatatccacaactttataactaacaacatttctattagagatcgtttacatccctgaagatgcattacaagtgatcagatctacttttaaaaacaaaattttgagttttttttcaaatgacatggatggatacatgccccgtatcaaagtcatagaactcaatcagatctacaacattataattgaaaatattttcatttcacaaaatttacatgttataaagtgagatatattttgaaaaataaaattttgaattcttcaaacaacatcggatgaagatattttctatgtaaaagttataaaacacgatgagatctataactatttagttgataatattttcatttgaagtcatttagggtgttaaatatatgttaaatgattcagacaagcatagacaaaataataacattgggttagtagtcaatatgtgttgagtaggtgagttggtaagggagctctatatggaggttgaggtcttgggttcgaatctcacttgtagcattcaagttatattacgtgaaaaattgtgaatttgtaggtagtgatgtgtaaccatgtataggatggctagtaaaattcaaaatatttttttgaggttttttgttgcatttaaaattcaaaaattgtatttctttttgtcatcagagacgggtcgtaagttacaacccgtcagagacgagtccgcagtgaggctcaggcagtgacgacacgtcactgatgactcatctgtgacgggtgacaagttttaacccgtcagagatgacttatataccggtcagagatgggttatctgtgacgggtgtttcatccgtcacaggtgattttgtcatcagtgaccactaatcactgaccaagaccaaacccgtcaaaggtgagggtttgggcccgtcagagatgacctggtccggcgtagtgatcgttctaagcacgactagggctgatgtagcaaaaagtatgaaaagggctgcaggaa

SEQ ID NO: 42481 - DNA, 671 bp, Oryza sativa
aatgataggacgacttccaaaatcactgcaaaatggtactactctaccctatgttcgtttctttcaaaaaaaaaaaacaagttatgtctccaccctccagtgtttgcatatgtttatatttataaactaaaatttaaattttaaaacttaattttgaagttgattttgtgattttttttaccatagtttattttatagtagtattttcttttaaatagttaaggatatgtatataaaagatttatctattaactaatttttggttcataataagtcataaggatttggtgaggcctagtaagccatacgggtaaacatatgcataagcaaaatgacgaggcctaattggctgcacaaacccaacttgagaaataaaaactgaaccgtgagactaaaaaagaacgttaaccatgtgggtcattagtagaccaacatcattaataaatggcgatttccctaatgattactcccaacggaatgtcatggccacacattccgagaaggctaacgcgcgattgatcgccgctagcgatcgtttttttttctttttctcttttaataagtttatttatacgtctaagtttatccacctaaagtttgtaaatcaaatgtttataagtcaaaagtttatatacccgattcagattcaaatttaaattcgaattcaaata

SEQ ID NO: 42482 - DNA, 647 bp, Oryza sativa
ccttgtcccaggaggcaaggtacaccaaaagttgatacatttcagagtttatcaagtggaagcgtaaatagttaatttattacatgggcggcgaaggcccagcacacacaaagacaaacgggaaacagcggaagactagggcgacgaccacaggcgcttgacggcaggcacgagctagacaccaaagccttcatcttccaggggctcctcttctgagtttgggaaaaattgagcaagactgagtacaaccaccgtactcaacaagacacacccacaagtgcaggataaatgcaagggagtacaaggaggttataatataaagggttagagtttgtagtaaacagcattaaaagacacttagttgctcaaagctattttgtaaacacgattccagagctatacaatattattagtcaaggccgtgaacccacacgaacctgccttaacccaaggcctacgatgattcagaccgaactagcaacccgaccctgggtcccagctcgtcccaagcaaacccaggccaaccattccacattttagttgttaagcatgttttaagaattaaaacactaacttgggtacattgctcggcttgcccataaccgagggcgcggctattcaaatagattatactctgatcagaggtg

SEQ ID NO: 42483 - DNA, 549 bp, Oryza sativa
ttttatttcacaaataatcagagaatcacctctgtccataaagttcaaaagggttttcaaaagtataataagtgatccataaccatgtttttatttattactaagctaggctaagcatttgcattttgtaaaagtatagtatacttatatgagcacaattaaagtactctcataaatcctaaggttcaaaacagcaaggggtgattttcaaaaggggtttcatgcatgtttataatcaaaaatacacgtgcagctttataatcaaagcatttagcccgaaaacataggattcaaggaagggcaaaacttgccttagaatatatatgacctaactgagtttagctataatccatctccttcaccggtaacgatttcgccgtctaaaagaaataaaagtaacgataaataccaaaacatgcaataattcaaaatgctctaaaatgcatgagtttactagtgtgattaggtgctgtgtgggtaagatttgtggtgaaggaatttatattttatcactttgcatttgggagttattaattttcaaagtttaat

SEQ ID NO: 42484 - DNA, 651 bp, Oryza sativa
cctgcagcccaaacatgtagatcatgatttcagatgaatttagagacttgaacggcctcattccgacttcatatgaattagatatgaattttacaagatttaattccaattaaacctataaagaaaagactattccaaattaattaaaccatttacaaatgatttataactgagagaaaagattaaacaacctccagaaaagattagattatatttggtagatgacatatattaaaaagaaataatatgccattgaaaagagagaacggatagaagtctcaccgaaccaaagcgatcggagaggaagggatgatgacaatgttccgacagcaacacacggagatgacaacgctagaccaatcacgaattagattatattgaattaagaccctagggataaactacaccggtgaacgacataggagcggcggttaccggcgaaccacgacacaacaatgcaaacggagggcaccgggaggtagagaaggcgacggcgattcttaccaacacttacgacgtgatgacagacagcgacggaagacggccgacgacgagatcgagatggcggcgaggtactgtccacttcgcagctgcgaatccaatggaggcggcggcgaagcttggcgatgacgggaggagcagcagagcctc

SEQ ID NO: 42485 - DNA, 1147 bp, Oryza sativa
gctgtgatggctagctaaatcaatccgtcaaaggtgagtcacttgtgatgggcttcaatgcagatacatacatgtgatcatctgtgacgggccatcaacttcggacccgtcaaagatgtgtcacctgtgacgggttgcaaccatgagtgacttgaggggggccctcgcctgtgacggcccagaaagtgcaggaccatcagaggtgatgctcatttctgacggtctgccacccgtcaaaggtgattggagtcaccagcgatctttattcagtgaccaaggccataaccgtcaaatgtcaccgtcacatgtagggtgatctggtgtagtgagaatcatctctattttttataataggtaaagatttcacgaggatttcatgtatatgaaataacttttaggctgactgtatcttacttaccaggcctgtcataagaaaaaaaaaatctttacaacggggacaattacaatggtgatactggaagttgtaatatgaaactcttccgagaaagaattcggttcaaaagtactctttggagaaagaagagtaaaaaatctaattaaaggcacaataaataagcccaggaattgaaatcttgagccacatacctaattttctactcatcatatatgatactcgtaaccctgctgtactcatcgtcagatttcatctgtcgtcgtggtagtagtagtcatcgtattccatattttttttggcgtaatagtcgtcgtattcgtcattgtcggaatagcccggcttgttgtccattgggctccggtggcagctcatgcagcggaaagatttggagattgccgcgccgcaatactggcattttcccctggtcggtgatggtcgcttcactaccggtggcggcggcagaatcgtcggccgctgttgttttgccggagcaagccgacgcatctgcacgacctgaggtcgcttcggtgcgctcggttgcggctttggcggaggacctggtggttgttgcctctgcgtcgtcttcggtggcggttcaggaggcctcttggccgccggtggcgtcgccggcgcggcggctgtaggcttggtacgaaacaggtcttctgcccgcatcggaagcgtacacaccgaagcggcggcggcggtggcccccggcgggggatgcctggt

SEQ ID NO: 42486 - DNA, 609 bp, Oryza sativa
attcctgcagcccggagagatagggaaaaaaggctccaatatccatttctcacccaattcctccctccaccctatctttcatctaggaaacatctccatggaccacttgacagccattatacctagtttgggtgatgtaggtgaggttgcaacgccctaaactcagccaccatcttaaaaacgtgtatattccatattgacacctagcatgtcattgtcttcactttcaccatttagtgagccacttcgccactgaattcatctatcatcctaatcttgttccatagaaataaacttcaagaactcccatgtattgccaagaatgttctcttctttctttccatcgaagatgtttgatcggtcgcaaatcttctctggtgagcttcgccgcattccaaccatggaaatgtgattcaattcccctacctgatcaatcatgtctcttaacaccttgtgccaagctcgacgccgctctcagtgtccagagcgccgccgtcggccacttcgccgttccggtcgactcgagcctccgctgaccaagccattgcgccaccgacgtcgcctaggtccctggagaaggacgcgtaaagaagatcgagctaaaacgcc

SEQ ID NO: 42487 - DNA, 769 bp, Oryza sativa
agaagagaaggggtggacggccttcccaaggtccttgcgaaaccaacggaggagacagcaaggtccggcgatgacgggtggtgaagcggcaaggcttcgccggagatcaaaacaaggcggcgagctcggccttcatggtgagggtggcttgcggggttcggcgcaggggagcgaatgtcaggggtggagcttggccttgcggagccgagggaggtggcggcgcaggttggtgacggccgaggcgacggcgaacgacggctggagttggtggcggcgacggagagagacggagctcgcttggagaggtggctaaggcatgggaggctcgggtaaaagagggaaaagggagaggaggtccggggctagcaatttatagcctcaggaagaaaagatcggatcgggtttgagaggaatcaatgatggaaaagctatggttcaccggataaacgatgctcgaaatcgtgtagaatccacgcaattttattcgggaatcaaggtggtttcttggggataaggtacagcagatcaagacgattccattctcgcaaccaacttgtgaaaaagagtaatggggaggctggatttgacggaggacgcggcgtcggctagagtacacgggcactgcacgggctctgtccaagctggaaaacgacactgtagcaggagggaatgagtttaaacttttctttctttcttggaccggatgaaagagggaggccaattggactttggccgagagatggagagggctgcaggctcggattgggcc

SEQ ID NO: 42488 - DNA, 582 bp, Oryza sativa
cccccccccccccccccccccccggtgatgaaatgaaactttcaaaggggtgtgattgaaatccatggagctaaagcatgtacagatactcctaatctcctagtatgtgatgtctggtctcaccggtgatctccattgcatgatgatgagtcatctgataggttggttttgcattttggaaacttggaaccccagcagtagcactactagtagtaccaaccaaccaaactactaatatgactagacaacaataatggtgtcacttcctgtttagcatcctggaataatccacttgatagatatgcaaatcaaaatgggagcgtccacattcagaacagcaacatcatatcaatgcagagacagagagcagcacttaattacggcgaaccacttgataaaactgattgatactacctcgtcccaaaataagtacagttttgcactattcacgttcaacgtttgaccgtccgtctttttgaaaaatttgtgaaaaaattaaaaacatttagtcacacataaagtactattcatgttttatcatctaatagcaataaaaatactaatcataaaaatttttcaaat

SEQ ID NO: 42489 - DNA, 670 bp, Oryza sativa
cccgatcttttgaaaaaggagtacataaaatttaacatgaaatctggagaggttttggatgattatattgctagatttaataagattttgagtgattttagatctgttgatactgcttatgacactcattactcacaatctgaaatttctcgtcactttttgaatggtcttgatatgtctatttggaagatgaaagttacatctattcaagagtctgttgatatgtccactttgacttttgattcactttacacaaaacttaaaactcatgagatgaatattctttctcgcaaaattgattctaagtctagtgctttggtttctccctcgactactttggatgttggtgcttctttgtcaaattataccgctcttgcttctattaatgtcatgtctgatgatcaacttgaataattcgatgaggaggacttggctttggctattaacaagttgtctcgagctgtgaacaatgtcaggttcaggaaaagaggaggtcgaactcattgcttcgagtgtggagagcttgatcacatcggtcagaccgacgggaacacagcggttagaccggcggcggtggtaggaggcaaaggcgactgcagggctgttagaccgggcaagcaacaccgttcagaccggcggcataggcgcggtcataccggcgggccaactt

SEQ ID NO: 42490 - DNA, 726 bp, Oryza sativa
cggccacaagattcatggtcggcgacaggggatcaatgtgccattgctggcgtccttctgttgtgttcttgcggggagggtattttggctatagacttatagtataactgtgttgaacaaaattgtgatattttctgtggtattaagggtgtgtttagttcacaccaaaattggaattttagttaaaattggaatgatgtgatggaaaagttagaagtttatgtgtgtaggaaagtttggatgtgatgaaaaaatcgaaagtttgaagaaaaagtttggaactaaactcggcctaaagtgtacactagccctttcacgtgtataacttttaggaaaaagtacgaattaccctcccgccccaaactatgacgacaatatgaattacccccctaaaccacaaaactagacattttataccctgaaaaccggacgaataacccccccctcaaccaaatccaaagcggcatcgtcctacgtggcattcgcgtggcaatccagtcagcaatttttttttaaaaaaggtggggtccgcctgtcatactctcacacatctctcttcccctcttctctcaatctctctctctcactgtctcggatgtcgttgggggcgacgaattagtggccggcgatgggcgcgcggccggcacaaccggcgcggcgggtgcggcggacggcgagcgcggctggtggcgggcgtggcgggggtgcggatggcggctagcgcgg

SEQ ID NO: 42491 - DNA, 550 bp, Oryza sativa
tccacgtgcagaggatcctcatggataatctcgacctccgggatggcttcgctttggctgaaagaatcattctctaagatcatatccaagagttcatttccttcggcggttgtcttatgtgcgaatgatcctctggcggaaatattgagatattcaacagactctttgtctaacccgtatcgaaaatgttgtaacaacatatggtcgggtaaagacaagtctaggccagactgagttaacagtgagaacctggcccaggctacaccgagagattccttcttgttctgtcggaaagagaggatgtctaatcaaagattaatgacacgagttaatggaaagaaagcagggcagaatttgcactttagctcctcccgttcatcatggaatttcttgacagacagagtgtaccattgcttcgctttatctataagagaaaaaggaaacaacttctactttagagtttcatgtttcatgcctacgatggaaaggcatgaacacactagctcaaattcccgaagatggaggtacgggttttcaccgatactactag

SEQ ID NO: 42492 - DNA, 688 bp, Oryza sativa
attcctgcagcccagagcacgttaattacaaactaagcgacgaacccgcacctatgagaatatatctcacttaagtaaattaattagataacataaaagaatctcgaataaaagacagcaaacaccgaggtacaagcaagaagaaggccgacaatcccggcgcttcaccgaaactctgttggaagaatgtcaacaattacagcactcctccgtaaaattctcgaagaaaactctgatatacgggccctccttatggagcttcccctcactctcttcctaaacccacatactaaagtaaagtataaattgtaaaagtgagttgtactctactttgttgtgcatattccaagtgagtcaagatctatgacggttgaggatggcgtttactcctccacaaccatcattgggagagcatcaggagcctacatgtgtgaggtggagatgagggaggccagtggcagttcggccaaacttgtgggccctacctctctccaccgcctttctccaatgccttacaggtggacccggttgaggacggtttggccccactttaagtaggttttgactatcagatgggcccttcaatccttgtgctcatgtgtgattggccggagattcattttcatcgcatggtgggtgtattttctccttaaattacctacatacatatatttaccaaagctagtgg

SEQ ID NO: 42493 - DNA, 1330 bp, Oryza sativa
aaccaatcctataaccatgatcaagcttgtgcacttatatttggatggaagtggaaaatgtataaaaatgggaaattggatggtgattcatttttgtatggccctcctcattatactttattttagaatgactacattactatctctcttttttttcatcatgctcaataatactttgtttcattctcttttgggcattgttttcatttttttaagctcgtgtctcatttggcatggatcataggaggagagaccattagtatcaagagtttttatttattggatgaagatggtggatgctgatttctagtatagaagtttagcgtatgataggtggatggaataccttgcaaatcctctattgtacagggagagcaatatattttagtgaataagttcacaagactttgatcatgagaatatgaaaagaatctaacaagggttacaaccatttgataacactcaaattgatggcaagcagcatatgttcaaggtttatcattaagatcgacatatagctttggtacgaatgaaacatcaatgaggagtatgtaatgttatttcattttattttattttctaaaattcctaagggttcaacattaagaacaaagttcataccattgggcaatatctcattcatcaataactcagataacatgtgatacaatgaatatgattcacaagcaacatgtgatgttcagagattaaaaagcatgtaagtccttgttgcaagcaagtcctatacactaattgatcatgtcaatactcatttttcattattgacttaatttttatttggcagaattaatcctactcaaagattaaggagaataaggataaacgtgcaaagcgacgctcatatgtgagtgtgatgacgagcagccgtgtgtgcgatggatgctacgtttcatctcgtgaatgtgcaagcattatggtgtagcacggatatgggtgatcttgtatgtgaatgtgtcgtgtgatcacaagatcacccccacacttgtttttgtacctgtggtgcttcaaatacacaaaggacaaaacaaagtgaaagcaaaaaggattcacccggtgaaagcatctccccttcaagatggaaagtgcagtttgaaccggtgagggagatcaaagtctttcccgacatgatttttagatggagtttgagggaaatgattagggttcaaggggagacggagcgaaggaggaagaggagaacgacagacgaagagaaattagaaaattgggacatcgcaatcgctggcttcttttttctctgcgagaccatcgagactaacaaggagggtccaccagaagccacagagtgagg

SEQ ID NO: 42494 - DNA, 568 bp, Oryza sativa
ccgggactaaagtcccacccctatatatatgtcttcttcctcctccagctgcccgagcaagcttcaaaatttcttcaaaaaagaggggaggtcatgccaaaatttctattgaatttattttggtgattacatacaaatcggaggtgcctaaaaggtttgcaacttcatcctccaatgtttttttttgtcatactacatttgcacctatgttttgcacactttttttgtctccaaaatttagttgtaagttgatgagagagaaaatgtgtgtggggaagaaagaatatatagaaatttagttcatttgctaaacaaggttttataaaatagttgagaaggaaaactctagtgaaagttaatcttaaataatagaaaacaaactaaaatgaaaattaaaagaagtaaaacacattaaaattagtttaaaactttacaaatagtttttaagaattatttggtgtaatattttatgatttttgtatgaataaagatatcttataattataattattgtatgactgtcattatgtaagaataattatttgtgtacggtttttttgactcatgt

SEQ ID NO: 42495 - DNA, 622 bp, Oryza sativa
tttgaaactagacgacaactagagctatgtcaacaagcttaccaacgtaaataggtagtggcgttcatactaagtacaaggataatcgttgcaacaattctaactaaataaaaaaatggagtccttattgcctagaagcacattcacatcatcgtcacaaaataaagttctttgatataattatagttagcatagaacacttgtcaaatttaagaagaaatcaacttgttccaactaattcagtggagcagaaagactgaaatttgaataaaaaaaaggaatgtagaaatcctaaatttgaaaaaaaaattggggggcccaaatttttgggagccttgtgcgatcgcacagcaagcacatgcccagggaccctttcccttcctatggcaatcacactagctacaaagacaacagacacaagatatacggtagagctctctcttatactaggtaatatatgttaaacatgatagaaattatgtgttgagatattgtgaaaataatgcgatgaagatgattcgacatactggtatgttgagctctatttatattctagattatgtgtaatagttgcatgagatttaagatactctataaattgttaatggatatatcatacttg

SEQ ID NO: 42496 - DNA, 663 bp, Oryza sativa
cgcatgacttgcaaaaaggagctttattaattattaccaattcctcgaggtctcccatattgggtgaccttcccttgttacatccaatccaaatataggaatgtaaggcatcagctaaagttatagcagatgctgatgttagtcacgccgctccttctctgttctttagaggaaagaacattgaattggactgctgtagtctgggtccatgatctacttgttcattgcgcacaaagatattcgatcatggaggacaggttttttgtcatttgttttcactgcatgcatgctgtacatcttagttacaagacagttgtagtgtaaatacttagtaatatcattacatgtcttgtgccctctagaactctaaacggcagttctatggtcttgatttccagctaagttaggtatgggaggcatcaagaaattgagaatgaatggccactcaaggatgatgaataagaaccccccatactagtagtcagcttggtgcatgttttcggttgcaaacatcttacctgtagcttgcatgctggatgttgctatattggcctctttggtaggctgaatcactagcagaaatacatgaatataatgatgcatgcaagggaaatgttatttcctcactatgcaaatgagcgatgatcaagcaaggctgcagga

SEQ ID NO: 42497 - DNA, 1781 bp, Oryza sativa
acttgaagatattgaataattcaaggaaagttaattggattggaagagagaagaaagcacatgtttatgtaaatagtgaaaatgaaaagctgagttctcagtactggtttctgaccagctcaagtttgcaagcttggggggaaattgagacagcctttgccctttcccatttaatctgattttgccaatcttccttttacctgcattttcttgaaattcatcagacaacttacatatgattgcaaacatcacattttaggcctcgtttggctgtttgtgtttcgatgtggaacaggccccaaacccgcccttcgtggaatgcagcccacgcctggatcaattcccacatctggcccaaatgtgcattggctgttcgtgtattgctgtgattgcggctcgatccatgccgacccacggatgagagaataatcctcacccgaggcctggaactttctcgcgtgcacgccgcagctcgcggctcctcctgcaccgccaccgctttctccaagccatccaccgcctcctcgccatcctgctgcgccgccggcgccgccgccttctccgagctatccaccacgtcctcaccatcctcctatgccgccgacgccgctgccttctccgagccgtccaccgcctcctcgtcggcctccgtcgtctgtcgcctcatcgccagcgtcgccccggcagcctactcgcttgatcaaggttcaaagtcctctcctccttctcctccttcatctcatctcattttctttgcccatcttctttcatccacttgttttgctgctaggaccttcaagatccggaaagtacagccatcctgctagggtttgacgatctgcaagagaaatattggagacgaggtatgtcaatgcttggagatatgcaaagtacagccatcctgaagggaataaaacacagtagggaatcactagcttcgatcttgtgtcagtgcaaagagattttgagcagaaataaactacaactagtagttctcctctacacactgctgagactgtaccaccaccactacatgatatacaaatgtatagcaagcagcacacattacagtattttacactaacaccattgaatgcacaaaagagcatactagcatagtagtatagcacttctattaaacaaagtgagtgttcagttcatacacatgcataattagctttaattatttatgaacatatatagtgttgaaactaaaaactagagtgctgaaaccttttttttcttttgctaactgcggtcatcttaaatattcagtattccttctagttagaaggtatgaattcgctaattaggaagagaagagatgaggaggatgaggagattattatgttctggttgcctgccctatatcttttaactagtaatggagggatagagaaaagagtaaggcatacttcaagtcagtacggtgaagaacaactcagaaatattttagagggacatgaaaagaattgccttgttgcattccgcatggagcctaacatatttagagcaatagcgacatatcttcgaacagaacatctcctacgtgacacagaggtattacggtagaggagaaacttggatttttttctttacatgatatctcacaatgcgagctatgaagatctacaacatgaattccatcatagtggagaaacgattcaccggcatattatggcggtttaaaatgtaatcccactttgacctatagatttatcgagcaacctactggagttgaaactcactggaagattagcacagatcaacagttctttcct

SEQ ID NO: 42498 - DNA, 732 bp, Oryza sativa
attcctgcagcccaggaatttattaatttatcttgtcattactcatgcatagataattgtattattgatgagaacaaagtcccaatacatttaaaaggagaaaaaagaaaatttcttggttgcattttaatttgcacattttttggaaattcaagttttgttagacaaacatcattcagaacagtttcatggaatattttaggaccaaaattttgttttgttgtccttagaccagagaagttttgattatccgatattttgaactctgtttttttaatctttctggcttttgcaacaagattttcatgttgggatggctgcttgagaacctggcagaagataaataatttcgatgaaccatgtaactcttgacaccctgaagaactactatggctaacactaatacttttaagctagattttcaaaactgcaactcaactagcagaatttaaagtagttaatacttaatagtcctgattgaactgccagaaaataaaatagtttctgttcttgtttcacatatcacaaagccacaactggttgaaggataactgtaaagaaacctactgttttgtcacctccccagtttagttgactgataacttgtaagatgaggtgatttgtatgaggtcgcatgctcaggtgctagttttatgtgccctttcagctgtacgctgtaagggagagagccacctgaggctggtgattgagtcagtctatctagtttttttt

SEQ ID NO: 42499 - DNA, 999 bp, Oryza sativa
tagctagctattctgaaaactccttgccacttttctctagttatcagcataataactatattggcattaaatattgtgaaattactaattgtttcttacatatttaatcatttctgttttggaaatggatacacaacttatatacaaattgttaagagaatttcgtgatacgctatatgtatagatatataattttctgtgtgaccgttctagatcatctgttgatgatactatgttgatactcaatcattgactaataccattattttaaaaaaggaatatagctatcacctgcgtttatatagttccagtccaaacgttggaaagcttgaaaatccacaaccactgcctgaagaatagaaccattggaatatagaccaagaaaaactaccaaaaaatactttgaaaatagtcataacctgcattctgttgacataaaaatattagtgcaaaaaatatgaatatgtagttaaatgaaattcagtgttttaattttcactaaaaagacaagacttcattactttgctatataagcaccttcaggagtgtgaaagctattaataaggtgtcctatgaccgatcctgttgggaatagtaattggtagtcgataatcatgatctacagtagaacgaaacaactcataaattatatttaagaatgagaataatgcaaaactattaagaatgataatatataaatacaaaactatactattagaaatggatatccctctcattgcattaagaatttagacatgcttgtaacatcactttacaggcctacatattaattaagtactaaatgagtaaaaatatagcaattaatagggaatgctaacttcatgtaacgtattgatgggtgtactgaccaaacaggactaaatgcatgttgaattttatagaaataactaagttaagttgattcagggggtgtttagatatatgggtgtaaagttttggcgtgtcacatcggatatacgaacacacatttgaagtatt

SEQ ID NO: 42500 - DNA, 503 bp, Oryza sativa
ctatcttaagttcctaatcctatctatcactgtctgtgtttattatgaaccgataaggatgccgactgaatagacataagagcctctctcgtctaaggcccgaagcgaaccactcgatctcactgctctattacttgtgctctctgttcccttcaacctttctgcccaccaccaacactacccgctccatctccctcagtttgatcccacacaataccgccagtaagatatatatactaatatacatatattttttttcaacaattcgtgtcacgaggaaacaaaccttgagagacaacgctggtatgcaagccatatcagtgtatgtactgcatattttggctatctagaaattttgagcagaaaaaatatagaggatgacgcaggcatatatagcttgtcgaaaacgaacagggatgttttgttttaactaattaaaccaatgtctttctgatcccatgcatcatcctatccttttcattcctgtactacttacctgttgg

SEQ ID NO: 42501 - DNA, 692 bp, Oryza sativa
aggatgtacccaaagggatgcatgcatgtatgttctataggctgcaggttgctcaccgaagctcggatgcgctacgggtaggcctggacagcgacgatgatgtagaggatgtcccggcggcggcggaaatcagcatagcaacggtgacaaccaccatccgaactccgggttgccaagaaaaagagtggaacggctcaaagaccaactaaagatgctacacgagtcaggaattgcgccgaagctcacccgggatcaaggaatcgaagatcgacgccggcggccggagttggagaagatgacgccgatctccctcctcgattcaccgatccatgaggttctaggagtatcttgaagaggacgtctaggcgattctggtggcgcaagggttcggcttggggtggttcagtttggtcggaacgacgacaagaacccgacagcggtcatcgttgtgcgctccagggcgtttgtgggcacggtggcattcccgctcaaccactgcatagaatgggatgaaattagatgaaatagagatggcattgagagtaggttttggaacgcaaaagaagaggaaacgaccgcggctcattaacgaatgtggctatcgtcttcttcgcggccggcgatggagaaacggtggagaagggcagcaaggatgctctccctcggttggatctgccctggaatggtgggtg

SEQ ID NO: 42502 - DNA, 667 bp, Oryza sativa
aattaagagaatgcttatcgagatgattaagatagaatataccctatatgagttaatttatttgttcacttccatgtacatgacttgtcttcagatggatgaccaaattagttttgtggggcttgacattggccttgttgatatattttaaggtgtatggtttctattttaacttcctctagctagcactaggccttaatggtttggttgtttatctagatcttagttatcattcatgagatctattatgaaatgcaaaacaaacatccaaatgcataagaaggacttaagtcaaaacatgatgtaagcgagtatgcatgctttcacttgtttttgcatctatggtataggttaaagatgaaaatgttttaatttgttctcaaattttacttcagtataagttagatcaacttcacctaggttttaaaatggaaatttttggttcacaaaattgaagaactttcctttcaactagttttgaagaaaattccttaatcctagaatttgggtatgttacagttggcttgtggctttgtggctttgtggctttgtgcccttgtggcctctcccctatcctcctagggtggcttgtatttatacccatagataaccccttgtccaagtaagaatacggagataaatatggatatgatctgagtagtcctgt

SEQ ID NO: 42503 - DNA, 703 bp, Oryza sativa
cccataattagagatcccttttcagtattttctacttaatacatcaactatttgtaagtaatattttggaagcagagatcatgaaatatgaaagggtaaacaccatgtggctcttaaatttaatcagcctctggagcttcatttggttgattttctctttggcacttccagttcttgtctgaatagatgaatggatgatagatttatctgattttgtgataatatttgaggttacaaatgaaacctgggaagtgcgcccatgataatgtaaaaaaggaacagggcgtaaactagttgccactgaaattcaatcacacaatctacacatcatttagaggagtaataaataaggaaatggttcagtgttttgttaatccacagcttcaattcagaccatcattctaaccaaaggaattgcatttttgttctaagcacaggaagcccttttttaaaataaataaataaattctttcattcacataagtaagatcaagctcacaaggctaacaagaatttcacaaagtactctttgacatacatccatcaacacataaaaggataaaacaccaaaagcagacaattaactctgaagaaaacacacaaactgcaaactgtacaccatcccacaatcccatgcacatcattcttcagtctccaagaacacacacacaaaaacaaaaaaacaaaaaaaatccacatcatt

SEQ ID NO: 42504 - DNA, 760 bp, Oryza sativa
tgtatatatatatatatatatgtatgtgtatatatatatacactagaaaaaatatccatacgttataacgggtaaatgttattttgtgtttgttattgttatacggtttagctagggtaaaattcactgtgggaatttaattgtatatttttttcagaaaatcataagctgtaattaggagtccgtattttatctgaagttagcatgcgagtgttctcaaaagatttcttatacgactcattttatacttccaataggaaacaaacttaaaatccaactcaaacacggttctgtatttccaaaagcaaacgaacttaaaaacctactcaaatacggatgacgtactaaaattctggcaaaaacatcttcaatttttataatagtagagatatatcaagcacataacaattatgttgtccatgcaaaccatatcgtagaagctagctagaaatactagtgtagaacatcgtgggggtgacagcgccactatgattacttgatgtgggaacttgtacgttgtaatatgccgggggttccttagggacgtccagggcctccgtgttgctcagcatcgcgacgatcttgtctatgttcggccgatgctcggggttggcctgcacgcagagaagggccatctggacgtacctgattaacacagcgtcctcaatgttttctcctgctgatattaacgagcggtccacaaggtccttgtatctttgcgcatcccacagttgccatgcctgccaggggctgcaggaat

SEQ ID NO: 42505 - DNA, 586 bp, Oryza sativa
aaggaagttcatgtacaagtattagagtagtaattaataacttagacgtggtgtctaggttagaggttacccttgtttgttgtgtatccaccggatttggcagaggtaggcggcaggtggtgacaaccctgaatcccatcctagtaatcctccatgttcggatacatcatagagctatagccggaaccacgctggcagaccagcaggggtcggtgcccgaagcaacaaatagggaattaccttacttatcgtagataattaaaatatatagaaagtcctctctagcctagcctacctatgatcagttgttgtccttggatagtcttagccttaggtagattacacacgttccctgagttcgatatccttttgggggtcacccgaaggtgaagtgctacagcggtattccatgcgcttgcggatttatctgtggtcgtaagaaataccaacacacccgtgcaatgacggcggcgatgccacgtcccagagaagtttgcacgatgttgtgcggttttctagtgagaatagcgcttctagtatggtaagaatccgaactaataacttaatttctgatttggatttgatt

SEQ ID NO: 42506 - DNA, 825 bp, Oryza sativa
attcctgcagcccttaaaaccgatcaaacacggatgacggaccacagaaacatcttgacacatcaatacattaaaaccgactaaaacacggataaacggaccgcggaaacatcttcaatttttataatagtagagatataacacgtggggcttgtgagtttatctcctattaggattcaaaattggttttaacctatgacaaaaccaacttaattatctctttctttattttcttcttagaatcggactgtgggccaatcctgttctaacttaccaaacttagctgatataaatcaaccaatattttccagggagagctacaaatcggacgtccgatgttataaaaaaggacggtcaaatgtttcagttaaccgtttgtgcaacgttaagttatacatggtgaaacagaaaattcagcctaaaaaacatatagaaattttgtaaaacataataaaaatacatggtgaaacatattactatcacgtatgaaacattaagtttttattgtttgaaacatatgattttctttcatcagaatataataatgtgatatcttgttgtaaatatttaattataacgaattcaacagtgtgatcggatggttcattggataagtagtttaaaagaaaaaagattcttaagaccactaaatacttacatgcatgcatactgtggggagaaaaccaatagaatggcagtagagagagtaggggcatgagcatcttgtaatttttcggcctttgggaaacattgagttatacgtggtgaaatagtaaattcagttattaaaacatttaattttttttataaaacgggctgcaggaa

SEQ ID NO: 42507 - DNA, 659 bp, Oryza sativa
gagcttagctcttatactaattgggaatgggattatggatcacagtgaattggcgtgcatgacaggtaattcgtacagtagtttacacagtacatggtttttgatcttgcatgcctcttagtgcctatatataaatactgcacttgcattgttatgtaagtatatatataacaagcacgcatatgcattaataaatatttgaacacttgattgcttgctccgtacgtccacaagtccacaacctcagtcgatcgacgttcagatcagttcgttgtttaactgcattatggctacgtagagtggcggaatcaaattcttctaagcctaatactcaactaatgtaatttacataactttacctttaattaatcttctatttttgaagttttataatacaattctaatgtataattagaatgaggagtagggctgcagccctaattaactgccctactcctgtctccggcgcccctaataaatctgatctcggaagcaggtgacatgaaactgattaacctaagcctcggaaacttttgaccttgcactgacatgaatttcctgatatatatggcccccagcacaaaagtcgtctctctaagccgatcgatcgcgatcgaataacttgaattgtgagctgtcttccatcaataattagcata

SEQ ID NO: 42508 - DNA, 1650 bp, Oryza sativa
ttagcgctctcgagaactttttcaggttaagcaccccagccctctataagctattggtatacaagttcttgttcagttgactttacatttttcgctcatgatgttatcagctcttgtccagaggaaccgtttgtttgccaagcacttcttttgagagaattgtttgagcccgaaatgctttgtttgagagagtttatcgttgggttataggacaattacccactatcaattgtttatacacactacctcttttgagtatttttcttgtttccaaaaacaaaattggtgctatgtatgcagttttttatgagctaaaagattcccttcgaatcatgtatatatcacatctggtatgatgagacatatatatatatatatagtagaaggatataatttctataggaccataatgggacatcacttataacatgttaagaaaccacagactacgtactaatggaccgctccgttttccatgcacatgagatgggttcccaacccatagaaacaaacacagccgaaatttgtgtggaacctagcttttttcagaaaaaaaatgaacgcacgagatatagtgcaaagtttcataattaatataacaaaaaaaacaagattacaactttgggatattagaactgggaagaaaaaaacaaagcaaacgcatcaccgtcgtacattgacacctcctcacataacccagcagaaggcgctagtgccaagccgtccaccggtatacctatagaaggttcgaagatgcccctcctctcccccctcctccccagacactgactccacgcaaaagatcatcgacgagttttcagttatcctctcgtagaagggctaaggagagcgagagggcgagagagaaggagatccactcgtccctcgcgccaatctgatgatgacaaccaagaaccaccggtgaccaaaccgagagaaggcgataaaggcagggacaagacctcaaggcaaggttatgacactttaggtgctactgtcgcccgtccatctagactaggttttcacctagatagtcctaccagggagacgaagggtggccgctcaataatgccccaagaggggcgagggggagggggttgttatggtgtcttatgacatcgtcgttgctgactcaagaaaacccaagctaggctttcaccaacagcgccctctcaacctgtcattgccactctaaagttcagccacccaaacaactctaccaactcgcagctccactgccgaccaccctagacccgcctttgtcaggtcttttgtgccgccaacgctgcctcccgtagcccatgccaccgtcacccacaccggccaccatctcagtcagcaacctcctcctttcatatcaacctcaccagcacccatcacttgccgttgccgccatgccgtgaactccttgctatccgcgattgctgtcctttcactaccattgctccgctactccagccaaatccggcacgggggcaccgaatccagttgcaggggaggtggggttgaatatttggccacaacggcgctggttccaccgccgtgcaccgcgtgtccatcaccagcagctcccgccgcatcacctccacgggtgcacctcgccgacttgttcgtcgcgtcgtctctaccggtcgccttgctacctcgatt

SEQ ID NO: 42509 - DNA, 883 bp, Oryza sativa
atgtcccaggacttgcatctggtgtgcggctacgtgatggttcagcttcgctgctttgcagttctcggctactagaaacaacaggtcgccttaaggatccgcttgaccgacccaacattgtcgaactagagaactacaagtcaattgaggatcacatatcacatcgcaaaaagataaccaaaatatcttcaggctttgatggagcatttatcacaataacaagtcaaacctaaacaaaactaaaaaaaactcaccaaagcatcttttgaagtggacatgtctggcctaaccggggacttctgttttgataagctgccagcatttattcctgtaggtggaacctgacgtcgtgtaggatcatctgaccacccgcttcttcttccctcttcagtggctaaatcaattcaggacataaaccatatagaattaatgaatgcagatttcacaaaacatatgagctaggtcatagaaacaaaataatctttttcaaaactcgcctcatcaagtgtgccatgatttcagttacaagcaagagtaggttatgcaattatctgataggcaggaaacagaaaggaacattttttacataacttactgtttttactgttaccattttttaatcgtaatttatgttgcaccaccttttgctctaatcacctgatatatgtgttgtgatttgatgataaattgtaaagaaacaagcagctatcaccacatctcctctactattataaaaattgaagatgtttccgcggtccattatccgtgtttgagttggttttaattttatgttttggttttaatctatatctcctctactattataaaaattgtagatgtttccgcgggacgtaatccgtgtttgagtcggttataaaaattg

SEQ ID NO: 42510 - DNA, 5707 bp, Oryza sativa
ctaacctagacaccatgtctaagttattaattactactctaatacttgtacaggaacttccttctttatccagagtcctagtactagagcacttagtataaatactaaacaatgaacccgcaaagatggaaatatatcttacttaaacaaagtaattaaataacataagaaataaacacgaatgcttactttatagaagaagttctccgaacccggagcagagtgtaccgacagctctggtactcctctcaaattcctcctaggaagctacactcgtcgagggagaagtcggatgagcgccaaacttccgggcactcctccagagcttcccctcactctctaccttattctaatatacaaaagatacaatagagtctcttataattcagctcaaagttgtgtgtctcggaaatgagaaggtgacctccttatataggctccaaatgacggctaggggtatgggaaatgaacaaaacacactgcaaccgccttaggggagaaatccgagccgtccaggtgaaagcagatggcgggaagggctaggattggttcggccgaactggtgggttcggtcgaactggtgggttcggccgtacccaaaaactctcctcccggcctctccttcggccgggaggttgcttattgggtccccaacaacctgggctatgttttggcccaattctaaatggtttttattgatttattgggcctctaatccgtttaaacgtgtcctagatgtgcagagatgcattttgtcgcatgacgcatgtgttttctcctcaaattatctgcatacacatatttcaccaacactagtggaaatgattagtaataatacctaccactaagttgaataccatgttttatttcattatatgcaggtattgacggtcagatattatgatttaagaaccgtcaacagggtgatgaggacacaactagctcagatataaccatgactaccttatgtattaataaactaaaggtgaatatgttctatattagatttacttattatatatttgaacaaacgttgctacacaatgagtttcatgtgtttttgtttgcagaggtacttgcttgggcgaaagaaaagagaccgagtgtaaggaatacatggataattgaagaagttgattgggaccaaaccaataccttctccaagtcttcttttatctcaccacgtcacttttggtccatagaagacaagagataaagttctacacgttttggattcggattcgggcctcctgacagcatcaacttcaaatggacctagccgctgatctagaaggaatttcagggcccatgagtacttgttggaaagcttatggagtctactttcaaatggttttggtcccatgtcaaaattcctaccgagctgccgggaatctgcaaaacaagccacgtacctcatccagtccgaatgtgatttgggttttgggccttgtaattgtgtcatgggcttagcccatgggggtgtgcgccctagggcaaccctaggacgtccctaattatacttaatccgttgccgtcatcgtttagagttgggttttgcttagattattctattaaggacagtttcaccgctagatcggtttgtggaaccccaaattcgtgtactaaatcattcatatgcaatttggttgcaatctatgttgttcttgcttgtgttattcgattcgcatgcagggattagccttctcggcgaggtcaaccgggtttcggcacgtttgataaccagaggagacgtggtgctacgattgcggggctcagtagcatgtttgttcagaagccggatcgagttgtgtcacgactccgtccaaatcgactgtttatcattacctattggaagatcgggacctaactccctcattaacgggcttgcctacgcatgcgcttgccttctccttctcatggtcacgccggttcctccatgcccgcgccatcatggagcttccccatcatcactacttcgccgggacgggaaggttcggcttggctccatcccctagccgacaaactccagagttgcacggtgcatgactgtcgcttgtgcgctcccacttcttcaggctgtcgatgccacctaagctacacagctcagcgccgcccttgaactgtggcccccagccacgaagatggagcaccacggcggaatcaactccgctagcgtgcgcactgctcgccggaccaccgttgccgctatcgtcgtcgttccgctcgctcgccggttctttggatgggaggagagagaggggatcaagagagtgattagggttaggatttctcacgcacctcgttggtcacttcatcggcgcggagcaaatccgagacatccatcagatcagccccgcattgggctgccaccaccgatgggccacagaagatcactgggccacgctcgccaccgcactcggctcgcgcttaaactggccggcccggtttttgggccagtttttagaagtaatgggctgaattgaattttttttattttaacccgccgattaaatgtttaatatttcaagaattttggttatatccctcttagctaatttaaactgctaaaaattattttgattagtaagtaaattatttctagttaaatgaaaccatgagagaagtttagctacaaaggaataatgatatgaaattattttttgaccaaagtaattatagttttatgtcaattatatttgttgttctattccttagttattttctgcccaacggtgttttgacaatgaaaattctaagggtgtgtttcggcactgctggttcccaactttctcctctcgtttttcacgcgcacgcttttcaaactgctaaacggtgtgtttttttgcaaaaagtttctatacgaaagttgcttaaaaaatcatattgatccatttttgaaaaaaaaaactaatacttaattagtcacgcgctaatggaccgctccgttttctgcccgcactgttcctagttgggcctccagtagcgaacacaccctaagtttattttatatgtaattgattaagccaacataaattagttatatgcattattttcagcaatgggacaacttaagaatggaagaacaatattgtcaattcccttgatggatctacagtctcaaaacatgttttggcttatgcttatgagccaaaatttgaatattcaaccttaaatttagagttgaatttaggttttttttttctcttttagatcgctaagaacacgtatatataaattatatttacatattacttttcgtttgcaaaaatatcatttcgcttattccgtcgataagcgaaaccatagagtccctaatttcactgaatggaagaacaatacggttttgaatttagccatgttagattttgaccagcgagagctacagtgccgcgctgcactgtgctgctgctcgctgcattgcggcgctgctgctgcttgctcacatgggccggccaaggcccaaggcctgctgctgctgttgggctgctagctagcttgttctctgggctgggctgcagctgcagctttgctctttttctttttctcttttgttttttctccctcattctctttttcttctaattatttgtggggcatcacacttggccctaagagaggatcctcctgaggaactcaatagagctgaggaagaatatgaacatctcaagtggacttacaatgaaaagttagctacttggggaaagttcaacatgatgtctttgatgtacattaagagccacatcgctcaagaaattattggaggaatcattgattctaacaacgcaaagacatacttagctaatattgaagagaatttcaaattctcatataagatttatgctagtacaatcattaacaagacgattactagcaactataatagcaaaggaagcatcagaaaacacatccttgaggtgactcatatggcacataaatttaaatctattgatatggatctatatgaaggtttcttagtgcatttcatcatgagctcttttggttctaaatttggtccatttaagatcaattagaacactcagaaagaaaatggattatacagagctaatttcatactcggtggaataggaagagcatcatagagctgaaaaacaaaagcttaaaaaccaacccaacctcgctaatgccaaccataaaggcgaaagaaagatgtatcaaggagaacgctctaacagcaacaagaacaagtcaaacaactctcagaagccaagtgggagtaagcaagatagttcaggctctcaaactaaagatgccccttttaagactccacactgccctttctgcgaggtagatggatattggcaaaggaattgctcatgtttcaaagtgtggttagctaagaaaggtaaccataattttgaagaaatatctaatgttaatgaattcctttatgttgaattttcccttaatacttggtgggttgactcatgtgacattgtgcatgtttctaacttattacagggattcaataccgtttagaaagtagcaaaagaggagcaaagcctaacagagtggctgacaaactagccaaggaagctataatgcctagaagtgttcattcaatgtgtgcttgtcaaaaccgcatcttgcttaccctaacagaaaaagctttgtaagttctctgaaaatcacttcagatcggaaaattgtatgatcgaacatgtctatatttctagttgaaataaaatcctggtttaaaaaaagaccagtactggacatgtctggaaataataatggtctatattggaattaattacatagcattcattgatccttcagtttcagcacaagtaatgtattgtcagttgtcaccaatgaagttagtcctgttgtgctactatgtgcataaatgcatttgtgtctctaaatatcgtcaactagttgagatggtcattatctgcgcaaaacgttctaatctttcgaatagacagctggaaatgtttgttgatacattcatctgctcattagagattagttgagattagccggctatcaatgttttgtatcgacaataataaaaggggtagtgtatgaggtctaaattggatggatgcggagataaagatttagataagttcaagtcctcttgatgagaggtagttccctattttagtttgaggattgtatcctctagagttgtattgatttaacgatattgtttgtgacttatacccttgtaggctcctcgccctcctttataggttgaggggcaaaggtacaggtaggaaacctagccggattcgacatcagttacctttagtacttcaagaggaaagacctagtcggggcttagggcactaccttaactggtaaagaaactctagtgacttagttttctacaattataattatcttagttatggtccacctcctaataccagtcaggtatcaggtcgtgtgggtatttggtacttataatctccacaccggctaaccacaacacaagttatccgtggatcgcttcgattcatgtatcatgttttttcatccatcgatctcagttcttgcgcttgaataagttcagtccatgtgaaaaacttgaataagttaagtcgatgtgaagaataatttttctttaaaggattcagataataaaaattgaacaagtcaacaaatgctcaatatatttcccaaaaggctcggatcatgaaaaaactcagttttcaaagaaagtggactgattaattag

SEQ ID NO: 42511 - DNA, 640 bp, Oryza sativa
ttattttggccgcagagcaatgcattgtctagtgtggagtgttgcattagtttatcacacgtcttattgtttactccgacgaaaacaactttatgctgtatgtgtcttactcgcatatctgttttgaaatcgtgttggaacatatagtcaggtttctcttgctgagagtttaattacggctgcttgcttcgtgccctggaaaactcgcctgactcaggtgcaactctcaggcgtccgattttgtgcgcctgtggctggatcgacctgcctgagcgagagcccccaggccagggcagcaaccaaacaagaagtgaatctcagttgttccggtattcaggtaagtcagtgaactaggtgaaaataactgttcaacaagttatcaaccgaagtaggctgtgttctcgtgtcaaaggttgggaacccacggagtgatagaccgttttttttttgacaatttgatccttctagaaaacttattttgaaactaaccctcgccaaaaacttcaaccaaaaataggctgtgggctcagcgccagtctcgttggcactgagctctaacgggtcagcaccacgtggatccactgcattggcgctgatcccgtatacctgttaagtacgtgaagtatattttgatatcaac

SEQ ID NO: 42512 - DNA, 1144 bp, Oryza sativa
caatgcagttattctataatttgagccaagaagtttcagggaatgtttctgcatgcgcacaaaaattcaaaagtacattttattcctataaactatttttgccacaacattgttgatttgttgtactaccctaaacttcgctcaacaaactctatatacctttattcaaaccctgattctaagaggcaccgaaatataatttcctcatgaaaaaagggcgaagcctgttttgcccgtaaactctactcagtccattttacacctggcctaaacataaattcagttctcttttacctcttatttttaaccaaccgttacaggatgtgtcaatttcattgaatatagtagtagtaaaagttacatatacatgtatgaaagaactataaaaagggacaactcctaagatattaagttcacgaggtgttttgctcatgcctaagcccaaattttggcttcgattgtctttcagagggaccttttttttttctatcggagattgcgtagacttttggcgccacgtttcttggacttcttccttgcatccatgctgagtttcaaaagagaatagttttcccatctccagttgttattgctgtcgttgccgtaaagagtagcttgtcggatttgtcgcatatccagccctacttatgtctttttcgttgccttccactggtgcgctatagccatcttacccttagcgctctcgagaactttttcaggttaagcaccccagccctctataagctattggtatacaagttcttgttcagttgactttacatttttcgctcatgatgttatcagctcttgtccagaggaaccgtttgtttgccaagcacttcttttgagagaattgtttgagcccgaaatgctttgtttgagagagtttatcgttgggttataggacaattacccactatcaattgtttatacacactacctcttttgagtatttttcttgtttccaaaaacaaaattggtgctatgtatgcagttttttatgagctaaaagattcccttcgaatcatgtatatatcacatctggtatgatgagacatatatatatatatatatatatatatatatatatatatatatatatatatatatatatatatatatatatatatatatataaaaatat

SEQ ID NO: 42513 - DNA, 808 bp, Oryza sativa
tgttgaaaatgtggaatatattcttatcacttagccctctttcaaaattcaccacagtgaaatcataactcttctgcttcttcctttctatcagactgttcatcatggcttgctctacacataatagtttttcccaaatttttacaccattataactcactcaaatcgacaggtcaaagacatcaagtgattcaaaatcaggacttcccttctcttttcaactcctcacttccagacttccagtaggacttgagcccttgacacctcatgccccacctgaaagcctaatcgatctatccacccaagaaaaaccaaccagcgtccgcacctttcccctctcccccccccccctgtaaaacatgtggtgcgcatcttcttttggagtagagaacaaccctgcacgactattcaccaggccaagtcgagccttctccgtgaagactagcccttagcagccattgcaagtgggcctacccatcatctacctcacaccattctccaaaattatcatgccccgaccaaatctcctcctccattattttttctgaaaaggaagcaaagcccctgaaatgccctgccgtcccgttccatcgctgggctgctcgagaagacagagacaacacaaggccctgcaccccgtccatggaccacgcacaagagcccaccatttaacctcccatttttccacaaaaacctcttgctcgcccctcgttctatagtgcccagttgcacgggctaaactctgttgggttgctaggaacatgcacgcccatgacgaggccgacgagctgacaacgccacgaaagtt

SEQ ID NO: 42514 - DNA, 1197 bp, Oryza sativa
aatatgtccctgcttcctcaaaaaaactcacttggttttaaccaattaggcatctactagtactccctctgtcccatttttgtcccattttaagtgcagtcatgagtttatgtatccaagtgtccaacatttgatcatctattttatttgaaaattttatgaacttttttttaaaaaaagtcctacataaagtactattcatgctttatcatctaataacaataaaattactaatcataaaataatttcaaataaaacagacggtcaaatgttgaatacaaaaacccacagctgcgcttaaaatgggactgagggagtatctaactatgctcttgtgtttctaggacagcaatggaatcctatcagtcagcctccttttccttctcagtgttctttctgctgttcttaatctagttggccaatacgccactaaaagggacatcatccataccaaggagatgtgccctgctactcaattcatacagctgatagaagcaagacctgtgacacttgtcacatgccttaccacaataggacgcgatgctgctctaaagtgacgatcgcttccctgcaattggagaacctacaagatcaggtggcacagatagagcagaactgctgtgcaatgctgcatacaaggcaaaccaaaaccgcttggagatcctcctactgcacagtgccatcaaattatcaggtttcctatggaatccatcctatcggtgtcagggtggcatggtcgcatcagtattgtatggattttattttgggtccggttcagctgaaacgatgtgaaatgcgcatcacaaagaatgaggagattgttgaagtcctgtccaacttcctagagtgagcttgcctggacatagtgggaccacacaatatgggcctgccatggctagatctgggcgtcctaactggtcacttgggcaaggaagaacaggatgcttgctgaagatagcaagagcaagaaagaggaacgagcaagaaacagtgagttaggttaaccatataagtaggatccaaggtggactcatgtgatacaaaacaaggtctattggttagacggacatgtttttcttggttttcagatttgagggacgaaatttagctggttttggaactgaggcacaaaaataaacaggtctaaagttgagggacaagaaataagatgcacctcttcttcattgcaaggcaagt

SEQ ID NO: 42515 - DNA, 1302 bp, Oryza sativa
ctagcaaaagagccagataggataaatcaaaaagggaaaatacatgcatgaagtatactaactccaatcttttagtacttattatttagggtattgatacaaggggttaactggatacataccattacaacttttataattttgtgatatgtcattactattcacctgtatcaagtcataccattacaatttcaccattatttgacatatgcaatacttacccgttgaacttattttctaaattttttttaccaaattaccccttctcctcttcatcccttctctttccactccccttcctcctatctctgtggatctggttctaaatgcatgggcagtggacaaggtgcgtggaggcggaggcgtaaacaagccacggcgtacacggagctggtggtggagacgacacacagactcaaggcaaagtttgtttgcagtgttgggcctcgagctcctagtggttacgcgtgcctgggccgcacgatgttgggaggctcggtgactatgtgtcagggctcaaaaccgggagcagtgctactgcgacgactcaggaggttatgcactatgccaagatcgtgcgtggcagcccacaaccaccatcgtcgctatcagatttcatgcacgccatcgtcctgggtgttgtcgtcgctgctgacaaggtcgtcgtgctactcagtcctcataggcacattgcttcgtcgcggccgccggaagaagggaagaggacatcgatttcagctactctgctggtttgtgctaccgctggatccaaagcctgtacaatgaccatggatgctgttggcttgagctcaactcaagtagtgtgctagtggtgtgaggactaaggattggggagtagtaacaagctgaccttagcaccgcctacccctgcgtgctcattatcgatccactaatacctaagctgccagattcattgggggaagatgatgaacaggagagaggaggggaagaaggaggaagggggtattttggtccaaatattttagaaaatgtggggtatcaaatatcaatacagttgtaatggtatggcttcaaatagagaaatagtaatggtatattttaaaatcgtaaaagttgtaatggcgtagatccaattaacccttaataaaatatcacttaacccataaaatataattaggagaacgctacacatcagacatttgatattttgcaaaaaaaatcagacggtgtttcaccacatataaaaaaaatatttcagatgtttcatcaccgttgaacaatgcttcactagaaaatgtttcggatgtttcattactcgat

SEQ ID NO: 42516 - DNA, 2495 bp, Oryza sativa
atgaacttgatcatcagtttactcgacagtactatcaacaccatcacccttcttgttacgtatactcaatggtgcaatcatcctagggaaatctgattggtcgtaactgtccattgtacaaggaagtatcatggcttgtcaaagccacacttttttttagaacacgcaggagatctgcgtatcatttcattgagatagaggaaaaaaggtggatggcgttagagataaactccgacacccacccacccggaagtacaacaccaacaaaacacacccacaagaagcaaaacgaacctagtgcactagtacgacagccctagacaaaagatcacgaagcttagaagctcctggtaggcaccaaagggcgccctcacttgcaatggcttgaaggacatcagccatgcttggggtagtgccattaaaaacacagttgtttctatgcttccaaatctcccaagcgaccaagataataaaggagttgagccccttcttctcactagcaggcaatccccttattgtccttaccaccaactggcgaacctagtagtgccctggcttggaaagttagagtagccaagccgttggagaaccaaacaccacacttgctgactaaacacacaagtgactagaatgtaattaatagtttgctgaagcggaacctggttagtaaggccgcaatgtttttaaacatagaaacatcccaagtatatactcaaatatatacatatggactctattctgatagaaatataaaacaatatttaatttggtgatgacaactataatatggagtgttattgatcaatttgtaaaaaccagatataatcatccaagtacttgtaacaggtcctagtcacctataagttgcaaaaaagctggtattttccgaggttaatgggtgttaaaactaggtagttaatacttgtttcaactcttgcttcttattgctcctttattgttttgccgtggggctccagtgctaagctgatttctctgtctttctgcacaaagatcatcatcttctcttattggcaaattttcatagccactttatagtatgtagataggccgttcatttgagtttacatacataaaacgaaaatgtatgaaacaaaaagttacaagttcactgtgaagtgactgagcgatactattgatgagactttcttgtatgtaatccatgcgcataattcatgtgttgttgatctcctaagtgcttatgcatgttttttcacgcttttcagaggttcattgtttccaagtattccactggctcaattgctgtgcaagcctcatttttcttattattcttgagtgccagtggatcaaaactttggctcatactgtttacattgcataatgacagtggccgatttcatttttgcactgatgtagtgaatttcatgttgcaccatattagctgtcaccctactactacatcattactacccatactccattatggttacagtgaccttgatacaatataatgtgtttgaagatttgattccaacagagttgacttttcggtagcaaatagaggaataacaaattgccattcacgttgcttattgttgtagctcattgtgcttggtattatattagttaggggccaagcgatataggatagtttgcctcatcatttataacttcatatgttgattataaaattaagatttgagttacttttcccaagcacataatggtccaaaaagttgtagcgtctaaacttgtaatttaatcgactaatactcaaatactccatacacccaaaaatgtaagttgtttgtgcctttacagtctcaaaagcaagactttgagtattgattctaataataataatataaaaataaaatataatgaataactaatgtatgttgcctgaaaaaataaataatactagttttctcatagtcaattgatatgatttgcaagtattaattgtttgcatgcttcctaggatgacttccattgtgggacagtgggagcactatatattggtctaatttatcttcataaatttgtagcaatttactctatgtcaattgttagaagcttagagcaagggacacctcaaatatgtctagtgtatgctacgtcctgcaatataaatacaacctgtgcgaatattttgatattttatttgtacaaatgggaactgagaaatttgttggggagaaaatccgatgcgtccacacttatcatccttttagaaccttgattggaatactgtggcaggcccagaatttgtctaattaaaacaacctgtacatgtcactaaatggaagcaggctaggctaccctctggattcgagcaatgatctgtttctatgtaagaaatcttttctggatggatttgtgcatgactgatgactatgtatattgtatgttatctttgaatcttatatataggattatgttatctatgaatcttatgtataggattgtgccttttcatatttatatattattaatagtgcacattgcttttctaa

SEQ ID NO: 42517 - DNA, 1926 bp, Oryza sativa
ggttggtcccacacatattttttttataatattctctctgttgagacttgagagacagaggaggcttaatcttttgcactgctcggttcatgtttctctagttcactaggagggcgatcctcgcttcctcgcttctacgttgctaatgatattatggacctattttgggggagtttttaagcggccgcagctttttccagctagaatcagaaattccctcgaataattcagcttctggtctagattctgataagctgtagttgtaaatttcagaaaataaactagaggccagaagctggaaaacttagcttttttagattgttagaagctggctaccgcaaccaactgtttctcgcaatcttaagctcctcaaacagaccctatataattgtccacgtcaactaagttactactacttcacattgctccaacaaaagataaaatcggtaatttatctcgaaattactggctcagaaaattgcattttttttactgatttcatgtagacgatggtagtacggtactattgtcggcacagctcatacatgctagacgcgtggatactggataacgccatgcatgtgtgagctgcaattatctttctttgtttttttggcccgtatcatatgtacatgtcgtacgcgaaatttgaggggtcgtgagcgtctctgtggacatcgggtgatatggccttatctagaagcaaaacaagtactctctcggttccataatataaaggattttaactttttatttaactatttgaccactcgtcttatttaataaaacttatgcaaatataaaaacgtaaagttgtgcttaaaatactttgtataataaagtatgacataaataaaataaataataatttcaaaatttctgaataagacgaatggtcaaacagtatacgtaaaaagttaaaatcccttatattatgggacggatggcgtactttgtaacgaggagaggcaaaacaatcatttcatagatattccctctttcctcaatagacgaaatatgataaaagatggatacaatgtctatgaatagagagtcacactttgaaactgtgttttcctaaatattcatttatataatattttagagctaaaaccgtaaaatcagcatgtcctacaacaaataacaaattttgttatgaaaatgttgcttatatgatactaaaaacatatgttgttagcttaatatttactcaaaatttcaagtgtcgttgattcttcttaaaacaaggtcgtcttatattttacgatgcagggagcagtgtgtatgtcgctattggtctgttgtctagcattttgcgcgataccagtgactactaaatattgaaacatgtgctagtgtgcaatttgaaggtgttgtgtacatacgagtatgtgaacagatgcatgaatagattataaaagaataagcaaaatgagagtaagcttgtcggtgaatgaacgtataaagtaggcctctcctgatatttttttccccagaacacatatgcagctttagcactttaattcatacagtgtcactcaaactttagccagatgtcatccgtgtggctaaaagtgaaaccaagctacttcggttgataataataaggatacagtcttaaacacatgtttcaatcactattttctattataatatatataaaaatatcaacaaatatataattttattgacatcagacttgtccaaaataataagtattattaacatggagaaattaaataattaattgtgctcagattgacgaggactgaattacgaacgtcaaattacattattagagggctactttaagatgcagggaaaatatgcagtgcaaaactctacgtaatgcaaacctggattgggagtataagttttactcatggtgatgtctacggaagtttctcagtttacattgtatatgga

SEQ ID NO: 42518 - DNA, 698 bp, Oryza sativa
atcaaaattgaaagtttggttgaaattggaacgatgtgacggaaaagttgtaaatttatgtgtgtaagaaagttttgatgtgatggaaaagttgaaagtttgaataaaaagtttggaactaatcaagggcctaatgtcgctgtcagatgagactcgaagtcagtcaatgccatagcgcgtttttcttctaatgtcactctcggatgagactcgaggtcagtcaacgccatagcgtttttctcctaacgtcatggtcaggtgagactcgagtcagtcaatgccatactgatggcttgtttaaggtccgtttagatcccaccccaaaattttacaccctgtcacatcgaacgtttgaatacctgcatgaagtattaaatataggcttaaaaaataactaattgcacagatgcgacaaatttgcgagatgaatctattgctccatgatttgacaatgtggtgctacagtaaatatttactaatgacggattaattaggcttagtaaattcgtctctctgtaattagttttttattagtgcctgaacatcccatgcgacactgtcacgcccgggcaacggccgaagattatacggatggaacgaaggaggccgcggcctccgctggcatagttggcgaggtatggtgatgaactggtatagaagaaagaaagaaacgtgcattagagaagggctgcaggaat

SEQ ID NO: 42519 - DNA, 2364 bp, Oryza sativa
atctactatttttttttgttggtcttttctggactataggaaaaaaaaattaatggcgaagggaagggtaaattctctcaccgatgaaccacgctctgataccacctgatgcgaacacgctagggtttgtggcccgatctttcgatgagaggtaagggataactcgattagatgaagtcgacgttcacagcccgactacaacggtccaaagacgctgcgccttagcaactgatacaccgtctccaatggtcgccgcgaacttgtggggcgcgtcaacccggccacgagggcactcgtcctgcaagcaatcgaagaacaagtaagaacaagtaggacaagcactgaaattgctagataaagatgaaagtttcactatcaaacacaatatggtggggttccgattacaggcagacgggcggtttagccaacacgcgcgctgcgagccggtagcaagaagctatctctatcatcaaaacccgcctgttcttggcggtgactagaggtataagaagaggggaagaacgaccatagggtcgtgctccaaccctaggacgcgcccctaatgggcccaacttggatacacagcccattgggccaaaagaggtgacgcagcaccatgggcagaaaatagtcgggagtaaaatgacaattgcggccgctccagaacagatatagatatgtggctggatccatttgaaagtagacttgataagctttccatgaagtacttgcacacccaaatcggagttcgcatgaagtcgtggcggccgtcagaagttggcgctgccctgcaatccgaatccaccccgcgcgaatcctcttccctttggatcctctccatcgttcctgagtaaaacacgagtgcacgcgtctccggggtataaagacgaggaatatgaactcaagaaagaactcacctgataatttagttgacatgcacgagcgcgggtaataggaccatcatgctgtacatgggaggacgtggatgtatcgatggtgttgatgtcctcatcacagaagaatggtgttcttttccttggtcttcaggttcaagtcttctagggaaagctatggtttacttgtttggccaaggtagcttcaacctccactacgaaggccctgacttgcaactagccatggaatcatcctccccaccatcgtcggcacaagatggcttgctgttccaatggaagaagcagaaggacccgattgctttttaagcttctttttaggtcctcttgtgcatactttgcgtttgtcgaaataatatttcggcaatactaaaagggggtggctatcaagtaggaaaagtggatgggttaggagacacaaggtttatacaggttcaagccttctcgatgagaagtaataacctactcctgtccgggcattgatccgctgagtgtgttattgctcgtatgatctgggtgaaaagttatgcccctagagtcacccgggcccctccttatataggggaaggagtcgggattacaagatgcaatccatgttccttacagaccaggtatgtagagataaattacaattgtaaccgactaggacttctaggtatttccttggtatacaagttaatataacaaccaagtctattactaaagatattctatccatatatggtacccccatacccagtcggatatacatgccgtgtgggtatgaggtatccataatctccacagtagcccctgagaccttcatagtcgacgaaataatcttctcttgagcctttacacgaaaatcccgagtgcttcgattatctctgccttggtctcccgtgtacttgaatcattaggctgtgaagggctaaaaaataaaaattaggtgcatcaactagatgcacctaattaggtgtagcccccgactatgtgattagttaagccaaactaaacatatagtcaaggtcaagataagtaaccagctgagtggttttatgaataatattaccgaagtaattaaatattaaagcatatgcgacttctgtccgaagatttagcctactgcttttagataaattattaagctcactatgaaatatagaggatatataaagatctgagtaataaaagcactcttaggatccatcatctattctagagctaaacacagcatttttgataaaacacccgagtaaaaactcataaaggatttatcaactgctaaataaataacggctaataagtttaaccagcctaagctgtaactttagtctgttattaaaaaatacagcatataatgctcaaaaggaacaacagctttataaacctgtcgtcctgatttaacctaacagccttgtgaccttataaaaaggatcaacaaaaataactgggcacctttttgtacgcatcg

SEQ ID NO: 42520 - DNA, 1131 bp, Oryza sativa
ttgttttggtgggagttttttgtaagacttgctatttaatttgttggttgattgctgtgaatagcaggagctgaacttgagagcagtcagagaaaaagctcatatgtgcagcctggtcatgacaacttccaatgctaggatgataatatcagcaaggatatttaaaaaaaaaaaaaggaagtcctattcaagaataagttcttgtgtattcagaaactcaggataagtataatttgaccaaaggatgtgtgcatgtccttatgccaaaacctgagcatgtgtaaaaggctggttatttggcaacagtctgagcacatatatttttagttatatttttaacaatctttctaaaataatgatgttagtagtcgcagtgtccatccccacaccacccctactactgacatctgggggcccacaatttatactatttacaccacttttcaacatgtcctccatttcactattggctcccccaaattttaaaaatcacctactcgttcaataagaaaaattactagaactaaataaatgcttattaattgattaaataagctataaattcaatttgttttctgttgcaacacccggtgtccaagtcagtactgttgcaaaagcactaaagaaatcactccctaatatcataggacattaatgcagtacacagcaaatatagatcaagcagtgtacaaaagcacttgagatctgaaacaaaccatcaaataaatttgatcccttttagacttcggacatattaggggaaagtttggttttgccactaatgaatgtccattctcatatatgccactaatttttccaacttacactaccagaagacattacatatgtattacaagatgacaaaatctcataaataattcatttaaaaaagataacaatgtctagttggcaactaaaagaatggatgggaataactgtagcatcaacgaaagaagtaagggttaattggatctatgccactgcaaatatgacaattagaaaaaataccactactattcagtatatcggctaccctgagttattgttcactgactatatcttagaccattgcgatctctttctttcacttggtaggcatttcttcccgttatcgggacttgcacttgcccg

SEQ ID NO: 42521 - DNA, 1874 bp, Oryza sativa
cgacggcggtggcgctgcatgcaggtgacggccacagtcggccatggcggccgcgtcagcatggcgacggcgaatgtggcagcggcggcggcgacgacgacggagcgaagacggacggcggtggcagccggccgaaggagatcgtgagagatcagaaaggggggagaggttgtgatggggattgaccaaagatggaagagctggcatatggcccaagggcatttttgatatttcacatgatttctctctcctcttcaaccggaaattattattttaatcgacgcagtgtccaccggtaaattaccacgtttatagagtgttttcccccaaaagtgagtttagacggtgtcctagggctaaaatcacacaatagtagtgtcctgtagcaaaatttgcgataacaattataaacaggagacagacgtacacatattcattttgataaaaaaaatcaagaaaattgtaaccaacatgagacactgcaagagccatatgtgttctgtcatcagtgatctcattgagtgttgctgttaaatccttatacctgagattatcatggttatcaacatgtgtagtagcttacttagggactgctaaacgctactccgtaattgggtagttataaaagtagttttcgggtatgatatgaaacatgtagtgagatatgaataatcaagatgggatttgcccctcctatggagagatatctctgggcccctcgatgttgtagattatggaagtgtatggccatgccaaaggtgattgaggagtcaatcacaagttatataatctatcaacaggttcgagtgaatgattgagctattagaggatggcacatatctagccttgagcttaatcgatatcgtgaggcaaaggggttcatacaagtatatactagaggttcagccgatatgatctttatgtatgcccggtgggtcaatacgttctgctaggggccgctgttgacgcgtggaccgaaaaggagttttcgggttacagccgagtatatatgaacctacaggttcgcacgcttaatgggccagaataaggggattggatagagatccaatatgagcttaatttggatagggatccgaataggagttctacgggccttggaggcccgagtgatggatcctatatattcgtgaggggtgtgaccggcggaggcattgcatcacgtgagaaaccctagccgccacttccctccccgagcaaaccctagctgcgcgcgtggtgttccgtccctgtacatgtggataccggtagaggcaccgctggtttgcggtgctgatcggcgtgggagtacgacgaggagaacgcacgaggaggagaaggccgagccggtgcgatcgactacttcctctacatcgacgtgcgctacttcgcgagagttccttcgacttctcagcgtcttcttccgctacacagcgtgtcgagtggtagcgatctatgatctaatactttcatggttcctggtttacgcgatagaaaattttgatttatgctatcgtagggcctgtttggcacagctccagctccagcttcaccccttctggagctggagctcagccaaacagtttcggctccaccaaaactgggagtggagctaggtggagctctctcacaaaatgaactagagttgtggagctgggtttaggcagctccacaactccactccagactcaactcctggagttaaatttaggagttggagctgtaccaaacaggcccgtagcctacgcgtatcccaacagatattggtagttgtccgaacattagacacgtgaatgagtgaacaaatgaaaattcagatgggagcatatttctgagaatactgcacacatgcaaaattgcaaatgggctgcaggaat

SEQ ID NO: 42522 - DNA, 1666 bp, Oryza sativa
tgctgatattttcaccaaacaattggattcttctcgctttgcttttcttgagagttcggaatattcctccttttagcatgatttgagggggagttttgtactcttgattttatcgagcaacatttgacaattaaaaaaattgagaaaagagagctttgtttaatacatatggtatattcttgtgcatgctagcaatactatgaaagtttctttatctctaacatagcttgtatgtattctagtccttttatgaggcttaatattgcttttaatggagatgatacatgacacttcaaattatgtacttgaattaagcaaatgcagtattgatgctagcgcatggtttgattgataaatgcttatgtatatgatttattgaattgttattcctcaaatagctttttaattgctcattgtacatgagaataaaaaatatctaggagagaaaaaaaatgaatactaaatccttgaaaacagtcttgacgacaaggacgtattcgatgtgagcaaaagtaatgggtgacttatccttgaaaacagtctttgacgacaaggacatacccggaataattgagggaaaaaatgagcaaagaggctcaaataaaatttaaaaattctctcaattattttgtgttagagctaatttgagaaagagtgataaatgcatttaatgatatatatatatatatatatatatatatatatatatatatatatatatatagtttatttttcaacctatgtgcttgaaaggatgttgcattgtaaatcaataaacaatcgtatgtacatattgccaatcaataataaacacaccatatatatgattacacattgtacacaaatctcacgcaagtagtagttagtatttcatacatcggtatcaatggaataaattgagctgcgatgtgggctggtttcggtgttgtcttggtcggaagatgctctctactcagaaactggaggcttctgcccggctaacctggttaagatcctgagcacacacggagcagagcattcaagtggattagttattttgttcatttcttcacagctaattaattaagtactaaatcgatagagatattgcgaaaaataagaagacgcatgcattcacctttgcatccgagtctgcggctttctgcagcatccaaattccaaacaacaaattaacgggtcagtcagttgcttgcccggtctttcttcagtaaatttcgtaatagcgggcacacttgcctttctttgggtctaactacgatctcactaggcgccacgcctgttgtggtttgccgagcctgttgatcccctgctcttgccatagcctttgcctgtgatattagacattgtacacttgatcagactgacatcccttcgataaagaatatactatactactcagattgatgcatgtatatattcatactaaccaggttcctatactgaacattgtagagatctgcaggtaacgttgtttggcttgtctttcctccttgtttagtgtcttccagaaggaatatgtagatcccatgtttagcactctagttgcataaatcttccatgtgtagctgccatcatggatttagttagtgccatatatataggaggattgatctaagttgtgcacaaaaacaaaaacaaaaaaaaaaagaacaggacgcatgcaagg

SEQ ID NO: 42523 - DNA, 914 bp, Oryza sativa
ttctatattagatttacttgttatatatttgaacaaacattgctacacattgagttttgtgtgttttcgttcgcagaggtacttgcttgggtgaaagaaaagagaccgagcgtaaggaatgcatggatgatgaagaagttgattggggaccaaaccaagaccttctccaagtatacttctacctcaccacgtcacttttggcctatagaagacaagagatcaagttgtacacgttttggattcggattcgggcctcctgacagcatcaacttcaaacggacctaactccctcattagttggtttcagagcgcagttgcccattaggtaatttatcttcccataaccagaaaattgccacacaaaaatatttattctttacctagacaatttgagccgttgcattgttctattagattttgctttgttgaattctaggttgcatcgtcgtgtcgagtgctggtttagttttagatttaatttttagttttgagtattacatctattcatcttttaggtctagggttcatcactcaagtatgtgagttgtacgtctgttttgggtccagtttttcatctcgttagttgttgccggcaccttgaaaaattgaatcgtctcatcgtcgggtttccgtttttgtgatttggagagatttttatcaaaccgttttggagttgccgtactgtgcgcgtgtactgtgcgcatgagaggagtactgtgcgcgtgaagagagactccagatcagatctattcgtgactatccgtattattctctctatagaattgttatgcagcggatttgagatatttttataaaaacggaacctacatgatatgagcaatccatttttgagatgatccaattttagttttgcactttgcgtttgagtccctgtaatattcatatttacattt

SEQ ID NO: 42524 - DNA, 670 bp, Oryza sativa
tgagtacggtggttgtacttagtcttgctttatttttcctaatcccccagaagcaaaagttggttcagatagtgagttctatgaagattaggcttgtgccagccgacaagagtttgcctgtggagttgtggaggaagcttcgctttgctgagaagataaagtctagttctttagtttttccgttgcgtttgagttttattttgttatttttataagtcgtggaactgtatcaaattgtcatctatgtactctggttgatgcctggacagaggttaaatgcacaggtagccggtgattcgggttgtcgaatccccgggcgcgacaagttggtatcagagccgaccttgaccgtaggacaagccaaacggaaaacccatagagccctctgaaattcttttcttcctcccgaaaatctcttctttccccattttcaagtggtctagtgagtccagataaatgagtttgctctcaagtttctgagtttcgtcaaaaaaaatatttttttctttgtgcctctttgactttcaaaaaaaaagaaaaattttgttttcggcattgaaaaaaaagagttttggtaaaaaaaaggtgttttcgggatttcaaaaagaaaaggagtttcggtatcataaaaaaagaggggttttcggtattaaaaaattttggccaaaaa

SEQ ID NO: 42525 - DNA, 2377 bp, Oryza sativa
caatatgaagttatctaggcacatcaagagaagactgaaatctgtcagaaagcagaaaaactccggagtgatagcattggactatgtccaaacggctagaaatctggcagatcagtttaccaaggggctaccacgtaatgtgatagacagtgcatcgagggaaatgggcttgatacccacctaaggttgcataatagtggaaacctgtccattgtgatcggagatcccgtgaatttggatggtgaaacaaactattgtgtgattgagagaagagacccttgaaaagggctcattttcatgatgtgattctcttctttcctgcatggtaggatggcttatgccttaatgtgatccgagtggcttttccaagcagagatgttgacctgcagaacatctcagaaggaacacacctatatgagttcgactgctagtcacagtctatgaggtttgggcgatctctagatactcatgaaaggcctggagtttgacttatatgctccaaacagaggggatgcgaacagcagcccagtaccagtcaaggttctgagtgaaacctgatcacacaaaactgacaatttaaggcatagtccattgttcagttgtggtctgatgtagctcatttcctaggtggaagttcaacttaacagtctccaccaaaaccctggtatatcaaacaggcacaacattgagaacatttcttatgagccttgaaatttggtggggattgttagaataattgggctaggcccaacttatcctattaaatctcaaaggcccataataagtgttaaggataataataccacctcaggatttaagcgaggaatatctcaacctaaatagagagttattggagactccctgttgaccagttgaggtggggatcggaatgccacacgcgcgcgcgttgggccgggacgagggcgtgggcgtgggcatgggcgtgggcgaggcgaggcgtggctggcggcgtgcgtgcgtgcgtacgtcacgtcacatcacgtcgctatccttttgcagccactaacccacgttcccacgattccctccgcaacagcgcgtccacgttctttctcctgatagataaggaggccgcgagtccgatccagtttcattgcttctttcccggtgttagtttctccttctccatgcctgagttgctcttgcttcctcgcttctgatctcttgcgcgcacgagagattggaaggagcagtgcctccgaaaccacaccttcgcctgagatctgcaccgggtaggcttgtgatcaggtttttggggagtgcctcccgcacgactgctcatcgccatgtctggagttgccgccgccgccgctgctggaggagatggcggaggtggtgcgccgccgacaggagctggatccggagccggagctggtgcgccaggaggtgccgtgaacgacagcaacaacggaggcaattctgcctcaccatccagcggagggctattctcggggtataatcttctcctactgttcctgttgttagcgctattcctgttcccattgttagcgctatcgctatactatgtgcgctatgttcttgttcctgttctgttcctgttcttcatgatgcctctagcatgttattgcgttactgttatgttcctgttcctgacattcatgatgcgcatagtatgatactgggtatgttaagatcaccctacactgcttatgccatgattattgctttaacattttggattaaaatatgccgattaatgactatatttccaacaaatggcaggcctactgcgctgttggaggtgtggacagcttccaaggtgactgggagaagttgtacgacaaggtgaataacgcagcttacacatgcaatgccgactcggacgggttcaagatagatgccagtactgctaccggtgacagccccgtcttcacggcgaccatcaaaatccatttcagtgaatgaaaaaaaaacaagatcgaccacatacatgcatgtcattcgctcctgttgcacggggcacgctcgctacattctattgctgtatcagccagtcaatggatgtaatgttattctctttcgcaaaataatgtagctgttactgttgatcgtgcgaaccgatcacaccagctctcgtttgtaatgttctcgtcttacatattataataaacacgttcagccatgtagtgtgcaaaattaaagctatttacatctttatctttactacttaaaagagttttaaaaaagaaaggcttaaggcaaggtgatccgtatctccaattatttttaacgttctcgtagacgtgttagctatccttatcaagcgtgcaaaggaggatggacatattgctagactaatgccacacttgattgatgatggtttatctattctgca

SEQ ID NO: 42526 - DNA, 1843 bp, Oryza sativa
atgattaattactctactgttttataattctcaaatgtttgctaaatgctgcttttgcaaatgagccctatataatgccatccttttggtatccttgtgcacttgcatatttactgtgtggcttgttgagtatgtcatatgctcaccttgcaataatcaatcaaacctcagttgaagacaagttgcgaaggagaagacgtttggcttataccccagttgagctgcctgtgggagtggagccggagctttgctagattttattttccgctgcagttttcttcatggtgaggactaagtgcctcttaagtaagtatttatcgttttagttaatttgatgaatctgtatattaaattgtcagtttgtgtatctcggctgattcatggacgaggatttaatgcacaaataagttcggaaattactagtgaatttctgggcgtgatagttgtctaataataaaacagattacagattccgtcaggaaactgcgagacgaatttattaagtctaattaatccatcattagcaaatgtttcctgtagcacaacattgtcaaatcatggcgcaattaggcttaaaagattcgtctcacaatttgcacgcaatctgtatcgtaattggtttttttcatacatttaatactctatgcatgtgtcaaatattcgatgtgacagtgtgaaaacttttgttttgggaactaagcagggcctaaacctccaccgatacaaacggcaagcaggcatgcatgcctcgctaccctcagcatctccatgataccgccaactgtctcccttgcatttcagcagcacaaattgtctcaactaatggtttagaacaatatgttaaatatcaaatagttttaaatatctaatgttcaagaacgatagatgcctgccccaactatgacaaaagggaattgaacttaagacctcccactttcgagtgagagaccaaatgaccaattatcatacaacctttcatgcatatctaaatgacttgggctttctatttgaatatttattaatctccactttcctgcccaggagttaccattttcataatcttctacattacatctttacatgtctcgttgtgtaagaccgtttggaattattttgcctaataatagtagtaaatgtttcagttcaagaaacaattgaggatttaataacaagctaacagtccctttttagatggagttaacaattccaatggcatggagcaaatctctgaatccattacttaaaaaacaatttttctatacgagaccccttatgttgcatgccgtccgtaagtgcgggcttctacaaaaatcgacctccattttcgcatacggctccttaagaggtcctgtaaaaaatcgactttcgcaaatgggacacttaggccgctgcgaaaatgagtttatttttacaggtggacctcttatggtggatcaagaagcaatagattttcacatgtggacctattaagttgatccgcgtggagggcgaatacggcgacggcggccctcccccgccctaatccagtggcggctgccctcccccgccccaatccaatggtcgccgtcctcccctgccctgatccagcggtgatgatgggaggaggaggaggaggaggacagtggcggctaagggaggacagctgcagcggctgtgaggatgaggatgacagtggcggcgactggaggatgacgacgggaggaggacaacatcaatggtggtggctggaggatgaggacaacgacgacgatggcggcgatatgaggaggacaatgttgacggcggcggcaggagaacgacgacggcagcggcaggaggacaaggatggaggcggtggcaatgt

SEQ ID NO: 42527 - DNA, 2573 bp, Oryza sativa
ggccgccggcggcggcgacggcgtgggctggcggtggctcccggcacggctcccctcccctcccctctcagatccggccgggggagggtggtggcggcgaggcgcgtgcggcgatttttttttgttcgttcattgcattttcgtaggcgggccgttgccccgactgcgagttgtggtgcaggcagacctccctcccgtctggaaaaattagttttggccgcctgcaaaaatgctttttctagtagtgagatcgaatcacaacaatacgatcatgctgatcagtaaaaatattttgcattgaacaccttacatagtttgatttcatagtacattacattattgtctcccctattatcatttataactgtactacgaaactaagaaaacccacaagcctatttatcctaaaataagtataaatttgatttataggtttatttatcccacttaattttagcatacatgctattataaatgatgcattacaacattttacataaaaagccaggtaatagtcagaatcatttccgttacttcttttgaaatatccgtttatcccattaaattttaatataaatgctatgttttagatgaagcctacatgctattataaatgatgtgttacaacgtacatttcacgtaaaaagccaggtaatagtcacattcatttctattacttcttttgaaatgtttacaagacaaccatgtttcttaaaagttctttttagaacttattaccagtggcatattatagaatggttaaagtcgtgcgaattagctagtttttttcggatgataatgtattttcataaaaaaaaaattcagtacttgatcagtatgatatataaaccatacaaactttactccaccatgattcaaatctactccaccaaaattaagcatatgtaaatagagctgccaaatataacgaggttaaaatgttgccacagcgatgccttccccgtacgtgtctgtgtgtgcatgtccgttctcagtgtagtcctaagaaaaataaatataaaccacagtgctgattggagatctcgatatgcaatggttgcatagtgctgatagtgatgatcaggatgtgagacaaagtaaagtttttattcagattgcggacatcgaattattttagcatgaaacatatcatctgggggatacgttaattgccagtattcctggcacgtgtactaaacaatcttacgttattagtgttgaccacactaaattgatttaaacattaagtcagagaatatgctcgatcgattaaactttacatgcctgaaccgcgtgtttgagtaatatcaccaataattagtataattaaattatcgttttgacgaagcatgacacgcagatactccatttttgcctcgattcttgcatgacttaaaaattgttctactagtattgaatattttttttcaacgtacgttaaacatgatgggctgtctgtccaaaaagttcgcttgtaattttcaatacgaaaaattggctattctacagtgcgtgttgcgcatgagttgtttatcttatctagccagatgtgaatctcttatatagttttgaatagggtgaatagctaatgcggtccctaaagtttcgctttaggctcagtttagtccttgagattttaaatagtctaaacaagtccttcaaattaatcatttgggttaatatagtccttggacccataaaaagtgccacacgagcacgccaaattatcctcgcatacagaggtatgaatgaaatggaccattctacccttatataccacatataaaagaaagaaaaaaaagataaatgtttcacatgtgtatgatcgtttgagaattttcacttatgattgctgtagccaagcattgatcgtgtaattcctttgtaggccacccatccgtaacaatgctatgcctgggctggcttttttttttttgtcttttctttcttttctatatgatatataagggtagaatggtcattttattcatatcgctgcatgcgaggatgacttggcgtgctcacgtggcacttttttttccaaggactatattaacccaaatgattaatttggaggactcgtttggatgatttgaaacatcgaggactaaactgagcccgaagcgaaactttagggaccgtattgactattcacccttttgaataatgaagatagctggccttagttctgccagtgtgtatatgttggaactgattagggcatggaaataaacgttaaagatgctgtaggaacgtctaaattaacaaagataaatatgctaaaaaaatcatgttaatgtgaagtggaacaatttggactaacgtagtacgtcttgcgttcgatcttatccgctcgtatcgtacacaatcatggcgatcggaggttcacgtgtatgagtaatatccccacactaaaatactaaatccgaggtatacccattcacgctgatacggagtaattgattgcttagagaatatgctcgatcgattaaactttaattacatgcatgcctgaatcgcgcgcgcgcgtcttagtaatatcaccaacaattagtactattaatttgtcattt

SEQ ID NO: 42528 - DNA, 687 bp, Oryza sativa
aaggagattaacttgacacttttaacttagcaacattgcctccagtgatctgatatttactctttaagtcctgttagtgattttctagagcaaagagaattcgtaaaaaaattctccctgacaattccgattattaaatacattgttaactggggttttctcctggttaaccaaagtaaattcttgaagtcatttattaatgatttgaaacctaagggaagggaaaactccaagtgtgacaggagatgatcttcagtcttacaaaaaatttctatacaaaattaagttgctttagaaaaatcttattgatccgttttatgtgtttggggagagagtttcccaactcccactcacgattcgttttatgcgactcacgaacacagcagcctaaaaccataaatagacgtcgcctgggagcatcttgatgtagatcgactcaaatagtttcgggctctcacctcccttgaacagttgttggaagtgtaagactgacatggccaacgatccaaagctagcatttatggataatcattattagtagcagtaataacatgaatttcttaatttggtgcagatcctctgaatcgttgatccaagctcgaagatggcggcaccaatgggggacggaggcgacctggttatgctgatggaggtatcccagctgaagaagctggccctcctgctgag

SEQ ID NO: 42529 - DNA, 685 bp, Oryza sativa
atcatggtgcctcaaaacgacaaattaatagtactaattaattgttggtgatattactaaaacacgcggcttcaggcatgtaaagtttaatcgttcgagcatattcgatcactaagtaatcagttaagtatcagcgtgaatgtgtacctcggatatagtgtggtgatattacgcaaacacgtgaacctccgatcaccatgattgtgtacgataagagttgatatgatcgaacgacgtgcttaatcagagtgagaatgcaagacgtactatgttggtccaaatagttccacatcgacattaacatcatacttcctccgtttcgaaatatttgacaccattgactttttagcacatgtttgaccgttcgttttatttaaaaacttttgtgaaatatgtaaaattatatgcctatataaaaatatatttaacaataaatcaaatgatagaaaaagaattaataattacttaaattttttgaataagacgaacggttaaacatgtgctaaaatgtcaacggcgtcaaacatttcgaaacggagggagtatttatctttgttaatttagacgttcctggagcatctttattctttaacgtttatttccatgccctgatctgcatgcacttccaacgtatacacactggcagaaccaagactgcaggccagctagctatcttcatcattca

SEQ ID NO: 42530 - DNA, 2624 bp, Oryza sativa
tgagaatattgtgtcactgacagcagaacaacaacatataatagctacttctataaccaatagtttgtaaaccacatgtttaacccctattgaaatagcttaactagcagcagtcaacagaaactatacaggttaatagaaactacaggccaatagacaattcatatatccaaaatatcaatctccagaagagatcctacaattttcaaagttcacaagaactaaacactacagtatcaatctcacattatccaaaatcaagaatttttttcttcgacacagtatactcttgattaataaaagtagaaaatttcagttccaagactgaaactctgaagcatgacagtcacctaaaaagtgtctaattgcgggaataacatcaactgcatgatttctctatttatacacttctaaagatttggtgttggtctacgaattaatcaaaaaatgcacattgaaaggaaaaatggcacaatctacagtttcagagaactgaaactcccaaacctgcacatgatctgagactgaattttctagctaaatttcagcaacctgaaccataatttcagaatttcacaattcagaattgagctcaatttcagcaggtccccaacatatacactgcagtaatgcagtcagtgggcaagaaacacaagcacatttagagtgtgtagatggaattgatgttcctactcttgttgtttttaaaaccaaaagaattgcatattcctgggaagctgttaagaggaagatgtgatatttctctgatccatttccacagtgaaggacgcgtttcacaaggggcatcctaaattcctaaaaatgatggcatcctttagagaattacggggtcatgggaatcaacaatcatcttcagatttcgtggaacacgtgttgtattaacagatccaatggccaaagcagttgatagtcactcaaactaccagaattaaagggaaaaaaacaaaacagaaacaaaatcagaacaatatcagattctatgctaactgactggaatatacttgctgtcaatttcagctaatgactctgaacaaacacatgccattctctattacaaatgcatatgcgccattctctagaactaatgcacagcaaatctgagcacccaatgacagtagtaaaacttagtactatataaatctgagcactgtttaacagaacattatcgaaacacaagaacagttaatttaggcaagacataaacaatagaaactttaggcagaacatacctcacaaaagcacccaatctcatgtatatcaaccctgtcaatacaagaaaaccaggtaagacaacatgctctgaaaattcgtgtgagctacttactacactgcagggcttgcgttgaaagctgaagatagcaatgttagccaaaactagcctaattaatagtgtgaaattagaagggtaggttagtttagtgttttgccgggtataaaggcttcaggttgggttaaattaggatgcttgttgggtggattaacacttaacagccgcaactttagaccttagacacgccacaaatttatcttgaagctaattgtctgtaatgctgataattgacaagcatgcatgtaccatcttgaatcgtcgatggagttcagaagaaggatggtgtttgacatacctagatgatgtagcagaagatgctcctcgtggttcttgttggagaagacccggtgtccggacagaggtgaccgaacagagaagtaattgccagcggatcttgcatggagggatggcagcaaaacataagcttcctcatccacacgagcagcgacggggagaagagtaaggggctcacctgatgtctgcactggggaagtcagtggcggccgcggatgtgtctacaagcggctgctccggcagatcagatgtgaggcggcggcggtgtctacagtgagaggaggcggcgacgcgagcggatgcggtggaaggcggcgacgcgagcggatgcggtgaaaggcggcggcgcaggaggatgcggtgggaggagccggcgcgcgacgggacgagaagagcggcacgggaggcaccggcgcgtgacgaggagagaggcggcgcctggttcttgcagccgtttgatcagggcatcgcctggacagcgtagattaccccaacgacggttgaagggtatttccgatcatttcaaccgttacaaccgtcattagaaggctataaaagaagccgtctctctctatttttccacacaccttaagcaaaaagcttcatttatctttcaagtttagtgtaggctctagagtatatagtggaatagaatcttcagtcctcgaagtcttcaaaagaattcgggtatagctttagtagcttttccttcttttgtaagaattgtacattatttagaatactcttctttgtactattttggtattgtactattttccgagtatatgaatatcagttttattatatatccgagtaatatttattatgatgctagcttatctgggagatggaatagtgtgggtataatgatcgtgtatacgatgactatgtcattacgatgatattagagtagtatttggtaatttaagcgtggtgtttagattactggatatcattatttgtggttatatgtcgcgca

SEQ ID NO: 42531 - DNA, 2231 bp, Oryza sativa
gtactccaggacgtcctccgcgatgctggccttggcctcgccgccgccgcccgccgcggcggcggcgtacttgtccctggtggccgagccgtcgtcgaggaggtcgacggcgtggttgtacgcgtggttgacgctgtggaggtacttgacgcgctcgttctgggacttgaccgcctgcgtgatctgggcctcctcgttgttcctcagcaggagggccagcttcttcagctgggatacctccatcagcatcaccaggtcgcctccgtcccccattggtgccgccatcttcgagcttggatcaacgattcagaggacctgcaccaaattaagaaattcatgttattactgctactaataatgattatccataaatgctagctttggatcgttggccatgtcagtcttacacttccaacaactgttcaagggaggtgagagcccgaaactatttgagtcgatctacatcaagatgctcccaggcgacgtctatttatagttttaggctgctgtgttcgtgagtcgcataaaacgaatcgtgagtggaagttgggaaactctctccccaaacacataaaacggatcaataagatttttctaaagcaacttaattttgtatagaaattttttgtaaaagaaaagtaccgtttaatagctcgggaagcgtgcacgtgataaacgaggaatctgagctgggaaagcaacacaaccttaattatgctggaccagcgagcgcaccgcaaagatatggttaaatggaagggtactattatttttttttaatttggcaactactaattatgtcccttaattaattatatatataaatcgagaaaattcattgtgctctgaaatttgcattatgtataaattagtttggtgcaggtctaattttggtatagcttgtccactatgtagaaatttcatttagttggtgccaaagttagttgctagaatgtatgttttaactgtaataataattgacaactcttaatggacgatcctagcaaggtaattctttttgttacgctagtgccatggccgtgcattctaatgggatccgaagtaataagaacgaagagttttcatcggccgggttccttttttatccgctttttctgataggtcttgaaaggactggtttcggcaggatgtgttttttaggtcgggtgattcgatttatgtggagaagtacattaatagagggaaggaggagaatgacttgtttttttgcagtgtagcagagttcaatataaagggtttgtttggtaagactttaacccctaaatttaacccctggaaaatagtttagagtggagttgctttacccttctagcttttttaatgactcaagtccgctccacacccattttgatagaactaaaaccgtttggttgggttcaaaagagctggagctatagtccgaccaaacaggaaagaaaacctaacgttggcaaaacatttaatttaactatgcctggaagaaaaataatttgaatttttttacgagaataaaatatatttgaaaggaatcgttttttaagattccatgaaatgtagatattttggttcttacattctggtaaagatatttttgttgtgatttgtttaatgtctctctcccaacctgaataaaagtgtttagattcatgaggacgacatctattatgggtctataagtgaccccgtaagagatgtttgtgtcgggtcctcttataggcccgtcacatatgagttcttacctgtgacgggccatcccttcgagcctcatctacaatgagttctagttcatgctagtattcttcctgttcatctacatcgtatcagatgtagaggccgggtttaatatccattatctggtttcagctgtcgcggtagaaaccaagaatatgaataaatatataaacatatatatgtttctctttttgtgaatggtgttagaataattgggctaggcccaacttatcctattaaatctcaaaggcccgtaataagtgttgaggataataataccacctcaggatttaagcgaggaatatctcaacctaaatagggagttattggaggctccctgttgaccagttgaggtggggatcagaatgccacacgctcgcgcgcgcgccgggccgaggccgtggccgaggcgttgctggcggcgtgcgtgcgtcacgtcgctatccttttgcagtcactaacccacgttctcacgattaccttcgtaacagcgcgttcac

SEQ ID NO: 42532 - DNA, 651 bp, Oryza sativa
atgctttctaacggtgtgttttcctaaaaaaattacataacttttttaaaaatattgttataaatcaattcttcaactttatgttagttaattcattcatttgtattcggaatatttatcacaaatctattttgtcattcaacataaaacaaaagcggtgaaggttgcgctttaccatgcaccgctatttagaggtatgcaaatgttataagaaaaggttaaaataaattcctttctttaaaggtgacaatatacctcttgcaaaaattcagtaactcaaaattcaatcagcatatgacagacagaacacaaatatttataggtgacagcataccttgcattatggaaacaaatactaaaaacgattatgataattaaaatggccgcctagggattttatggatattaaacaaatgctttcagttaatggtaaagtacatataagatgtatttacaacataatatcaatatatctaaaatatatgaaaaatgtttctaatataaaagtgatctaggcttttttttaaaatgtcttgaaaatgcttgtacatgttaattgtccctccctattttagagacgatttgcaggtttcttattgaaaaaaagtaactcggtatggttttttattaccgttaagcgtacaggctctc

SEQ ID NO: 42533 - DNA, 622 bp, Oryza sativa
gcggaggtggtgcgccgccgacaggagctggatccggagccggagctggtgcgccaggaggtgccgtgaacgacaataacaacggaggcaattctgcctcaccatccagcggagggctattctcggggtataatcttctcctcctgttcctattgttagcgctattcctattcccattgttagcgctatcgctatactatgtgcgctatgttctttgttcctgttcttcatgatgcctctagcatgttattgcgttactgttatgttcctgttcctgacattcatgatgcgcatagtatgatactggttatgttaagatcactctacactgcttatgccatgattattgctttaacattttggattaaaatatgccgattaatgactatatttccaacaatccaaaaacctgataggtcattttcggtagttggctttgctgtgctctgaaaccacatgcttttgatggttcaaactataagagatggaaagcacgtgcactattgtggttgacagcgatgcagtgcttctatgtttcacggggcaaacgaagtgaaccacctctttctcctgaggaagaggtaagttcgaggcttcggattgcctgttccgtggagcattg

SEQ ID NO: 42534 - DNA, 676 bp, Oryza sativa
tctcctctctgtccatttctcatcagttatctctttatccactctccctctctctctctcacatacacacatcctctctttctccatggcagcagagcatgacaggttgggctcacaattttttaaacataattttgcatagtctgccacaccagtgctcaagtgggttcgactgttttgcaccctatatgacacttcaagttcaagggcttaaatttacattttgcaaattcgtggacctagatgacacctgcctacaagtttaatgcaagcttgtatattttactctttttagtatgctggccaaacttgtgatgccttcaacttaatttgttctattacagatggaaatggtttcaagacaagtacaatgagacttggtgctgatgttttagttttctcccgtagtggtggaaaaggtggcaaaaggttaagttacacttcatcttgacaaacatttaaaaaaaatcattttagaagatgctgctaacatgatatgtttacaattccctaacaaccaaaatttctttggacagatgagctaccagaaagcctgtgtagttcatcaaacttgaaagcaccaaatgatatttgttcaatttagttagcaggtcaaattaatttccctggtgtaatgcatggtcaagaatttgatttaaatctatattgcatgacc

SEQ ID NO: 42535 - DNA, 675 bp, Oryza sativa
attttgggttgatgtgacatatcctagtactatgaatctggacaggttcgctgtacagatttgtagtgttagaatgtgtcacatccatctagaatcccttatattttgggacagatagagtatatagtttggatggtacatatataaggttgagcattcaatgtttaacatgaatgcaatagggcttattaacacagccgtgaaacattacatatataaccacctgctccttgattgctcttaaggtttaatatgtactggagaaatctaagatgcagtggcttattattagcaggcactgaaaaattatcaattaggcaattcagaaaaagaaaacaaaaaggatggcctgatctcttttattttagtcagtttgtgttggtactaattcagtttactgatctcctttacaactatgcaattgccttccactaactagcagacctatggctgccctacaatggggttccaacttgctacattccagtgaagcttttctagatattacaggcaaaattttagtttatttagaaaacaccaattatgcatgtattctaaaaaaaacactattaaggtgattatacaagagtattatgtgatgccaaacggatcatcaccatcttatctaactgttgactaagcaaatatcttatatgtcgagtaaaatagtacaat

SEQ ID NO: 42536 - DNA, 1399 bp, Oryza sativa
ttcctgcaccccagctggaaaatatactctaaggacatgagttgtgaagtgctgaaaaggaagtacctgagggatggtagaagtttctttagcagttcttcaattgggggttctcaattctggaagggacttcatgctggcaagaagtggctgcagttgttcatggagagaaaagtagggaatggaaaacataccttattttgggaggatgtgtggttagtgtcagagtatatggtagttagagtcatattaggataggattgatttgtgtggactccttccatatctgtaatccttccatatctcctcccatgtactcctatatatacctgccccctgaggctcaatacaatatgtccaatattcgcagtatcctctttccccatactatccaacatggtatcagagcgggcgatctagtcgcctctctctcacgcttccgctcatcgcccccgggagggtttcgatctcctgggggcggccacccgtttttcgtttttttttctcgtcgtgcttcgccgccgagatcgatctcgatctcctcggcatcgtcgagtcgtcttcgcgtcattgtgaagaagtcagtagcatcgtaccatccacatcgtcgtcgccgatctggagggcatggccgacctgatctccaccagcaccctgacgtcgccggtaggccgcgccgcccgctggtcgtcggcctcacctagggcaaggccgccccgacgccaccggcgccatcttcatcaagcttcgtccgggcgccggtgttgctatggtcgtcgcggtgtcgttggcgcggcacagagtacggggggacacatccctgccggttcctcctcggcggccgcctacgcctgcaggccgccgttcaccgtcgacgccccctccaccatccacgcaaccatctggcagtcgtcatctggaggtcgtcgtcgttgcggtcgaggtgcggtcgaggtgcggtcgcaaccatctggcagccgcacgccctccgccttcggtcgccggcctggctgacggggtgccgctttctgctgtccgccgggctgccggcctcggctgctcacctcgaggttgtctccttggctgcgccgacagcacgtctccaccagcgcctcccatccgttcgccggcctcaacgcccaccgcctggcgctctccctccccccgctctgtctctctcggagatggtggacgcgttgactgttcgtctgctccatgccaatgaagtgagagattggggatgagcaagttattcatgggctcaggactgtgtgaacttggtccatggaccatggaagacgtggagtttggcttctactgtggactactgcatgctactgtatcaatttttttttccgaacagagtttgggtttgcgtcgcccaccgcctcgtcgacat

SEQ ID NO: 42537 - DNA, 640 bp, Oryza sativa
atgcggtccataagtggaaccgcatggaaaaataggaggaccggcgctaggtcgtcgcccgcacgggaaaatcgatttttccgtgcgggcgtcctaatccaaccgcacgggttattcctccctcctttccctcccacccacttcaaaattttcctaactctctcttgctttttcccttttattccctctcaaccactcccctctctctctaccttatctcttcttttatcccgtcctctctctcagccactccctcaaccctctctctaccttatctcttctccctcaaccactccctcgaccggccggggtgaggtggcggcggtcgggcgaggcggccgccgggccgaggcggtggctgggcgaggcggcggtcgggcgcggcggcggcctgtgcgaggcggcggccggacacgacggcggccaggcgcggcgacaagcagtgaggcggccgtcaagacctcgctgagggcgccgaccgcatggccctcgccgtcgacgaccacgaggctgttgccgacgacttccgtggcgccaccatgaggtggcgcaagaccaaggcactcctagtgccaacgtcatcacctggtccccgcgcaacgctgagcgccgcaactaccgcctcaccttccaccaccgc

SEQ ID NO: 42538 - DNA, 674 bp, Oryza sativa
cacacttcaacgacatcaacaagactttggagataggctaatacgtgtcctagtgtttagtttacttttcaaatgcaatgcatacattgcatttaagtggaggtgttaaggatagtatgtctagaggtattttagacattttccaattccatagcaaaatccccaatttctcccctaaattaacacttatcaatgcaagttcgagccgtgaactagcgctcaggtatccgtgccggtaatcagacgaaccaacaccaatgggccagcccatttgtgctaatttagtgccaagaatggctctgatactcatgtattagtgccaagaatagcacattgcggtatgatcactatcgattgtaatgtgacgattaagaaatcaacattgatagccattatgaaccggcaccaatggcctgcccagtggtagtggacaaagaaaggttgaatgaattagaacaaaaatgattgggatgctgtccatattgcgtctgtcaactatctggtttctccaaaagaacacccaactatgaaactagctatcgttcactcatgaattatcaatacagatcaaattaatgtatcccactcagggcaatacaacctggtttgaacggtggttttcatgattttgatatccgaatggtgtatcttttaaattgtgtggtacctagttg

SEQ ID NO: 42539 - DNA, 1032 bp, Oryza sativa
acaaccatcggctaccgagccgattgcaagacgaccagcagtgattcctcagcctcacactcagcagccttcagggcagccgattggttctcatacaatcaggccacaatactgcatccaggagccaagaacattttcattttagcaagctccagggttcaaccaatttcaaactccaccaccacatcggcagtttgcttcaccattcattcaaaatccacttcagccgataggcaatcagtttgagcaagtccaaggggtcatccaacaacagcccttggctggcatgattgcaaatatggtgagagaacaatttggcatcaagccaaaagacagcggtatcatgtatcagaacccatatccagaatattttgataagatgccattgcccaactgatataagatcccagatttcttaaagttcttagggcaggatattgtttctacatacgagcacatcagccggttcctagcacagtgcggtgaagcatcggctgtagaagccctaagagttagtctttttcctttgtctttgtctggatcgacatttacttagttttcttcattaccatataattctatcaagtgctaggccgatctaaaaaagcagtttcacaagtacttcttcagcaacaaacaagagagaagcggacccgagaaaactctttgtattctcatttatgttaaaccttgaccaccagaacatggcttcttatgttcacacctcagctaggagggatgttcctagtataaatacctctctactctatccattagataactttatttcaattgtaaacctcatgtatgagagattgctgaagactgcataagtgtcttacccctttgttcttgtgagttcttttggacttgtgagaaggctcctctggtgctccctagtcttgctctacatcttccagttcggctgcaccgtattgtgtggattagtcccggattgtggttctgtgattgctcggtttgacgggttgaagtccaggaggcttcggatcgttcttaccctcaccacttcgt

SEQ ID NO: 42540 - DNA, 1325 bp, Oryza sativa
cgccgatggagagagagggagagggctccaggccgagaggagattgggcaaagagtgagaggacttttcctaattcggcccgaaaaggaaaagttgattttaattacttttctaattaaattaatcaccgaaataatctttgaattgctaaaaatattttcaatgctcaaataattcaataaaaattctgaaaataattgggcactcaaagtatttgataaaattaaaaccagatcatttaatgaataatttattatttaaataatttcttaaatgttctttgtattattaaacttaggaattgagctatgaaaaaatctgagaaaattccagagagtacaattaatcatggagaatttaataaaaattaagtccagccatgctttatatttaggaaattttagttcccacatttaacttcacttgtaaattaatgaaattttaatataaattctaagaataatatattaaataatttataaatcctgaaatggaaattcaggctatgacatatagatactatgtctatactatttaaatactactctaatgtcgatcaaacattaaattaaacactaattctagtgcacaatattccggtacgttaatggaactaagaaataaaccgcacaaagtaaatctcaattattcgataaagatattatatattaaagcaaagtaattgacaatgtacaaaaagaaaagaggaaagtaccgagaacttcagaattcctccaaccgggactactccgatcagactgatctacatcgaatttgagggtaaccttctattccgcaaaaagtttgggtttttggatataccaaccattcaaccccctctggttggcttagttattgtgtttcgatcctacagttaggagcatcaataccaatcacagccgccatagagaagttggtcatacctgtcatgggcggttgtacttgggctgggccaggccggagtctgccgaacccagaggtcgcctgacccctggccagctcccctggcagtgggcttcctcctaggccctgacaattgactccttggcccaatgatattctttgggcccagtttctagtatttcgatgagtttgcgggcccaagactcaatggatgaaattctcctccacttttatgtatatttcttctcaatgttggtagtttgtcacctgcatacaaatatacaccaacactcgtggaaattgatacaatcaaaccctatcactatgtggaatgttccataatttcatatttatgcaagtattggcggcacaaaattggtatttaacagctgccaacacatgtcgactctccaccgactgct

SEQ ID NO: 42541 - DNA, 1191 bp, Oryza sativa
aataattcaggaaacaagcacccttcagcaatcggcagctgactttttcaaaacactacatcttcatccagtcctataccagtatttggatcttcttacacttaagatgtcatatacagataggtaacgaaagaacttgttcatgtatggtccatgtcagaatagatgaaagcccatgaaattttagttaggagatcagaaacaaaaaaacatcaagcaagttatagataattatttttgactttattcttcaataatactagtatggcatggcatatctattgacacacaaaggccagaagtgaatttaagcgccatcctgacctacttgaaggcaggggcggatccaacttgggacatgggggctcagttgaacccccaaacttttgggggaatgaacaaactgtcacttgtattaaggttcaagtctctgaaattaagagaagggcttcttccagatctagaagagaagctagggttaacgaaacgcaagcaaattccaggcaaaagtagtcccggtgggagagagagatgaaccagaaagaggatgtggatgctcaccggatcccctcccctcccctcgcctgctctactcgccagatggagatcagcgaccctcccctcccctgctcgccggatggagatcggcgcgccctcccctcgcctgttcagccgcgagatggcgcaaggagcggaggagccgagacgccgagacgggagatttttgggctgtttggatgatttccatagtttaccaccaaatatagttagtaaattgtcgcatgccccatattgcagagatatttaactatttgctatttttataaatacttcctccgttttatattatataagaattttcagcattgcccatattcatatactatatgctaatgaaactagatatatatgtgtgcctagattcattaacatctatataagcctagattcattaacatctatataaatatggacaatgttagaaagtcttataactcgaaacggagggagtagtaattaagaatttaccactaaactaatatataccataaaggggcaattttgtttctgcccctattttaatgtctaatattgattttatacctacattttagtgttttcgtttttaccctcacctttttttttgaactgaatgcctgttttgctcctactttggatggtgaaattaac

SEQ ID NO: 42542 - DNA, 1666 bp, Oryza sativa
ttttaggggaaaagaaaaagagaagggaaccaagcacttcttttcttcttttcaggagacattaacttgtcatgtaactttttcatgtctcttattagtaattcctcagattttactgccagataaactactgaactttagaagcaaagacgtagggaatacaaggcaagttaaggatgctaaaacatactttcccatattgtttttttcgttttaggctcagttaataaaaaaactataattctaaataattttattgatggtaattggcttatttaataagttctttctaggagtattctttctaggttttcaacaatatctgcactatggagagtcgatatctgattctgttgaacctgcctcaaaggtggatttagactgggtgacatagcttaggcatgtcacataatatgaatccctcaaaggtgtttaggaacaagaaataaaatgggaatatgcagtgagtgtatccgggtactcacggcaaggtcttgggccttaaagcgtggggtgggccgagtgatctaggcccatacagactgcttgtaagttaagaaagggattaaagataaagctataaatcttatcccatataaataggtggcaggtactcgaattataagggctaccttaccatcactagctggccgacaccgtgattatataaggggcgcgggggaaacgctaaggattgatcattctcccgtatacacgctatcggctattcctacgctgatctgcgcacaccaatacagatctaatctacactgactggactaaggtattaccccgcgctgagggcctgaaccagtataaacaactatgccaccatctctacttaatcttgtgcaccctataaattatattgctaatcataagaatcgatagctggcatgctaaagtaggggtgcgcttgattatcatttcatgaggagatggcgtctttagtagttgtcttcgtctaagcggtagggcgaacctctccctccaacctctaaatatctttgtcggagcaatcggcagcatcccccttcccgatgacttccaaatccactcgggaatagtgggacttcaccaccgccaaggcatgatcaacgtccgaggtggccaccaccttcgacaaacatcgcacaacagtcggcccctctggaagaagtcgtcccacctacgcccacatgcccccctcctcgcgaaaacctaggaataacagttggagcgtcagcttcagggcatcaacaagttcaccccgcattgtcctggtggtctccacctcgtgttggaagtgctcccattgtgcctgattgccttgttgcactcctcccgctcggcaaccttgtaacaccctaaaaattttgaatttaaaatacgaaaacaaaaaaaatggaataatcaaaaatatttttcgaatttccctcatgctggattttttgtttcgaattcccttttcgccggtgccaaatcctaatttataaacataattgtctttttttcgcctcctttactcctttggagaaaattaccaagtctttaaaagaggttttccttgtttgtgaaaaggcctttgtcctaaaaagtctagcctaggtccctctcaccctaaccatctagctaggtcttttctgaaaaagtttattttacgtcccttgctacccaaccccttttt

SEQ ID NO: 42543 - DNA, 1846 bp, Oryza sativa
ggcgcgaggacgaaccgcgagcccgagcgccttcgaccggtacctctacgcccgtggctttgtcgtgacttcactcggtgtgccggtccccggctactgcacggtgagcatccatcctttcccttcccctcccttctccctcttggccgcattcctgccgtgccgccgccgccgtggcgctgtgccgcccgaagggcgaaccgccacaccggctccgtgctttgatcgccgccaaggttgaaaattttggaaattttggtcatttcggccacctccgatacgatataacttcggccgaaatttttcaattttttcatgaatttgggtaatatttgttcaaattcaactaaattttgctcaagattttggaaatttcgggccgaaatttcgggatttcggtgacccccaatcaaaaggactcaaccgatagagtgaaccctggtcgccgctcctaggcccctggaaccatctaccgcgctcgctcgccttgccaagtcccctggccgccggaccggccgcgctgcagaaacgcatgcgcgcgccgtgcattggggcgtggtcttcaccggccgaccgtacagatcgtcatgtttcacctttatatatatttcttgtaagctgccgtgtggtgctttgtaaccacatccgatatagtgaagttttctggctggcgctaaccatcatgctcctgagggacccggaagcccgccgccggccttagcctcccctctccttcaccgcttcgctggtgcgcctaggatccgcaggctgctgccgcctcggtccccaccagccctcgcgccgccgcctaacgacggcggatcccccaagatcttccccccaccggccgccaccacttccaagccgctcaccaccggtacaagcaagccctagcgccggcagcccatgctcgcgcgcttgagagggagagcagcgagaagagagaagaaagaaataaagaagagagagaggctgacagtgggcccaccatgaaaaagttttattttttaaaactagtgaaggagattaagttagctaagtgactaatatattaggctgacatgtgggtcccgtcttctaatgaaaaagtgtttaaaaacatgtttaaaacttgacaaattaccatgtctttttttttcttcaaaatagtttcatttttaatagtaaattccaagttatagtaaccacacactttaacagcacttagctatatacattttggtatatatagaagtttcctaaaactacactaacaacccgcgagatggcgtgtaagagagacacataagctctgtcctttgggactaattagagagagagagagagagaataagttcgattgatgcttctgcttcacttcgagggtcttccaccggccagcctgtttatcttcttgcaccattcaccgagctccccaagtgcagggcacaagtcgcggcgcgtgcacttccatcatctgcccaaatggattatgactgccatttttcttaactccctccaattcatattatatcatatttcgacttaacttctttaattttataacatttataaaactaaattaattttattaaatctaacatagaatatattttggccataagtttgttttgtgttgaacaacaaagctctcgtgcgcattcaacatagcaagcctatgaatacttgatgttgctgtaatcaagttcctggtgtttgtgacatgccaaggcaagactgaggacctggatgattgtgattccagatatcctagtggacctactcctaagtgatttccaagcaattggacttgtcctcacacaaagcagagtagtgaagattaaaaccggcctttttgttttgaaag

SEQ ID NO: 42544 - DNA, 1379 bp, Oryza sativa
tcctgcagccctttccttttaatgtcccggaacctctgtaggctgatcaaccatactggcccttaaattctagagcccctcagttataccacctctgtttctttattatataccgtcgtttttagatagtcacgtaaagaaaaaataggtgcaccctagctatcgttggatttttagagggtccgtatgtcatccatgcaaccccgttctgcatggatgatacgtggaccctctaaaaatctaatgaagagctccacttggcttgatgtgtgtgacgctccttttgactccctctaggaggctcactccgaattccagagagtgcaggcactacttgaaaaagggctaaaggtgccggttcctaaagtgccatatgtgccggattttcatccgacaccaattggtcgacaccaataaaagcaaccaacacctataataaaaatagaaccggcacctttaccattattcaagccaaaaaaaaaggaagagagctggctcgaatccgagccgaactcaccaaaccccaaaatcatcacccaaataaaattgatatcccaaccccaaaatcatcaacaaatcatcacagaatgaacattaacatcacaaaatgaacatattcaacaacaaatttacacaaacatcacaggggagggcgccgtcgcaacccgtcgcccgccgccgcaactcgccgcccaccgcctgcggcctcccctcttgccagatctggcggaggggagggcgccgccgcaacccgccgcccgccgcctgctgcctcccctcccaccaaatccggcggagggaagggtgccaccgctgcccgccacctgccgtcacccctcccgccggatccggcggagtggatggtgccgccgcaacccttcgaccgccgccgcctcctttcttgcgccgccgccggccgcccgccgctcgccacctcccgtcttgtgccgccgcctgccgcctcccctccagccggattcggcggaggggagggcgcggccgccgcggttgccgcctccgtcgagccgccgcccgggcaccgccgtgcgcgcgagagagatagagacgagagagctgagagagagagaggcgagagagatagagatgggagaggcgagaggataacgttgacttggctgcgtcggctcatataggatgtgtcggcttggcagctcggctcagattggataggtgccggttattataaaaaaccgaggtgctggtttttaattaaccgacacctataacatatcaaaggtgctggttttttttaaaaaaaccgacatatactataggtgtcggtttttctttagaaccggcagctatagttatttaaaggtgtcggttttacgtgtttctagcctgcggggctgcaggaa

SEQ ID NO: 42545 - DNA, 1586 bp, Oryza sativa
tttttttatagtgaggggatcgtgctgggagaagggaaagaaggcgaggcatcaacctctctccccgcctcgatgtagatggcgatggcggcatccgcggttctcgccgcatcgtcctttctgctcgctctagtgttgtggatttggagggcattgcctctcgaaagtcaaaggtacatctcactgagaaaatcactgtcttgttattcgccggaatgttgccagccactcttcctcccatagatctaccaatgattaccagcaaatcatgcgtggtctaaacgatgtttgcctaatcatgcctccaatgatttccactcaaacaatacactgcctatcacaaaatttagcattgtgtttgttttgtctgcttcctccaagaaccagaactatccacaaccaagacgagccactactacaaaacatcaaataggtgtcaccactataggtgtcgtagtgctaaaaccggcatctataggtctttttccacctctgcgggctgaaatcgtaaaaaaccagcaccttttagtaattatatgtgtcggttctaagtaaaaacatggcacctattatattttttgtcagtttttaaaaaaaccggcacctataacttgttataggtgctctggcacctaccaattgagccgagccagcaggccccaccactagcattgagagataaggtcgaggagatagcgtagaggagccggtgggccctaccactctcgtctcctctcccgttctctccattctttccgctctctctcccctttctatctcgctcgtggcagctggaggggcagcgtgcggcggcatcagcggcatcagcggtgtgcggcaggaggagcggcggcgggctcgccaacgggaggtggcgcgactgctcgaagaggtgtgaatcccttctctcttttttttattgcataaatttgagtccaaattttgtgttgtggatgaatgttggatgaatggatagtgatatagatgcggatgtgcttgctgtgatgaatgttcttattcatcttgttcttgatgaatgtgatgcagatgtgcttgttcattcttgttcttgatgagttgttcttgatgagtagagtagtcgagggactgctcggctcgatgcatcggcttgagccggcttttttttatttattgaacctaaaaggtgacggttgacctatgacattttcaaatcagcgccgcctcctttgtgccggttgggaaaaccggcacctaatggggtttcccaaccgacacaaatctgtgtttctgtagtagtgagccacgtatgggcaatgctagaaagtcttataataagataaaatatgttctttttataaaatgaggcaaaatagaatgcttgaattatttttgcaggagattatgcaattaaatgagcaggaactcatagccacaaccgtgtaaactctgtactcctatgaattattcaagtaaaaacatgccggtatcaatagataccacctccgtttcagtttataagactttctagcattgcccatattcatgttaatgaatatatatgtctagattcattaatatatatatgaacatgggtaatgctaaaa

SEQ ID NO: 42546 - DNA, 747 bp, Oryza sativa
tggtgctggtctcgtggagcttcccggctcgcgtgctttctgctggaagcttcttgaaggccagctcccgaagccttattgcttgatcttgggtttgtacggcagtacaggaatataatccaacggtttatattacttgccgcatgcattggacggtgtttaatttgtagcttacgtgggtcaatcaggttttgagaaagtttactactttcaatacgttagatacccctggaaaaacttatcccaaaaatgattctttttgacgctagagtggctggcgccgttgtctaatgacacggcgctaggattcgttgttcccccactaccgtggcacacgcgaaccgacgtggcaggaggagggcaccagcatggcaggcgcaacccccccccccacccctcgtctccaatcttgttctatctatggagttgcaacctttttattttagttttatttttttggatattttttcacacttaggatcacgcagtaaccaaccacgaaaaatttaaactcgaacggacgaaatatgtggccttaagaattttcaaatagatatgttttggatatattatgtgaacacattagctcaccttagagaaaaccctttggtcaacatgttaaacatgcattctaccactagatgaaattgcttaattaatctaattcgaaatataaccatatgaaatatgaaatgatagccataatttacttaaacaatattttacagcagtcaataggttaactag

SEQ ID NO: 42547 - DNA, 1223 bp, Oryza sativa
aaaagaaaaaaaaagaaaaagcggcgtcaggacgacggatcggcgcctcggcggcggctgcggttgatacggaggagatcgcggcagcggttgagacttgagaggaaggcggacggatcaagacaccgctcggccgttttcttttcgctgattccggatcgcatcgatcgagtcgcgcgacggtggtgtgcggactgcggaggaggagcgcgtagttccgattttctgatccacacatgtgcttacatgcaaaaatttcgcgattcccagcgacacgaaatattaacagaattcatttggtttagataagccatacgcgtgcgacggcgccgaatctatccaccaagataattaaactaatctccagattatttctcatccaagcctgcttccctcctctataaattgactccaccccggccgaggtttcctcacccatctcatcaacgccttcttgctctctatctctctctttttcggcatccttcttagtattggcaaaagctcgttgtcgtgctccggccatgaagacgacgatggcggcggcggcgacctgcctcgtggcgctgctggtggtggtgctcgcggaggcggccggcgtgggctgcaccaccgtcgcctacaatgaccgcagcctggtgatcgacggcgagcggcgcatcatcatttcaggatctatccattacccgaggagcaccccggaggtataatgaaaattagctatggatatattgatcgctatgcgcatgcatgcatgcatgcaaaaatacgtgtgattgtggtaggtcttagccgtcttttgatattgcatgtacatgagatgagattagtacgtgcgattttggttttgttcttcatatatatgctatacaccaatctcaaaggatcgcataaaatctaacagtagccgtcatttatatctactgtaattatttcttatagatcacatttatatctactctagatgtctacaaatttatattctctcagtttttctagtcatacacccgcgcacatcattattctttttttcaccagttgcttggctcataacatcgttatacatatggtcgaatatgactaacagtacgtatttacttaagtagattaatcttcgcatcatactttcacagtacgtataatatcctactagcgatcgatcgactatgatagaatatatgactaacagtacgtatttacttaattagatgaatcttcgcatc

SEQ ID NO: 42548 - DNA, 699 bp, Oryza sativa
tgcacccccagcaattgtttcagttatattctgaactcagaacatgacatcacagactgatattcaaggagctaaatctaattacaactgatattccaggtttcacaaggcctgttcttcaggtgcattgctatctagaatcagagtttatacgcgaaacaaagagatgtacaccatgttttttatccaatgcaggtttctggagccccaaattaggggctgagcagcatgtacaatgttgattgattactgtcaagctaccaaggacacaaatttctctgcaactccacccaaaaatacagtttcaagatcatttcccgtcagctaaggcacctaaaattctctctcaagctagacgcaatgacgcattgttcgccggagggcatctcggtcgacggcagcgcctggttgttcttccccacccagttatgccgagagcattagcgtccaagtcagctgggggaggaggtggcggcgctggagctggaggtgggcttacctcaacttcctcaacagcgatagccacgcttcttgctcggcgcctccccctggactgcgatccgtttcgacctccccgcttcgatggcgttgaccttccaagggtgtgaagatcctctgacacctcgtgcttcgacagcgaagcgaggtttggtagaatgtccttctggaaatctttcttctggggacgctttcgtgctc

SEQ ID NO: 42549 - DNA, 588 bp, Oryza sativa
cggaaaacgagagagatgagttgggaaaaccgtgataagaacacattgtagtgacccagctaaccgtcctgaataacaagtaaagtagagtactgtcctgcatcagaatcgctttgattaacagaagaaaaactgttggttatacggagcttataggacacaaaacctgcaattgctgcacaagtgcacatgtgctttggaagaattaatttaagcacacataatttttttaacatgatgagaattctcttgcacgtgaagaagatagttggatgtagtgtactactagctgatagctgcattcaatgcaatgcaattcaactaccgcattatatctgaatatcatgggggtatctgacttgactattgacctaccataagcaataacatgcgtagtatacaatgttgcatcatatatagaatcatagtacagatgcaacttaattaactgaattataattaagctaataatgcgaaattcaacccatagaattgattgtacttgcgcacgaataaatagttttaatatttgttcatcttaattttcaggaacgacatggcaaatgtataatttgcctgttataatgc

SEQ ID NO: 42550 - DNA, 3095 bp, Oryza sativa
  unsure (1)..(3095): unsure at all n locations
attcctgcagccctaaaggaaatatttggatggactcaaaaggattgtaaaggaaatatgacaacatagtatatcaataggcctaaggagattagtagaattgttgatggcagcagcaagcaaacatagcaaatgtagaagaaaaaagtagatctgttgatggaatacgattagaggctaacaaatcaacactactctttgtgggtaggactgtgagactgagaccctagatgcttcatccaaatcatggcatatcaatggaagagaaccatttcgaactaaaggttgaagatcatctactaatcaagaagccaatttcaattagaaatatcccaagtaatccactggtttatgctattgctgtgttgcagcacatgatagaagcatgatgcgggaggttttagaacttgtgccaactgatcttaggtataaatcaaggagctagcagtgcacaaaatgatgatgagcaatcaagcttatagcatggcaatctgatactagcaaaatataggataggaaacaaaggatgttgatgatagtgcacaaaatggagttccaggacaacaagcagaggctcaaactgaagcctaaatgcaacagatccacttagatttggtgagaatgtagaagaaagcagaggagtttcctcagctgcttgaggatgaaatggatcaagatgacttgctgctgctgacacatgctgctgcaagtctgcaactagctcaatggctgctgcttcttaatgatttgctgcttgaagacgacgaaagcagggctgctgctgttggtttgcttgacgaatactgcgagtggtgatgaaaggacgagaccagtgattgaggcggcgaggctgcgacggccgacgacgacggtttgcccgccggcagaggatacggcggccgcgactagcggtgggatgaggtagtcaatgtctagacgatctgctgctggctgctgctactggctgctacttgaagatgaatgggacgatgacgagaagctaatgcatcttgacagagctgacggcttgatggtgtggctgcctgcggcggcgtccgccgccggcgcaccggggaggacgtcggattgaggctagggttaggatctctgctctgataccatgtcaaaatcagtgagtgaattggggatttaactatttattcattgagttggcccttagggctaatatgagatgaatacaacgtgaaaagacagaaataccccttaacacatacacactaatacatatatattcttaacagtgaaaacatgattgagtccttttgtttccatctttttttaaaagaacaatactgggaattacatggtcagctttacagtgctctttgatctataggcattagaagatgttgtttcggttgaccttgcaatggctcgaaaccatgactcttcagttgggaaaagacgtctaaatcgaggctttgcatttgtgcgattttcttctcatgcagtaagtcttattccttatttttgttaattccatcacccattggattctacgatggaaatgttgaccttatattattgatggttatacttaaacctcctttaatcattcattttctgtttgatttatctttttctttacatttaagtgcagtaattcagctttcctttgtcatattttgttgcgccaaacttagctatgcctttttatcattattttcttaattccaagtttacttatagtttaccaaacccttgccaattggtttatcttgcaggtattgaccaatatatagcctcttgtcttaaaacaatctttattggataaaaccatctgactgaaatatagggatatgtantaaagtagcttctttctcttctcctggattcctgatgaatgattctatccttttgtggtgtgccttaaatctatctgctacaaaagaagcgcattatcaagtaattgcatatctaagtaattttgtctcctttatgagatgaggggccagatgatggtgcattgtcacaatgttaccaacatatccttatcatctactgacaagaaaatcaatccatatcttttactcagtgttggttatgacgtaatggaatgcacttttatcatctgatcttttaaatgactgattggtgttgcaaagggcatcttctatggttagttttcatatggaaatggaaacattgcattgttgatttgtgtaaccatgaaaaagaaaacaaatagttttatacttctgaaggagtcgatcatattcaatatcccctagaatcaattgttgggcacacttgttaagaaaaagaagtatagactggtattatattgcttgccagattttctataattccatctcatgcatattctatctcacatccatccccaatcttcacaaggattctgtccgttactgaaattcatttacaaatcataggataaagctatggtgattattggtgagctttcatttttatgtgaatccataacctcccttattcaatagatggcccatagtgacaatttctatatctggtgaggcaatttcatgggattatagtttaacaagatgagcgaaagaatatctgtctgctctccttttctgatctgcaacattctgaagttttctgttagtaaagaaaatctcaatttatggggtcacagtcaccttggcaattttagtgacaccaagtttgttggctcctggtaccttaagttctgaactatccatttctagtggcctaactccaattcatgctactatagctatactactctttttttatcatatacgcttttctcattagcaatggtatgcaaaactacataacaattttctcctgataccagttctgtaggatttgtcatgtcacttttgtagaggaaggacttaggaatcttatgtttagcatatccagttgaagaggtggtttcaccaaaatccagtaaaactatttaacttcatgaaagtttttttattcttcattttgtccagagatcaaatactttgcctctaagatctgatcattatcttttgacagtatatataaagttcatgggatttgcatcccttgatgaatgtttttactgccttagttgctattgtatttatccagaa

SEQ ID NO: 42551 - DNA, 1290 bp, Oryza sativa
ctgcaccccatacactcacagtcacagagatcaaaaaaaggacacagtgtagtgtactggaccctggtgatgcatgcatgcctataagcttatgggattcagtaagatttttgtcatgatcgcgagacaccttcaccggtgcgtggtctgcacgttaaatgaaaccctctgtgtgtatcgtagcagtaataaatccatccctccattatttcatcctctcgagcaatgaaatgaattgcatcagcctagctgcgcacaagcttgagctaccgcccgagtttattgaaccattgtccattttcatatattaattatgctacctctataacatcgtttgttctaattttttagacagacgtttaacaatttatcttatttaagaatttacgtaattataaatttttttcagatgaatgattaaatacgtgtctaaaagttaacggtgtcatctattaaaataagataaaatatataggtttatttggggggttttctgggctgttgataagaggatctaatttctatcccagcctattaataagattgctagtttggcatagggtatgggtacaactgtgtgtttttaaggctgctttcgggaggaggggttcccaacccctcctccccggcacgcaaaacgaagcacacgttattacataattaattaagtattatgtattttttttaaaaaaggattaatttaattttttaagcaactttcatatagaaactttttgtaaaaaaacgcaccgtttagcagtttgaaaagcgtgcgcgcggaaaacgagggaggagggttgggaacttggagataagaacagatccttaatgtctttccatttcataggttgaattattggatgcaatttattctttctatatgtgtcgccatattttgctgtatcgcgttgttactttctccgatctctgccggccctacgcaccaagcaacttccaacgtctctatcgtggtctctccgctcataagtcctctccaacatcgccttgtgtcgtctttgttggtaaacgggcgcgtctcaccgctttaccataccatcaacgctttcaagccgcttgccggtgccctaaccgactccagagagttcgtcctctgcctatcctctccttttctccctctaaaaaaatatcatcttggattcattgtctcctaactaatctatttgtgcatcactatttctgtaatctcatatcttttatcaaacctatcattttaaatcccaatatatagtctaagacatcccttcaaataagtaagtagaagtctagagt

SEQ ID NO: 42552 - DNA, 736 bp, Oryza sativa
agccattctgtctgacctatctaacatctgtgcttcatatttcctttgttcacacttcttttccttgtttttcaaagaatgtacgacatgtcgatctattagcactttgcagtcccatgatctcacatgcacatgttgctgctttcattacccctgtctatcccaattccatttcctagttttgttggatcaacattgaggctgagccagagtaccaggataatgtaatttgttccgagtaggagtttgtaaccacattccaatttatattgtgaacagctgttctttgcttaatattttgttagaatattagtttgtcaaaacttccagaccaaaatccacatgttagcattctaaattcttggacttgttctcttttttggtcagactggggcatcgaagaatttgaagaattgattcgcaaggtaagacctgtagcgccttgctttgagaaaaatataaggacctttagcgcctttataggtcattggggaatgctctaccagcgttgatgtgaatgtcaaaatcagtgagtgaattggggatttaactatttattcattgagttggcccttagggctaatatgagatgaatacaacgtgaaaagacagaaataccccttaacacatacacactaatacatatatattcttaacacccctactcaaatgcaatgtatatgcaacattgcatttgaaactaaatactagattaatgacacaggggtgcaggaat

SEQ ID NO: 42553 - DNA, 1015 bp, Oryza sativa
tgaccaaggaagtgcaagtgcagtacctcctcaagaggctggattgagttttgagccccaactatcctttgcctgtccatctacaagatgctctctctctccagtttcagttctgaacttgaataattaggcccttatgttttgttttaccagatactgctttgagttcagttttagtttcagtagtttgcagtttagtatcttcatgtaatcctgtagttgaaagttcagttctcagcagagcatttggtactgaattgcaacttgaatggaggttgtctgaattgaaaagccaagatttgagctatttctatggtgaaacatgatcttgttgtcaaatgcttatctttgatctgctcctgtctctttactagcttgtcaaaactatttctcttttcattctttgcttggcctttgcctgtcttatctcaagatattcaccagtttcagttctgaactgtggacagcagcttacaactcaaataattaggcccttgttttgtttctcaggttgtgttgcagttcagctttactttcagtaattgcagtctggtaccttcatgtaatcatgtagttgcagttcagttttcagtagaacatcaagtgattgcaactttactgaattacaacctgaactgtgagcatctgaactgaaactcaagattttagcccatgctttgtttgatctgctactagtctccttatacttgatattttcattgctttgtcagtgtcaacatttggtctacttatactttatgtttatgtcctggaactctgctaaaacctactactggtttaggacatcttaaacttggccagtttatgtgaacagaaaagcctagaattggcaaaggatttcagtaaaaatttgtctcacaatccattttctgacactagttgcttgtcctgccttgttaggcaaaaactaccacactagcaatctagcattgtatacctaacccagaatattccaagagaatgaactcagacaaaatataaaatttagtaatgt

SEQ ID NO: 42554 - DNA, 1888 bp, Oryza sativa
ggttcttaaatagctagaggttgaagaaactgcgtaattgagccccctaattttttttgttcctggatccgcccctgctaataattggactgatggctgccactcgcggtatatgtcatgtgggccctcatgtgtctatgacatgtgggttcggtggtaaattcttaattactatttgtaagagtgacaaatagttaaatatcttgtttaattaagcaggtcgctatcagaggcagaaatgcataagcgggtgcagataaacaaacactaggcttgcatgcaagagctgttggtcttgttgtgagaatcacatgatggtgacatgccaaattgtcaatgggagagagagagagagagagagagagagagagagagagaggagttgggttggatggaggtcggtggtttagttgagcagatgccatctaattttgcttgtcaaccatatcagagatgggggcccttcaattttgcgtggacccgtttcatgcaccatgggaggtgtagagtactaaatcccaacaaaatgacatggtgttgcctttggtgaaaacgaaagtggcttcaatattttgtaggttcgaaatgaaatctcaagtgattatctatttctacttttggtccaatagttattgatggatcaatcttgtaaattgatatatcaattatgacaaaaaaaaatgtctctatgccgattggacccattatctaaaaatgtgtgacacgtcatagttgacaacaaccaaacaataattttggtccctaaaacataattaacaacaaattattaaataagaataatattaaacatacaaaattcattaacatgaaaactagtagctagactagaaaacataacccatcctaaagttgcattgtaactatggtgtagtcttattatcgctcttttctttttattattttttcataagtacgatttctggttgagtaacaatgtgttggtagtgtggcatgacttggtttcatttgcacggtaaaggaaacgaacttctagagaaaccaatactcctatcagtactaccactatatagatgacaaacgctagctagatcagcacacaaaacatggatcgagaaagtcaggtgccaacggagaaagcaaagtcatgcgcggatctcaacgtaaatccaacgaacataacaccgactactttttttttagctaaaaatttattaagaaagccgaaactctaacaaagttggcaacaattttagaaggcaaaaacatagaagggaagccatggaaaaaccatcctcggtggtccatggaccgggtgcaccccaaaccacctctgcatctccattctccaccttcctcggttccaaattccacctgcatcgctactccaactcatcatcagcagcagcaaaagccagccagcgacctctccattctctccaaatctctctcgctttccatctccattttcctcgcaatcattccgttcagttatatctgctcgttgctcgttgattcgctcgctttctgtccctgcgatctgtcgccgccgtcgttttgccggcgagaacggcggctagggaggcggcggcggtgagtctttgggtttcttgcccgctgtgtgtgtgttgttcttgtgttcatcaagtactcaaagtttcgggggttatttttttctttttactgatgagatggtgttgatatgatagcactgtttgatcacgatttgattgaatcaattagtaattgattattagttatcactatgttttatgtatcctggaatcttggaatggatcgcttcgttttattgattactgagcgagatttattatgttttgaggactggatttatcatgccattcactcattaattatctgattaacttgcatgtcctgctgatgaatt

SEQ ID NO: 42555 - DNA, 505 bp, Oryza sativa
aactatgtgaatgaatggtggcatatggatagaggtggatgtacagtttcagagttttactgtagagaatcttccataattcgcacatgatcacaaagatcagtccatatgtgatgaggatattgtcaagtgaggcactagaccaatgataggggtttaccctacccatgcatatccagcttgcacccattaaatccaattaaatgatgagccgtttgattgactaaaattttttgtttctttgcaaatttaactgatctaaatcttttcattggtgtgattgaaaagatgtctccgttgtctttattccattgcaatggtacatttgaaccaatcagcacttaaaacctccatcatgttccaattactccaattctactcccatcagttctttttgacaatatatggaatttaattcctgctcataacatagtatgtccgtttttgcaatgaattatgcacaaaattatattctatgtatgagtatagagtacattactcaagg

SEQ ID NO: 42556 - DNA, 2824 bp, Oryza sativa
acattcaatttaaacagaccacgtagttaatttttaactcagcgatctaccaccccgccacccccacgtgaactcgatttggtgcaagctacacagttaactgttaactcaaccacccacccccacgcgcaagttaaattttaactcagcgacccacaacccaacccttcccccacacgcactcgatctagtgcataccacacagttaaattttaactcagctgcccacaacccacgcgtactcgatctagtgcataccacacagttaaattttaactcaacatactgactctatcttgtatatatattacggattcccatcttagaaatcgtctacccactctttcctcttcctctccatattttacggatcaacgatgacttgtggttccttgtgcagagaggaggaacggcgatggcgattaggggatgaggagtggcggcgaggcagttccggtgatggcttggcgacgaggaggaccggtggcagtttggggatgaggaggaccagcatcaaggaggagcggcggatctgatggcgttgaggtgcgtggacgggcgcgatagtggtgcggtatcgacgggtgactgtgggcgagaggcgatgcggcggtggatccggctgccgctctgcgccccatgcacatggatccagctacagcggcgcggatccagcgcggttgcgggcggcgcgtccgcggatccggcgcccccttcctcccgcatggatcctgcacgggtgaagactatgggcaggaggcaagatggcggcaaccttcgcggcggtgagcttgtcctccggcatccatggagcagcggcgggcatccatggagacggcggcaccgagcatgcctctctccgagttttccattttcatcttcttcaccggcagaaggagtggccaccgcccgttgtttccgttctcaatctggaaaccaccgagagccacctttatttccattcaacggatccagaaggagaagaaagctgctaggatcaacaacacaatcaatcaattatttttcctgattttggttggacgttgtcctgttatttgatctcaccgatgtgttattgcattatttgtgtgtaattagtttctaatacatgtgattcctatatgattagatgcatccggacatcttgcaaaaaaattgcaatctacatatcagtatattgacaattaaaaaagtactatatgtaatgtttggagtaaaatatttactatttgtaatttgtcagtaaaagtaaccaaatgatgtactatagttgaatctgaccatacctaaaagaaacagaaattccgttccctgtggagagaaaactaaatttaggtgtacaagcattattttcggatcaaggactctgttcattatccaccaggaccacaacaacaggatgtatcgcatgaaatgatttcgcagcttatggaattaacgccaaatcaatgcacgctatgatttcgcagtttctggaccaacggatccggcgacatggagttgagttctatccggtgaattaatcattagttaatttctatcgacgtaatttccggggagatgtgcatcaaaacaataaaattctaataataaagtgtgaattacgtcacacatcgccatcaccgcctaatttctcaaagtttttcatctactcgtaccagtttacaataagttaaaatttaactcatattccttgtcatcagaaacaacacacatccatgtctagatttagtgtattcgtttatcacagagctagacatttagtgtcttcatttatcataaaactacatatttagtgtctccattatcacaaaactatatttttttaataatgctaaaacctgtagatttgtgataatgaagatactaaacttgtagttttgtgataaatgaagatattaaatctgtagttttgtaaaacaagttcctaaatctgtagttttgtgatatattgtgcaaagtacctgcagttttgtgataaacgaagacattgaatgttttgtgaaacaagttcttaaatctgtacttttgtgatagatcgtgcaaagtatatgtagttttatgaaatttaatcatgataaatctagtaacataaatattatatgattgatctttttaacttttttatattaacagtcaaagttaaaaatgtttgacctaacactatgctaaaaatgcttatattttgggacggatatagtagttaactattattagggtatttattatttactccatgtgtctcaaaataaattaatccctcgcattaagaaaataaaataaaataatattctttatttggataagtaatggatattgaaggataaaacttctccattcgaggaccaggtaagaagttatcaattactaaagccctgtttagatcccgccacaaaatttttcaccctgtcaaatcgaacgtttgaacatttgcatgaagtattaaatataggctaaaaaactaattgcatagtttgcgactaatttacgagatgaatcttttaaacctaatcgctccatgatctcaatgtgatcctacagtaaacatttgctaatgatggattaattaggcttaataaattcgtctcagagtttacaagtggaatctataatttgttttttttttgcccgaacaccccatgcaacaccatatataatacccgacatgacacgccaaaactttacacccctgaatctaaacacccctaatttattttgcaaaatagtttaaaatatatgagttgatttattttgggtagaggagtagtaattaacctgttaatttagtttaatttattgactaataggatctgcaaccggctgt

SEQ ID NO: 42557 - DNA, 674 bp, Oryza sativa
agcccactaatcaccctatctaattaattaaaccactggagatttcgaatgattttgcccagctaataattgggaatgttgcattatatgattaatcccattttgtgtgtgtgctctccgtttgtcgttagtagagataacatataattgcggcttatttgcagacatgcaccatagtactctaggccaaattattgtggtatctctcacaacctaggagtagtatatagctatattaattcattaaaacaaactatattatgtcccgcaggaaaaaaatagttatacagctatatatatatgtcactctcaaattatttatggatggactaataagattgagattaattgagatgtgttagtttcctttaattattttcaccttctgacatagatggtgctgactaggtggcactgtggatcatgcatcacgttaatattgatccaagctaggttaaagctatactagatatatgttacctaaaatcgtgaagatttgtgtatggaccaaccattgatctggtccattaattcaatctagatgatcacttttactttaaatcatagctaattagcccatctagaaaaatacagtatttctatatatatctttcatatttttgagttttgacaagcacaatgcatggatgacaacacactccaccaaattccaa

SEQ ID NO: 42558 - DNA, 679 bp, Oryza sativa
atttgattaaaatttagcaaacatatatttaactgtatactttttaggcataaagcgtaagattatatttatatgacaaatagacaagcaaaaaaaagttgcagctccttaatattatagatattaatctttccaaaaattcatatttatagatacataaccaaatagaaaattcaaatggacccaattaacggcaataaaaagactcttacacattaatattagcctttagcctataattcaaaaacctacatatatcatccgaatgtgatgcatcacactaatctcgctgagctatcatacacggttgaataaccaaggtcggcatatcttctctgttctagcatgacgaagcatcaaccagggacgaaaatcatgtgtggggtaacttgggcttaagcccccactcgtgacaaataatttcaatgcgaaaataccaaattttagatacagtttcagtgaaaattttaaaacagcatggttcatccctactctcaatgaaatcttgcctctgcccctggcatcaaccaaatctagatagacacaaaattcatatcattgtaaaccgctcgaatgctcctagtccctaaagaaaatgaaaatgaaaaaccgatgaatacacatttcccctttcgcctcgcatttccggttcaaaccgggcacgcgggagcgaatgggc

SEQ ID NO: 42559 - DNA, 741 bp, Oryza sativa
cacaatctcaaatttatccattttttagaaaaaaaatacaacatgtcgtaggaacattcttttttttttctcatatgtaaaatcagctaactatacatccatattaaatccttatcatcctcaaaatcgattcatatcatacagccggcaaattgaacaaaatgccatcctccttcacatgttcgaggccattggaattgacgagtaggagcaagtttaatagtgtagacaactacgaactccaaatcatgtatagtcaattttcatatactcctatagttacctataaaaatatactacactattaatacctaatcctgtcatgcacacattacatctctgagtttgtgctacagctggctagtaccttcgtcccaaaataattagcatatattaaggtttgagaagaaagactatgatgcccctcattaaatggtgtttatatgagagtgggaggatggttgagagtaaaatagggagaaatttgaatgggagatgattgatggggcaattagtactctagaattgtaattattttaggacgaattttgaatcctagaaatacaattatttggaacggagatagtataaatttgtaatacgctgctcttctatctcctctttcatcttctaaacatgtgtctatcgttggcttacagtttatacatgctctaatgttacacacaaaagtacgaaacgaggggcaaatatgtaattttggggaggtgtaccgggtgtcgg

SEQ ID NO: 42560 - DNA, 532 bp, Oryza sativa
aatggaatgtatttaattaattggtttatgcatcttctttaagcaagacgagcggccaaagtttgaagatgaatacttcctccgttccatattataaattattttgaattttttttctagtcggacttttttaagtttaatcaaatttataaaaagaattagcaacatataaaacatctaattagtttcattgaatctaatatttaatatatattttttataaatttgatcacttaaagaagttcaactaaacaatcaaaataacttataataatatgagacaaatagagtagtacccatctaaaaagtacttgaagacagatagagtagtttttttcccctcctccagttgtccatctatgatagatgtttcctcgaaaaaataacatccgtctctattgccaccagccaaatcagtgacacttttcctaagtgttctactggttgggaacaccctcctccggtacggaaaacggagcagttcattagcgtgtgattaattaagtactccctccgtcctataatatgaggg

SEQ ID NO: 42561 - DNA, 1837 bp, Oryza sativa
attttcgcaggcgtgctgttgccccaactgtgaaaatcgttgattttcaccgtcgttgtgctacaagcggtccaaccctccgcctgcaaaaatcacttttgtctgtctgcgaaaatactttttctagtagtgcaatcttcgtactgagaactaaccaggccatcttttttcactgttgtattccttcccggtctagctgtgttcctttttgtagttttgctgttccttccttgacatgttcatggacttctacagttttaccagatagataaattctcagccgtcaatcccattttttgtcgacctatcgtttaggcacgcaagaaacctcaagcatatatatatacaactccatgcttaaaaaataacttaacccaaaaggcaactttatgagattagagctagcagatacaaggaagcttttacaccgtcatctcatattctttacaagcatatatacaaggaagcttttcccattctctttagaaaggcactatgtacagtacccctgaagataaaagcagaaggtagtagatgatgatgatatcgattaatcaatcccatttaccgctttggatctcaagcttaattcccatgattaacaactgagatctcgacagcttaaatgttaatttgtccagtttggcaacagctagctttcagcccaacggcatggtgaagatcaggatacatatatacatggaaagttgaatttacacataattaagatgcgtattactgcgtaggtaattaagcatggcgacatttcaggggtttatatttggtgtgagataatagtgatcatcaagatatgcatgcgacagtctgacagatgatgagaaatgtgaggatatgcattcatacgtgtcgaaactcaaatggaagtattttaaatgattgatttgtaactgacctacattccaaaatattcaagaaattctaactaagaagtataaaacacgattaagataagtattactaaaaaccaaacactgacagatatgatgaccatgcttttgttccatattttaattagtctactttcaaaaacattccttcattttgtctaacaaagtaccaagtactaactctttcttccacactgtcactgacatccaaagtcaaactcaatatttcacaataaaaaaaataacgaaggaattgcattctgatacttcatgcaaaaaagatagattttgatcagttccatacgaaggaacaatggaacaacaaagatatagaacccctaattttccaatggggaaatgaaggcagcatacatgaatgcatatagaaagaatcgaacataccccaatcaagccttgcactacatcacatctacgaccaaccaatttgcaaggggcttagctctaatcatcatctgaccatatgcatacatgaatgaataaactaaacaacaattagacgacgaaattaagaatttagcttttctctaacaacacgagatcagattaaggctgcaataatctcaagaactggaaaccctagtgagacctagagcttgagagtcaggtctatcttgctgcttgacatctcctcctgcgccttcacttccgccgctgtgtgttgctcgccggcggcggcggcggcggcggcgctatggatggtgccgctgccgccgccttcggcccaccggagcccggcggaggcaggggcgcctgtggccctggacgacgacgagccggcgccgtagccgaaggcgtcggccgggtacacagggcgttcggcggcggcgtgacgggcggcgatcccctgcagggaggatggcggctgggtgctccacccgtggtgcaccgcgccgaagaacggcgccgct

SEQ ID NO: 42562 - DNA, 4952 bp, Oryza sativa
ccgcgcttggcgagggagcgctcccgcttgtgcgcgttctggtgcccccccagcgcctgcgacgtgtagaacttgcgctggcagtagttgcacttgaacagccggcgcctcgcctcgccgccgccgccgccaccgttcgccgccgccgccgccacagcagaagccctctcctccacggacggcgccaccgcctcgcccaccatcacgacggcggccttccctttctccgccggcatgacctcctccgctcgcagcgcgccaagaagatcgagctccatcgccgccgcagccgccgccacctcctcctccttcttggccaccacctcgccttcctccccatcaccaccaccaccaccactcccctcaaccttcatcgccacctccatggacacggtggtctgcgagctggaagccatggagctagcaaaacacagcacaagacaacactaatttggctttaaaatttttgctggcacgagatcgagtgagatcgagagaatacgcgttcttgggatgaatcggatccctacttatacaaggggattggaggggttaaacgcggagatgatctgagaggaatggaagcaaagttgccaaatgaaacaagatatggcgtgatcacaggaggcaggcgtttaatgtagcagagagagagagagagatgagatatgctccatatcatagccccttaattcgcatgcattaatcttcttctcttcttgtgatgatcgatcgatcgatcagtcagtactccatcttagccaacgatatttctctgtccatccactccatttggttccctttctcactagtgtagtgcaaatctttgtctctatctctctatccttactgccactaaaacacagagcaacaggggaacggtttcctaacttggacagatatgggtgtgtatgtatggagtttttgaactggagggatgccttgacgttagttcaagatgtgataggatgtgatatgtatgcacttaagttgtgatatgtattgcactctggcagtagaaattaatttaatgccaacttggcagaatgtgaacatggcatgacgtaagggcatgaagaaatggtgtgacgtcagtaagtcacaagatattttgttttaaaatgttgacatgaaaagattatatggacagcctaaattaggtaaataccctgtgagaactggtatataccctatatgaactgctacatgcttactccccctgtttaaaattataaagcatctccttattttccaaaaaaatcaacatttaaattttttattagtaattaattgaaccaaaaatgcatgtttttatagtgccacgtaatatcacaaaattgtattaacaaatattttatacgatcttaaatctgtagttgttggtcaaagtataatacaaaggtatcatccaaatattccatgacaacgcagggttaatgtagattatgcagtaggagcttaattttagggatttccaattaacttgtcttcaattatttcgatttgccacttcatctagagttctagaattaaatttccattcctcttatggcttcatcttcagaatgttttgtcaacctcaatcaatttaccgttacacaccactctagtgctataaaaacgaaacatcgacagtatggtgacactatcatatatatcgaaaaagtccaaataacccccaccccctagactatgacagaagtccatctaacgcactatagtttgaaaccggacattcaaccccctaaactgtgcataccattcatatatatatatatgcccccctaaggtggttttacaaattggtttttatttaatttgcatatacgttggtggagctttgataatgtgacatacacattgaaaatatatgttaaattttcacttaaatctttgtttttaccccttgttcgctcttacatacaagaaaagtaccgacgtaacaattaatagtacgacatcactgtacatgataaattgagctacaattggtggtacgtaaatatattatattagttgtttaaagccatgtgtttaacatcccaaatacgcaaaaccattatccaaaaccatcttaggggggaatataaaatgtattgtaaagtttgggagattggatgtatgtctggttttaaatttaaggttccaaatgacttccatctaaagtgtagggcgatatttagacttgtccgtccatatattttaattacttaaaactggcatatgaggcatttatcattcatatatatgcctagtccagagtttaaaaccaacacatatgaatccatatatatgagctgattttaaacaacattgtatctatatatgatgtttgcaatcttatatgtgccgccggttttaaacaacattttatctatatatgatgttggcaatcttatatgtgccggtggttgttagaaccgacatataatagaaaggctaccgcaaaaatcaatcaccaccatatatttgcactaattagtttcttttctggttccagcttacaatgacgacatgagtacaatggtctgtgcgtgttgcgtcttatgtataattgtaaagaatacattagaatttgtaataaagggcaataaattatgttttgtaaataatgaagagtaaataccggtttgttttcccgataatggacatttgtcctgtaatttttttcgtgaagctagattttaaaagtatagttatgttatttctcataaataaaattatacttataatcaactatatatattattttataatttcatcccctgaaaagttttttccccattttgtaggggggtgactactattccgaaactttgaaggacctgacgattgacgagttcaatagttcaaaggttaatcccatccctaattcctcgacccgtctccgttgagttcttgtagatggttgtgaggctaccaagctatccatatgagtggtccaagtttgcatagaatccctgggggttctatatatctcgatccatgtgttcaagaattatcagaaaattttgtttaaaaggtttaaggtaaaatggtaaagtataagcataattttaaattatggatagagtatcaaatttgggaccggagtatcttcatgctcaaaaggatgatgtcctagattacgtatagttaaacctcagaattttagataatcaatagatgcaaaaatatcaagatttaatatattaatatgatattggtacatttatcatgggatttttatatcatattttgcaatacatattttatcactatatgaaattttaaattatattagtaaagtgatcaatgtattgcaaagctgaccagcatgcagtacattcttaacgggtaatgaaagaaaaagatggaatctttttatgatactagagaatactatgtgccttgctgcgggatttgttaaatttatcatgacaaagattgaaatttaaaactatcaggtgaaaatgttgcttcatggtttattaagtatcctttcatagaaaatgtatgagaaaattccttccattcccctaaaattttagtagatcccttccataccttaaattttcttcactcatttgttacctctgaattttaatttggatccctctcataccctcaccgttaattaaccattagttgaccatttaataggtgtataaaattcagttttacccttcaattatgaatataataaaactatacgtttccaacaatatagctactatacaagttttcatgtttttttcacgtctaagggtaaatggtccttttataggaatcaaacagtcaactaatggtcaactaatggaatggatatgaaaagggatcaaaaccaaaattcaaggatagagggagtggacagaactcgagggtgtagaagggattgactaaacttttaagagtatagaaagaattttctctaataattgtagaacaagctgtgcactgaaagaaacaagaatgataaatgaaagacagaagatgataggaaatggaaacacaagacaagacgagctttttttgaggtattggagattcagcaatcaccattaatcttcattggagcactctatacaagagtacaagagtatagctcccttccataccacaaagtccatagccactctcatcatggtggatcttttccaccccgtaaccttcacaaacataacgggtctcccacaaacttcttgagagatcatcggatcacctccgagattggctaggcacgctgagataccaagaataataggaagaaaccttaacttgaagcccttaagaaccatactcttggtttcacagtgaaccactctcaactcaactagaactaaactaatgaagaaaatgatgaaaattaacgcaatgatgctcttagactatctcttcagttgctcaactcaaataggtttcaaaagacatcaacaagtccatggcaaggggtatttattactgtttgaaataaacaaaccaaaattgcaaggggtcgaacaatcttgtacaccaccggactatcccaccctttatatttttccaacggtaactaggcaagtagccattgggtcattaagtgttggacaatctggcaccatcgagattgtttgaaactctttgtctggcatagtggtggacaatccaccgcgttcaaaaccattttccaaaccagctggatgaacatgcggccagattgtcagacaccctatcggattgtccaattgttgccagatcaacttagtctcggacactccgagggctgtcggacaatcaggctagttcaatttctactatccgatcaagacatgaccatagttggacaatgaactagccggacaaccacactgaattgttcgatcaagttgctctagcaacttgcccagggtttttacccaattgatctagtaaattgatttaagtcactagcaacctagatctaatgtcaccgcacatagactctagcacttttg

SEQ ID NO: 42563 - DNA, 707 bp, Oryza sativa
agaccaaagatcaaactttacaggtaaaagatttaaggttatagatccagagaccaacttgcttagaacaaagcaggaaactgtagcatcttccagaaagatgggaaacatgaaaatcatggggggaacccccaatgcaagcccttaaagccaaagccacagaagaacaacagagccgaaaagaggactgagagaaatcaaccaccaaagcagaaggccgattggagtaaaaacgagagtagtgaaccggggaatggaacctgaaacgtgcttcatctctgatgcgatcaccaggagagaagtcccaacacccggaggagcaggagtcaccatcaccggcgatcaccacaaacacccactcgccgatcgccagctctgcaaaattcagaacctcatttcccccgttccttatagcccattgttattgattactgtactttgtcacctggttaataattggattagctagaacattatatggttttagctaaattaattaggatacttagccatgctagaaatattagcacatgattgggataattaatgtttcattattacttaatgatggatatttaatggtagctcacgatggttaatcgtgattggttaattaattaacatgtcacctaaaacttgattaatggtgggttgtgagcacatagttttgttggttaattaatatgtcaactaaagggctgcaggaa

SEQ ID NO: 42564 - DNA, 689 bp, Oryza sativa
tactcctattatatgaccggcttgagctcccaatgatatcactacacccagggcagttttcaatggacggtaacctcatcccttcattccagcagaatctaaagaactcacaaccccaatgaggatcaaaaccatcatcgtgttcttcataatgcttctcctgctgcttgtcatacttcctctgatatttgttgattatcttagccgaactcacttgaaaaccctttgcacagaccctatcggctgattggccagctgtatgtaccatattaatagaaaaaggattaccatcgaccttcattggtttcttcgaatcatcaaacttgatttttcctccctcaatagccgtttggatttgctgcctgaagaccttgcagtcattagtcgtatgagacccagaattatgccacttacaatacttcttcttgcccaactcttcagccgatggaactttcctcttttcctgaggtctttacccattggcatggtataacctttttgctcctgacccactcggctgccgctatttcggaatcatcatcctcatcatccgatcttctgtgtaagatgtgacaagctttcgaaatcttcagatgagaatttttccctgatcggagcaatcatcccttgaaacgccaaatcggctaactgggcatcagtcaaattcaagctgtaacatttattcctca

SEQ ID NO: 42565 - DNA, 1227 bp, Oryza sativa
accatggcagcatactccatccttcaactactgtagaattcatgtttgagaagtatagaaaggtttggtctttgaaacctgtctaaaacattgactatatggcttactttttttttctaaaacataatctatttttgcaaaatatatatactcaccgtatcgacaaattcatgattttgcaaatttccgtatccctgtatcgtcataccagtatcgcgtatctgtgcatacaccggagaggaggaagatgcaagccgacgcgattcaaattaagcctacgggaagccccgtttctgcgcttggagccgagctcgcattctcgttacgttgctcctggagccgttcgatcgctgggctgtccacgcgttgttcatccagaatggcattggtgactcatcatgctgataagtggacccgtacatatgcctcatctatctattatctatctatctatctatctattatatactaaagtccattaaactccctataaacgctctcaagctgccatgtggctccctcaaaacgctctcatattgccacgtggcactctaatataatagagaaatctgaccatcaattttcatttaaatcggtggacccattattttacatcgttagatctattttaaaaaccaaaaacctcccaccggccccaccacctctgtttagtacttttttttttcgtttgttcctttcttttctttttccaatcctaattaaaattgaacctatctttatagaaaagaatacccccacaaatagacatcaaacgcgttaaaatccattaaatatcatataaatgtttctaaccgttgtgtgccactcttaaattagagaaacgtccaaccattggttttcactagaatcgatggacacattattttacgtcgttattagatctgtatattaactaaaagtccataaaactttctatgaacactcctaagtcgccacgtggcatcctagaaacgctcttaagccgccacatgccactccaatatataaccgttgatttcattatatttgatggacccattatttacaaccattaaatttatcttatagaaaaagttaaccacccaaacctaaccccacccagcgtacgtacttatatctcatatacaactacctactatatatgaaaataataataatatacctcatgtattattattattattacaccaccctcttcctagattaactcttccttctcatattttt

SEQ ID NO: 42566 - DNA, 1861 bp, Oryza sativa
attttttagaaaaaaatgataattaatttattatttgacggcaaacattgattggtcatagctatggataattcctcataggaaattgtgattccatagtgaaagagaaaaaacttaagttataaaagacattacatacacaaaccatatataattaatggctctactgatttatatagaaaaattggtaattaatttattaaacataatatatgaccctcgagtttagaccattatttgtaaccattggatatgtagaagatctaacatattgtgtagagtccaactaagcaaattattcgtcttccctcaccatggatggtagacatgttaattcgtgtctccggcagcatgctcacatcatcatacttagaagaaaaaaaagtgcccttcatgtatatacatgtaactacctcatgcccctcttttcattaaagaaaaaaagttctatacccatgcatgcacaccgggatgcaccggttagccctccaatttgttcactccatggacggtatgttcctttgttctagtgattagataatttaataagtacaaataagtatttgaaatcaatttttattagtaaaatatccataaggactgatctgtagacaccctctgttcttcttcttttcttggtgtattagttggatttaagcaacgtgatataggtattttgggatataagttaatgtccaacttccaaaggattaaggtttcccaaccctcagcaccgaacacagcataagatcgtacatttatccttaaaagaagatcatatattttatcagggcattggaattaagtaaatagcatccacatatatgtcgagagaataattaagttggttgtgagtcaataggtccattgatgctataattaaggttaaggttagcggtttataagttattttgattttattaaaaaactaagttggatattttgatttgtaatgagaacatttaggattttttgcgtatggatgtgggtccaaaatataataattttattagcaattaaatatggttggtatagatattaaactattgatttaattaaaaaaacacaatggaattaaatatggttggtatagatattaaactattgatttaattaaaaaaacacaatggttcaaacagatcataaattgaatatataatttaaaatttacagctattgaagattctttatttatttataaaacataccaagatcaatatgtatgagatatattatttatacctatatttgcaagtgtatgcaatctttgaaagtatgataaaattaacttactaatatagaagatattatatacccttaagccttaacttaattaccatcgaaaaaagggaggcgagcaaggaaaaaatcacacagactcttatcatgcgtatggatggaagcatgtatatgtgttgggcggactcgtaccgccagattgatattaagttttttactaaagataaatctaatggtatctgatggtaaaaaaaatattaggtccatcagattaaataaaaccaatggttagatgttctcctttttccatagattttctacgaattaattagagcgttaggtgtcatctttgcactgtttcttggaatctcacgtggcagtttaggagctttttaggatgtttaatggacttttatataatagatagatatatctacgtgggtttgtgaaatttactccataatatatatttccatttttaatattttgtttttatttggttgcattgcaaagaaaaatagtatatattcaaagttaggaaagcgtttttcttatataaagatttgataggttcaccggtttaaaccatctatatacctaaatctaatggttttaatgtttg

SEQ ID NO: 42567 - DNA, 722 bp, Oryza sativa
aaactgcatgtgccattagtctggtttaattagagaagaaatagaaaagttctaatttttaaataatttttagagggcttctaaagttaaccatttgtcataacgtagggtcaaggaggctctgataccaacttgtcaggcccggaatttctatccaaaactccaaacgcttacatgtgtgtaaaccctcgtccaggaatcagccgaggcacacaataacaaattgataatagagtgcaaatatttatctaattaataggcgaatataaagtcattacagaggttgataattcctctcaaatattaaagatctaagcagcagagaaataaaataaatagaatagacgactccatcccacaagcagtttgaccagggctgtgcctaatcctccacaccttcagcataactatagaactcgtcgtctgatgaatgattgcaaggtgagtatatggcactcaacaagccacgcaacaaatatgcaagtgcaagggataacaaaggatggcatgatatagtcttatttgcataaacgacatttaacaaaaacatttcagaatttataaagcaataaagtatttaattcaacattattaatccaagctatacaacatacccgttgcataggcccttccatcctgaacaaccgtacccggatgtacagatctatctccaaacaaggaatgtaccattccaaactaggagctaggtaaattattaccag

SEQ ID NO: 42568 - DNA, 648 bp, Oryza sativa
ttttgggattttcttttaaagatagatctaaccatataagactagtaatatgcacgtgttaaacgctacagtgcaattcaatttgccacacaaggcacatgttgatcgcagcccattgagaacatagcataaggcgtgaatataaacccaaaaataacaaagtaatgcataagggcgtgaacataacaatttgatatgatacaaatatcaaagtaatagtttcataatgtgtataacaattgttggtcatctcgttaacttcttcttcttcataatgtgtataacaattgttggtcatctcgttaacgtcttcttcaatatctacatggaatgactactaaaatttaccgatggcaaaagtacatatttaaacacgagtgttaacatatagtatgaaacagagcagaccatgagattgatatggcagaaggattaaagagaactatatgctcaagtggaacttaagtgtgcatgttgtgctgctgaatatgaatttgtccagagcctagtgaaaagaaaatcatagtatttatgtaagatgacaatgttatccatgcccattcagacatcaacaagcaacataaatttttacagagcactaaatgattttatttacacactgtcagtcatgccatgtaaaagctaaca

SEQ ID NO: 42569 - DNA, 3823 bp, Oryza sativa
ggaaagcaagcgaatcgttctgatcggactagcggcctccttagatagcacacgcgtcgtgggatcatgcacgcgccgttacggagggctcccagcgcgccatctccagagacagcactccccaaaaacctcatcacccgcctacccggtgcagatctcaggcgaaggtgtgattagcgatcagaagcgacgaagcgaaacagcataggcgcgcacggaggaggaagaacactggggagaggaaagcaagcgaatcattctgatcggactagcagcctctgatcgacgtcgtaggatcgtgcacgcgccgttacggaggcagtcgtgggaacgtgggatcgtggttgcaaaagaatagagacgtgacggcacgccagcccatgcccacggcctcagcccggcgcgcgcgcgcgtggctttctgactcccacctcaaccggtcaacagggagcctccaataactccctatttaggttgagatactcctcgcttaattcctgagatggtattattatccttaacacctattatgggcctttgagatttaatagaataaatcggcctagcccaattattcgaacagaatatagggtcactgataatatgttattcgaaataaatagtgcaatgatggagtatgaaactgtgtcagtaaaaggaaatgaacctgctgcgaggactgctctgacggattctgaaacgaacggaggtggcgtgggtgccgccgtggggatccgttcaggcaatcgatcaatggcggcgggataatcgggcgcagcaggtacccaatgagcgagagttccccaaggcagccccgacggcgaaggggaggatcagcggaatcagtcacactggatccagtaccggcattcagcgacggtcaagctaggcatggagttgcagttgcagcggacaaattaagcaacgaaatccagagtaaccaatcctaatttagcacaaattaaagcttcaaagtgtagagtaaatagagacaggtaaagcaatgtgcattacactaattctgttaagcaccgacagctgcagcagacaaattttgaaggggaacaactacattggtctcatcgggtaatagagcaaagagaagttaaggggacacatgcgagtgaaacccaaagtgctcaccagacatgtggacatggcgctgcgtcgaacgccgtctggtccagagaggaataaggccataaatgatgcaaagaaaagctgaaatttttttcacatatatggctatcaaaatcaattgccggaattgtctatgccatattattatctatcaacaatagtctgcaaggctggtgaaattgagctacggttggggatgaggaatggggcgtggtgggcagcggcagaaatattccattgtgaggcaccagagaaaaaacaattggcagatgtttgttactgcatcacattgatttgtacaattctgaatcagttttttttgcacgatcataaaagggtagtcatttattcaacccgttgatatgttgatttagaaagcagtgagccagcaaataaaagggaagttcatctgtcgttgaattgctcatgacttatgataaaaatcacaatcggaagattcaaaagtaaagggataatgcaatcaaagaaaaaattacctggagatacaatggatgttattccctgagtaagcattacatcgatcacctaccgtgcaacgtgcaaatgggattaaagaacatcatgagacaatagagcatgggaactgaaaaggggaagtggcttgatattgaacctgacaatatgtcatgaggtttcgtgaagtcagtggcagctacaagtcattccaatctgaggcttggcaacatggtgaatttgtattgtgacagtaggaatggcaagatcctgtttagcaaagagagggaagtaattcttactcttctaagtgtgaatttcagaaatcaaaatggaacaatggtggaacgaagagtccacctgtctatgttgaccgtgtccatggaagatcctgaccctgttatggtgttctcctcctatttttttctatatagtagttagagaaaatacggtaatttttttttaaaaaaagtggggataccagatttattttttagatggagatcaaatggttaaaattaacgggtccaccgatttaaaggaaaatcgacggtgagattatagaatgccacatggcgacctaggaacgtttgtagaaggtcacgtggcggcttgagagcgtttataggaagtttaatagacttttagtatatacctaggaaggtagcccgcgcatatgcgcgggaattttatcttatttaacaatgttagaaatttgattaggaatgtttatgattactctaatgtaaacatctttattttttcaataatttgtgtgatgtttctttgattgctagtaaccatcgcctgcgtataaattctaaactaaaattacttaaaaccgtgcagttttggttttataagaaaaaatatatatgcaactatatatcatttatacataatgtttttcttttttttaatatttagcatatcttatttttgcactttctaaactctgagtaaaaaattttctttcgtataatatatatgtctttatgaattttaggatatattaattgaagatatttttctattaaaaatatggttaatacgactacatctaattaaatgagctgaatatgttgaaatattgatttaattgtaagtatatagtattgtagtatgaaactacggtttagcggtaaatgtctttcttaatcagaaaatatattagaaaatgagacttttattgctcccaagttgtagtttagggttgtatacttcgaactgaaattatgttagattttgtttccatcataatgccaaaaaagtcaaattttctattatattttatttaaaattttagttattttcattatatcagtactccaaaaatatttgaacattgctatttagaatgggtttcaaattaaaatatttcaacattactatttgagcattctatcaaccatcccttaaatgctttgatctctgcaatttgacatgaaaatataattgggttaaggccatacaacttggcatgggataaagacaacccttaaatgttttcaatatattgtgtatgacaaatagatcctagacgcggtacacgttatgacatgaaaaaataatataattaaaagatttttctctaatctattagtgacatcagatatcatatatgtaatttagatgttatgatcatcttaggaatgtttatttatctctaaaaagatcatttattcataaaagtgcaactaagatcaagtataagtaaatagcccctatatgcatgttaagagaaattaactacttccactgttaaggaaaaatgtatcaatatttataacaccaaattatttttattgaattcaaaattgaatatgtttttataatatgtttgttttgtgtggaaaatgttactgtgtttttttataaactaattcaagtaatttgatgttgacaaaatttaagaattacttgtaatctgaaacagaaggagttggaagaaggtcactagatgtctagcatggtataaataatgggctgaccgtttattgaaaacataaggtgggatattttaatttttaatgataaattttagtattttattttatttattggaggcttaaaggtggatagatgtggtccacaatgtaagtcaatacgcatattaaattattgatttaattgaaaattacaatagtttagaaatatcataaattgaatatacgatttacaattttatgaatattttaaagtctaattt

SEQ ID NO: 42570 - DNA, 1027 bp, Oryza sativa
tgtgcactttgaaagaaatagaagatggtatttcttttcgctttttccatgaggagttcacgctcacatggaagggcttaagtacacttcttagctttctcgattcctgtaagatcgatatccagaaaggaatttcagggttcgagaaaaataggttttgggaagatatttctagtgctccaatttgcaagaaacctagaacggatgatatccataatcctacacttaggctcatgcacaaatggattgctatgactttgtttcctagaggtgatctgagacccattaggggagatgaattaattatcatgtttgccatggttagaaaaatcaaaattgctcctgtgaaatgtatgataaggcaatggttagaaagtataaagttctctgctcctgttgagtgcacttctctgattacttggatagcaaaagggttaggggtcgttagcaaccaaattgcttttatctcagccgctcgtccgcgtattgatgaggcttatctagtgcaagggaatattttgaaacatggggcagatggatctttgatatactttttccccggttgaacaaatgaaatcccgttgccaaatgcggggtatcatttgtacaactgccatgaactaaccattcccctgcagaccatagaagaatatcgtgcaggcagaacatacagggagacgcgcaacatgacaaggaacgaacgagaaagttcatcatcctcaacacccgtgcagatgtatgaggcaggttgggcaccaactggggatgcacccgggtggacccaagctacacgccatagcaccggagtctcgacctagacaagcgctagtgaggaccggtggcatgcgcctcatgacatccaatgggaggacaatcaaccttccagatcaagagatgtgcctccatctccaagtgaatggcgctcaagttcctctcgttgggacttgggtgaaatcactaggagaatagacacccttgatatgcaaacaggggagatccagtacaacctcacggaacacatagctca

SEQ ID NO: 42571 - DNA, 1185 bp, Oryza sativa
cttctggtatattatggttacagagttcatccacaagcgcacggatataccattgtagcatttcacccgtgagtattccaagggtatcgtatttattttatcccgtgggaagatcatgtagagagaactcaactaataatttatatattacttatgataatcatattctaaacaggggttaagataatccaagggtagagtgacacacaagcatttctactcatcctcttaataatttatctaagctaggtggaaagaaaagagaaaggaaatctattcctatacttctaatatacatagtatacatacattctagttaactgatatactagctaataccctctatccgatgccctcctggtacttcgagaagtcacctctgactgttgttgatagaaaacacgaggcctgggagatctgcttaactccagtgcaggtccaaaactcgccttcagatgtatgagcgtgccagttgatttgatcctacaatcaacaagaaacgaagacaaagaaaccgcgattaaatccataaatgatagctgatcggctaggtgtcgatgacatatcatttattttaggccgatgtcatgcgtacatcgatcggcagtcatgaataattaaagaacaagtaaatctactcgaccggctgtagatattaacaatatataacccttatgacgatatatacttaaatcaagtgattgggatagatcggtcgccatgccgagactgtataaatcacttagatcgaaatataaattaacaatagaactatatacgttcatatcatagccgatcagatagatctagcatgtatcggctaatactccgatatcactccatattaagatattaaagcaagtagaatatatcaaacagaaccataatatacttagatgcaacaagatcttaacataaagggcagatttaacatgtcaatcaagcacataggataactatagttaaatcaggtaagatcggttgaaaccccgatgctaccctaatcggcaaccagaaggcaggctagagattgatattctaagcatgacttaatatatcaaactcaaccgatgcagcattaagtatgaaagaagaacaatatctagacaatcaagccggtggatgtttcatagagtggtagatatcttatataatccaagctaacgtcgctatctagcctaatcg

SEQ ID NO: 42572 - DNA, 942 bp, Oryza sativa
gtggtaaccatctcaccgcacgattatctgaatgtttaggtttcaccgcataatgggctcgtttgggacacgtaggcctctttcgtgccagcctcctcctgcgtgcttgatcccaaccgacgacgtcccagagctggtcttctccccctctgcacccaggccccatgcccaacctgctattttgagcgggagtgtggcattaatggcttttgttttcataccacggatgactgttgctgtgccaaaattgaagtaaaaaaaacatggaagcagcagtagtacgatgtacatttctgcacaaaaaaggtgacacatcaaggttgttcaatgaaacgggatatatttgtgggactgctgtgctgtgaagaaatgtatttgcttgagcactaaattttttccgaaaatgtattcatgattggttcactaatctaagggtatttatattgttatttccctcacgatcaagaaattgaataaaagaggggagcaggtgataaatcaataaattgacatcaactcatttgtagcaagtacagaaatattgtcttgtttcatatagctgtagcactaactgagacaaatcttctggggtttgaagagagcaacaacttgttaacatagttttggttcatatacttaagagcttccatcttgccaatatattagttcatagcaatttgtttaaagttttatcactcctttggatagactctgaactctgaagtaatatttttctgttgtacatcaaaatatattataagaaccatttagttttagatgttgatggtagccctcccttttgtcatgtctcacttgaaattcaggaacacaatggataagatgcatggactacttacatttttttgtcaatgaaatgtaggccatgcctcgggttactcatagatcaaagctccctaacataattgacaatgatcaagaaca

SEQ ID NO: 42573 - DNA, 1164 bp, Oryza sativa
agtagaaagaaaagttacagccaaaaacctaatagttggcatgtatattatcatatagtagtaatgatatttatatagcataaatcaaactgttgggtaaagacctggcagtaccttcattaaaaaaatgatatttatatagcatatatatttaattatgtgttgaatatgatgacttcttggtttgaatatgacgtccattttatttgtttttcatacacatacgcatcacatacgatatatatctatttcttttataaaaaatattagatattcattttaatactcttgaattatgctgggcttgcctttggtcaatatgagtaaccactactacagatttggtttttttttatgcggctaaaatcgacttttgcatgtggatgggcggcccacctgtgctcaaaggtctacgaaaatcggattttcccatatgggcgcttaagctgaccacatgagaaaaggaaaaaatcatgaaaaaatatatataaattctgaaaattgaaaactaccccactaccccgatacgctaaccctagaatcctctcattgtcaacgccatccttgtcctcgccctccggttggcgtcggcgtgcttgtcctcccatcaccgtcgccgtcatcgtcgtcctcattgcgtcgccgccaccgacggatccgcgcggaagggagaggggcaccggatccgcgcggggagggccgccaccggatccgcgtgggggagggccgtcgccactggatcagggctggggacggcagccggccgccgctggatctgcgctcggccactcctccgtcagcctctcgctccctctgccagacccatgatgggatagccgccgtggccctcactcaccgagagtgaggggagaggggagaggagtggggagaggacttagtgacagagagaggagggcagaaataaaaaagagtggcaagagagaggagtattttctcatgcaggtcacttcatggatgttgttacttactttgtgttagaataaatgggctaggcccgatttttctattaaaatctcaagggcccataataaatgttaaagataataataccacactgggaattaaaagtggagtatctcaacttaaatagggagttattggaggctccctgttgaccggttgaggtggggatcggaaagccac

SEQ ID NO: 42574 - DNA, 1804 bp, Oryza sativa
tcctgcaccccaaattttaaagtgccaaaaagatgtctctacaagataaatttaacaatgtatgctaaaaatgtctctaaagtgtctctagagtaaaaatattttaggctattttaaaagtgcctctaaaaaatatctctagactatagagcttcaaaacttagagacattttgaaaattatctctgcaaaacttagaatggtaatatcgtgcttgatacgcctgctcatatgtttttctccaaaaaaaaattctcaacttaattatgctcgctattggcatggtgatttagctttgatatgctaacaaatgcccattgtcatcatcaacagtgcacctttctgccattatttgtcatatactcctatatttcacttttgttctgtgtttatctgaaccaaatgaaaatctgccaccttaggacacatccacatggaaagcaaacggtcttgtctgcttgcatgcagtgaattggacttgtggacctaagattgtgacaattcggctttgtttgacctctccgttggctccttggagatctaaagaactcaagggagaatcaaacaagccagctattactacctattagtcttgcgactcaaggtagtaatgatcacctgttttgtaggcaagatatccaggggtagatatttagggttcctttgaaacacataattaaaatagcgagtaaaatagataattgcaaagcacagaaaaaaaaacacaggaatatggttgtttgattaggccgtaggaaaaacataggaattaaatgagagagatatactgaaaagaaatttttcaagagattgaatctctggctaacttaaaaaactctatgggtatgtttggaaaataggttaggagaggtggaattgggaaatagaaatgaatggagggatatgataaaatgaggtgagatgaatgaatggctaagattgaaacttacctattggagagtgggaaatcatatcccaaacctattttccaaacattgtctataggattgttcatatcatacgaatttaaaaggaaaaaaatatgattcaattctctatatcaaagacctttacaggaattttccctatctaaagtagtgaaaatactaaagtttttcactaccacaaagcgtcacgtcatcaaaaatttagggctgttggatgcagcaaggaattaaattggtgccattggatctgaaataaacatgagtgaaaaatcccggtcaacagtagaatcctccagagttttcacgtagccaacggtccatggtccacacagcagacgaaaggtggcgaaaaggagaagcccacattcacggtagtgtatatataggaatcactgaacaggtgtaaaaaaaacccatctaatcccagaagccagaacgcatccatccacatccactgcctcctcccccgttgcggctagcagttaagttcagttgcaatgttcttactctttacgattatagatattcataccctgtataacccttacgatattacgcacagtttgcatcaatgtacacctacctctcaaacaggtcattatggtcgcgcaacgtgcgacttacgtggctagtaagatagaaatccctttaaatttcctatgattttcatacaaatcaattaagccttagtattaatttaatagggcattagtacctactatatagattaatttaacagggcaattttaatattctgagatgcaaatccttcaaggtaaaaacacaatgcaactcatgacaatgaacgaggtactatttttattttcttggctcacaagtcttagcacaccgaagttt

SEQ ID NO: 42575 - DNA, 2611 bp, Oryza sativa
gtgtaacattccaaaggacaatattgtcattcagtaagcacaccctctctccttcattcaaagaaaataagtaatataataatatgtaagaagtaccaatgtaaatgagcatagaaaaaataaaaatcaatgttccttggcaaaaaaaaaagtgtgaagcaaaattactgctttgaatggttcccgagtgttatgatttacttattggcaatcattcggattctatagttcggcattgccaagcacaacacaaacaatatgccctgatacatgtgttatctctctctttgttttttttttgtcattgttgtcagtggacctccgttagcatataagaaaagactattttgcccctaagatatcacacaagcagttaagcaaatgtattgcgctaagcatagtgagattcagttccattctttcactagcatcaaaataatagtatatttaattgcattattgagaggactctacgcgtcggaagccttatgccccctacatcccggcaagcgtgcatgcccaccaaactcttgggagagcatgcatgttgtttccgttgcttgctactccatcatgttcgactgtacacccatccatctctcgctatacttttagtaaaactttttattatttttttctaaattacttatttaatttacaattcgatcgtaccaccgttgttgtaactaaatttttttaaaaagatccaaaataattatgtttctttgataagaaaatatattattattttcctaactaaaatatttatatattgcacatgcatcattgagttgtaactattggaacatcatgaaaacttgctggaacatcaaaagaataccagtataccacatgcaatattttcaaatgaattagtaaaacatccaaatagcaccatatgcaacatttaaaaaaaaatcatagcaacataatagcttacaatgtgcaaaagagttaaaaacattgagttgtaactattgaaacaacacaaaatctagttgaaacatcataagaataccatatgcaatattttcaaatgaattagtgaaacattagaaatacttagtgaaacatccaaataccatacgcaacattttaaaaaattcatagaaacacaataacttatattatgcaaaagagttaaatttcagtggtactactaataagagggtagcgcgttgattagccgatcgcgcgcctcatcccgatctggccgacctccctcccacctctcgattcccacgccctcccctagtaattgttttactagcaatttcatatcttattatatataccgtcctattttttctgaggagttaaattcctacttttacggatgtagtgaaaccatctcgtcaagcggcaaatggggccgaaacagccgccaccgtcctcgccggcgccgctcggacggatgaagcgttcctcatcgtgcctcccttgctcggccgacatagccttcctccaacgctgttgccgacggagctagggttgggaaggagagcggccggcagtggagggcaggttgaggtcgttgtcgctgccggatttggtaagtgtggccggtggccggtagcggaggcgacttcggctccatccataccaactgccccgttgttcatcgtcgccgatgaccctgatctgtgcaaccataggcctccgctgcttggacatcggctgatctgcgcaaccccaaccctccaccaacggggcccaggcggttatagtcctcacctagagggaggtgacctccgtcgacgtgatggtcgacgtcacaaccgtggattcacattaggccgatgaggacgccctctgccataacagtgtgccctaccaataaaagaataagtaaaatagttacgaacaattgatggtaaatcaattgttgaatggattttggagaagaatttgagataattaaattactaaatggattctagcgagaatgcaaagtaaaagtacatcttttacttgatagtaatatactactttgcaaagatatcatatagtaattcttttactctggtacaactgtagaaaaacgaaagcaaagtaaaagtaaatcttttacttgatagtaatatactactttgcaaatatatcctatagtaattcttttactcccgatacgattgtagaaaaaacgaaagggataaactccgctcagggaaggagtgggaaccagaggttgggctagttgaaattgaaaacggaaaaaaagaagggggtggattgggaaccggaggcggaggcgagggaaactgaaaaaggggaaaaaaggaaaacatggtgaagatcgctacgtcaggcacttgaattaacaaacaacgcactgcgcatgtattagcgctaccgtaaatttcagttgaaacattctttttctcacgtgcgaaacatcgaaactcaatggttgaaacatatatttcatccaaatataatcatgtgtgatattttattataaagatttaattataacgaatatagcagtgtaatcagatagttgatccgataaataatttttaggaaaccgtttaagtattgtccatagaccttctgcacgtaacatgtaacatctcatgcatgtactggctactaggtggtaaacaattca

SEQ ID NO: 42576 - DNA, 2710 bp, Oryza sativa
tcctgcccccgcattttcacttgagacggagggcaggggaggggaggaccgcgccgccgtcgctgccttcccccctcggccaaatctaggaaggagagggaggaaagggtgagccacgcctccctctccggctggatatgggagtgagaggtacgggaagggtgggccgcgtcgccattgtcggtgccctccccccttttcggatctgggaggaagggagggtggggaggggagggctgcgccaccgccgcccttcctccctccagccggagctgagaaggagagggaggggagggctgagtctaagggagagggagagaagagaggaggagaggcgaagtgacttatgcttggatgattcatgttatctggttcataatactgttgaacccgtttttgtaagcagacctcataaggctacgcctgcaaaagtcgatttttgcaaaggtggccttaggaggtccgcaagtaaaaattaatttttgcatgtgcagccttatgaggtccgcctgtgatgatatatattttttcgcagatgggcggcttaagtcgtccatctggaatatatattttcgctggtgaatgaccatcatttccccatccacgacaatgcaggtggcattttgatccacctgcatagtgaaatgggtgtcgtctacgaaaattgtttttccagtagtgagttaaaagttggtttattttgggagtataacaactttcaaaatttatcttatttaagaaaattatataaatattatttgttttgctttcagatgaaagttttttcaattattttgatgtgacttgctttattattaatggtactataagtctaatttaactacaccatgcacatttacgctaaatcttagataagatgtacgaatatttaaatattatgtttaaaagtcaaaattgttgtatatgcatttaaaaacggattgagctatatgttgtctatctgtcaagcttatccgtttagtttattgccggtatatatgtcgccacaacgtaacaacaatgttactgtctggatagctagctgtacgtgcacatgtgctataagtatactaggggccctattcgatctccacatttgaagataaattttagttacacgcaaaacgacattagcacatgattaattaagtattaattattataaatttaaaaatgatttagttgcttttttaaaataacttttatatagaaactttttaaaacacaccatttaacatgttacaaaacgtgctaatggaaaataaggaagctgaaatttggagttataacagggccaattacaggttgcaagttgcatttatatacatataccaatatataagtatgtatcaagtgaatgcgtatatatcgaactaatctacgtaccaattttaaattgtcctagctatattcatattttaaatatgtgggatttgactgtgcgtggcctacatgagcgaattttatccctttgccaccgcgtatattccaatgcgatgtgccgttgaatttgggaattcctatatgtgatatttcttttttttcacgaatagaaaaaaggattgcacattaatatattatagcagagttccggttacacaacgtaaacaatcagagagccattgcccgtggacaaaggaagaaaaaaccagcaaaaaaaaccgaaaagccactccctatacagagggagagtggtggcgtagaaaactccctacactcccaacaggccccaaaaacaatggtgccagcagaacaaaaattttgtaatctatgcaatcacaaacactttacccagcgttaggtgtaaccgtgcaacgtggaaggatgaaaactgacagaaacaatatcatttaaaaaaatgattattggtcagtcaaaatttacatacttatcgattttattattgaatgttattgcaacataagagattagaaaactcaaactttatatttagccttgatcttgacttcttgagcagttgagcttgagcacttcaccgaaaagaggaggagcagtgcattcctggtgggcctactggccaacctccaacggacctcaaactgaagaaaccggcccatcctctccgttacggatcggcctaaaatcgtcccggcccgtaaactcaagcccctcccttttaagaggacgccgcttctagggcttctcccctttcttcctctcctgctcctcgcatcagcggcagccgccggcggcgacatcgtcgggcagcagcggcggcggcgacggcttggttgggtcgccttccgacctcgctgctctgatgaaccctcgccgcatgcatcgcgatcttgatattcttgacatggaattagtagcgtctatttttttatcccccttacggttcttgatctccagcgcttctctgaattctccggttcttcttgctcgctcaatttacttgttttgttttttctattgattggttgcgtgatcacatgagctgtggatgcatgcgatgttgcaaaaccgagagcgctgttgattaatccgatctccctcgggcacggtttgctcgtgttcttggaggggctcagtggagctcggatatgaacccttccatggagtttgtcaggctccctgcgtcctcccttgtacgcgagtttggaatactctccaacatttcttcatcccttgctttctatgttttttttttcctttcaaaatgtattattatattgtgtctttgagg
